United States Patent Application Publication US 2007/0161031 A1 - sequence listing, part 14

SEQ ID NO: 16987 - DNA, 2300 bp, Homo sapien
ctactaaaaatacaaaaattagccaggcgtggtggcatgtgcctgtagtcccagctactcaggaggctgaggcaggagaatcgcttgaacccgggaggtggaggttgcagtgagccgagattgcaccattgcactccagcctgagtgataagagtgaaactccgtctcaaattaaaaaaaaaaaacaaaaaaaaaaccagattgataattacatacaactagtggcttgtgaaagctacaagatagaaatgaagtatctcctgacaatgggctctgtctggcgtgcccttcctatgtaagttctaactattgtccaggcctcattcagatgtcacatgtttcaagaaggctcctcacccattcagtcccttcccaggagcaacctggggctaggggtctagtgtggcagctcctgtctgccaggtatgagttggtcctgtcctctgttctacgacctggaactccctgggtctcctgcttttggagagggtacacaaatagtggcaagggctgtgtgcactggagacaggcttgacctatttattacttatgcgaccttgtggtgccaaacaaggaggtggtaactacctcacaggacttaaatgaggagatgtaaagcacgcattgtcaagtgggactaaaattggctgggggtaggctgggcgcggtggctcacgcctgtcatcccagcactttgggaggccgaggtgagcgcatcacctgaggtcaggagttcgagaccagcctggccaacatggtgaatccccatctctactaaaaatacaaaaattagctgggcatggtggctcaggcctgtagtcccagctactcggaaggctgaggtaggagaatcgcttgaaccccggaggcggaggttgcagtgagccgagatcgcgccactgcactccagcctgggtgacagaggctgcagactccatctcaaaaaaaaaaaaaaaattggcttggggtggtagtgaagaaatctagctattacaatggtttgtggccacagaaacaaatacacagcgtactagtggtattaaattttatgggaagggggtaggtaggaataacgaggttgagaaacaaggatataaagtggttacctctgttgcttagggcgcctagcgagctctcacaaaacacagtaatcctcaatgttactggaagaggcagagctcaggagtcctcccttcgcccagtgtgaaaacccggaggggaggatggggtctcgtgctgctcagtcccccggagccccgcactccgcacgtcaaccggcgctctcgcaaaggttctctcagcgtctccaaagcaatctgcaaattccccaaccgagacccaggcggcaactgagcagaaggtaaggggctgggaacggcacccaccccggcagcccgctgcccctgcctcggctgaccaccgctcgggcccttccacccgggggttgtcccgtgtcgcgaggccagcactggtggcggggaaaggagcccgccgcggctgagggcgctggacccccggcaggctgccccgctgacctgctgtgcctcaaggggtccgcctgggaaacaggggaggccgcgtccgctctcacctgagcgcccccaggctcgaggaaccgccctcacgggacgcatgagcctcgccaggtgccggtcaggaatgcaccgcgttcccctgcccggctagactttgggagaggcgggtccgctgtcacctgacctccgccacctgactcgtggggccggatctcggcgagatgagctctgggagttgtagtttccgcgcgtcttagacggacagagcgcagctgggtcgggccggggcgcagagatcggggctccggcgtgagggaagatgaggtccgctgccagggacacagagactcttggagccgccagcgcctcccggctcctttcgtgagcgaagctcagaccgccctccattgggcggaaatcagagcccgtggggcggggccccctttaggtcccgccttccgccgcctctccgcctatagccggggcccgccgagaggttgcgtggaagctcgccttccccggccagtgggaagacgagaagcctccatgttgggtgtggctgaaagattggcaggcgactccccgcccctgccccgcccccctgggcgaagagcgcggacttgtggggccgctggctgcagactggagctgcgcgggtcagggagataatggctgcgcggccgatcaccctcggcattgacctgggcaccacatctgtgaaggcagctctgctgagggccgcgcccgacgacccatccgggttcg

SEQ ID NO: 16988 - DNA, 2300 bp, Homo sapien
agaggccagaccatacacaccatgtccaggcacgttcctggtgttaccagaattagggggcatgggcctgcagttttggggaaggccctgggaccagttatggcgtgagggaggggggcaggaagcatgaggcctactgtgcctgggtcctcatgccccaaactgagctcctccaggcctgctctgccggcacggtcagaagattacaggcccttgggttgggagacagggctgtcactgatttgctgggtgaggtcacgcagaaggtggcttgctgtagctcctcacctgtccctgccccccttctacctaaagagcaaacctggtgccttctctctggggcaggtagggatctaaaaaagccaggctgggccgggtgtggtgcctcacgcctgtaatcccagcactttgggaggctgaggcaggtggatcaccagaggtcaggagttcaagacaagcctggccaacatggtgaaaccccgttctactaaaaatacaaaaattagctgggcatgctggtgcatgcctgtaatcccagctactcgggaggctgaggcaggagaatcgcttgaacccaggaggcggaggttgcaatgaaccgagatcgcgccactgtactccagcctgggcgacagagcaagactgtctcaaaaaaaaaaaaaaaaaaaaagtcaagctggtgcagggagggtgaagcttaggacagctgtcagctggtccagcaatgtttcctcctggcccaggcctgagccagtgctctaagctcagcctcacttgtcgcctttatcagtggcttctctgcctccacccacctgattgctggagcttctccagcacacccaactgagataacacacccagtccctatggctccagggcggggactttcgcttgacctactgcccaccgggcaggcatttcttctcattctctgaacgctgtcgggaggtaggcaggagacctgagtctttcctgaggtggtcttttctggctgagcacttctctctgggactccccacctctgtcatagggttgtgtccctctgtgacaccggcgtctgagtctaacgtcccagccttccttcctccctctgcctagtctaatagcacccagcacctaaaacaagccagagggcggccaggggcctaggctagcccccggagggtctactcaggactcaagtgccaggagggaggcctggacttttttgccttaagggctggagacccaggaaaagttcgaagaggaaacgctcatcgcagctatacgagcgtccaccctggaccaggcggcgagtgggttggaggagcaaggctggacaggaagggggcaggggctgccacggcaggctcgggagagccccacccccagatctccctccgggcggcggcgcaggctgcagcggaggaagcatttcctcattccagaggctgcgactcatggacgtcgggatcggcgcccgcccccagcagctccccgtctggggacacggaggcccgggaagggggcgcttttccaggctcctgcagccaggcctttccccgtggccctccccgccctgcgcacgcagtctgggctctgtccagggtctcgggaggctctcgggtcccggccatccctgtttcgtggctgggggaactgcggcccgctccggcaaagcggggacccgagcccttgccgccggttcgcaggagccccgggttcgatgctctgtcaacctgcttggggtgtccgtttcccgctctgcgaggtggggtcaggccaagacgaggaggagcccgcgcaagcgcactcaccaccacggcggtgaccggctggcccgggatgtaggacatctcgaccctgctctggtcgcccagcgccgctccgagaagccggcagcagagtacccgcggtcgcgccctcgctgcttaacaaaggccgccccgctcggcccgccccctcatgaatagttaacaaacctccagccaatcactggccggagcgccactccgctttcggaagtccctgcgcgtgcgcagaaaagcgggcagagggcggagcgtgtccggggcgcccacggcgcaggcgcggagggcggggcgggatctgggcgcgtgcgcagcccgagacctcccggcagtcttccgagcaagatggcgccgcgggcatttcttccactgcccgtctgagggaacgctaagtagtgtgtccggcgccgtgttccaggtaactgggccaccgtggccggggaacgcagacgcgccaccacctcccggccggcccggaccctcaatctcctcggcgtctttggaagatcc

SEQ ID NO: 16989 - DNA, 2300 bp, Homo sapien
ctacctcagccacccaagtagctgggattacaggtgcccaccaccacgcctggctaatttttgcatcttatttttagtagagatggggtttcgccatgttggccaggcttgtctcaaactcctgacctcaggtgatctgcctgccgtcggactcccaaagtgctaggattacaggcgtgagccactgtgcccagcctaaatgtccaaacaatgtttaatcttccctagacatattctaaaaaatacagcttgactttattttttcttatggaaaggactgtcactaaatgaaatggaactaaaatgacaccatatatacctgaaagtagtggttagtgggagggaacgctggcctgtgaaaggtacacccagcaaacatatcaagagcaaattaagagacctgcatttgaatcctggctctgtctcttcctagctgtatctcctctgggagaagtatttaacctctctgagcctcaggttccttacgagggagctaacaataacatctaccctgtaaggttattgctaaaattaaatgagaggatcggtgtagagtagaagtcacaatgccagcatatagggaactcttttttttttttttttccctgagagacagacggagtcttgctccatcacccaggctggaatgcagtggcacgatctcggctcgctgcaacctctgcctccagggttcaagcgattctctttcctcagcctcccgagtacctggcattgcaggcgcgcgccaccacacccggctaatatttatatttttagtagagacggagttttgccatgttggccaggttggtcttgaactcctgacctcaggtgatccgcccacctcggcctcccaaagtgctgggattacagacatgagccaccgtgcccggcccagggagctcttaatacatattaactgttactgcttcttaggatgttaataagttctttccttatgtaggcccttagggcccgtttctgaatggcctatgtgtaaatacaaggacttaacacaaggctatggcccattccttgctctccaggagtcaaatctcggcgattttgcatcagtggcagcctaagcgttacagcaggaaagaactccacaaagtgtctcacgcttcatttaatctgaagaatattacaggctctccgtcttcagatataaattatttataacgttacagaacaagcagcgaattcaaccacttaagaactaaggaagtctacatggtgttaattgctggccacagtcctcccgatctggttttttaaaaaagtcccccgggcccccatttcagtagacgtgcaccatgccgtagaggaacgtccagaacaggacgtaggtgaagaggcccccgatgaggcctcctgtaaagagaggtctccgtgatttgaaatatttgttccacctccttcccgccttgagaatgaggagcagggagagcaggacggaggcgagcaggtagaagatgaagccgtagaggccggtgaggccgaggatgccggccgtggcccccgacagcgctgacaccgaggtccggcaataatccaggacggcggcgttgccccgcacggccgcctcgctgatgaacggcggcccttcccgcttggccaccaccgcggccatcgcaccagcccgggctcggcctctcgctttctcgcggaacaacgcggagctgcggagaaaaccaagttacaagtggcgcccggagctcggtgagttgggttcacgccgccccctccccctggagcttccgagacctggcaccagtcctgggcctcggatcttccaaagacgccgaggagattgagggtccgggccggccgggaggtggtggcgcgtctgcgttccccggccacggtggcccagttacctggaacacggcgccggacacactacttagcgttccctcagacgggcagtggaagaaatgcccgcggcgccatcttgctcggaagactgccgggaggtctcgggctgcgcacgcgcccagatcccgccccgccctccgcgcctgcgccgtgggcgccccggacacgctccgccctctgcccgcttttctgcgcacgcgcagggacttccgaaagcggagtggcgctccggccagtgattggctggaggtttgttaactattcatgagggggcgggccgagcggggcggcctttgttaagcagcgagggcgcgaccgcgggtactctgctgccggcttctcggagcggcgctgggcgaccagagcagggtcgagatgtcctacatcccgggccagccggtcaccgccgtggtggtgagtgc

SEQ ID NO: 16990 - DNA, 2300 bp, Homo sapien
caggaggctgaggcaggagaatcgcttgaacccgggaggaggaggttgcggtgagcccagatcacacaactgcaccccagcctggacaacaagagcaaaactccatctccaaaaaaaaaaaaaaaaaaaaaaaaaagggggcaggattaggctgcagacagtttcttagcctgggtgctgctgactttttgggtgggagaattctgtgttgtggtcttacacacatccttggacatgcccttaaacattccacaatgcacagagggctgtgctgggtgtcgtaggaggtttttgtttgttttctatttcatatttcacacttttctggtcgatactatattttcccagaccctgaggatgttgatttcagagacagggtttttgctctgttgcccaggctggagtgcagtggcatgatcatggctcactgcagtcttgaactcctgggctcaagcgatcctcccacctcagcctccccactagccagggctgcaggtgcaccaccacctgtggctaatttttaaattttttgtagaaatggggtctcactatgttggccaggctgatcttgaacccctgggctcaggcaatcctccggcattggcctccccaagtgctgggattatgggcgtgagccaccgcgcccagcccattgtaggatgtttaagagcattcccggtttctacccactagatgttaggggcaccctcccctgcagttgtgatggagcaaaatcccagctggctgagaaccacccgactgaaaggctgagaggcagggaaggcagccctgtgactcttccttagaggtggcccttcagtggggccgggagcggctcacaggggaggagacacagggactgagggcagggaaaggcgtcctgagtctacactgccccgtggtccttctggagtttttgagagccatgggagtggtcagtgcccatcccggcaggtccctttcccaggtttctggcagcctcttccctcattcctctccctgtgcacacaagacagccccactggaggagtccattgggacccaggggtgacttttgttaaaacctggaaaattgtgtcccataccaggaccacgttcctgggagggggtcaagaaaagtgagctccacatggatccctacctgcagacagtcactgggagggtcctggatgtttgcgcctgttactttcttacagaaggcccaccttcagctatcacttttctttttttttttttttttttgagacggagtctcactctgtcgcccaggctggagtgcaatggcatgatcttggctcactgcagcctctgcctcccaggctcaagcaattcttctgcctcagcctcctgagtagctgggattacaggcgtgcgccaccgcgcccggttaattttcgtatttttgtagagacagggtttcaccatgttggccaggctggtctccaactcctgacctcaggtgatccgcccacctcggcctcccagtgctgggatcacaggcgtgagccactgcgcccagcccattcatcactttcttgtgatgtgggtaaaatcagagcaccctctggggacagacctgtgaactggaagtaatggcgcaggaagaggtggtggtcaaggttaggtttggggttggtctctggggagcagcgaattggtaagcaacatttttggcatctaggggatggatgtgcagcacccagggtcaggggaccaagattccttgttggcccctccaccaacccttcccacctccactctcctctatcattcaggccccaaccctgccctgtgctgtgggtggagtctccctctgctggaggagaggggcaattgcatcgctctggtccgtagggcacgttttgggtgtgaggggctgagctggggtcgtccacctcatcatcttccttttttgtttgtttttgcttttgtttttgtctcttttgagatggagttttgctcttgttgcccaggctggagtgcagtggtgcgatcttggctcactgcaacctccacctcccgagttcaggcgattttcctgcctcagcgtcctgagtagctgggattacagacacccgccaccacgcccagctaatttttgtattttttagtagagacagggtttcaccatgttggccaggctggtctcgaactcctggcctcaggtgatccgcctgactcggcttcccaaagtgctgggattacaggcgtgagccactgcacctggcacccatcatctttctttgactagcaccatagcgtccttgttggttagaacccttccaacctatctcacactg

SEQ ID NO: 16991 - DNA, 2300 bp, Homo sapien
gactcaatgtggcaccatctctgtgacactcatgttgtcctgtgctggggttgatgggcaagctcttctccagggcagatgcaattcaggcgactcctgtgagactctgaaagtccacctcccctctataccttaccctggagcagcactgtcagggtgacgggcatcttcttaggggtgatgtcactcggtggcggctgctttagtgagcattggagtgctgtgttagcagggggctgaggaggaggctggcaggagagccaagatgacttcagcccctaaaattcgcagtcatgactggggcagggtggaatcgaaatgccctccctgttgaaaaaaaaaaaaatcagggccaggtttgtccactcattcaataatatgtctagaactattatgtggcaggcacagggacatacagagatgtccaaaggcatggtccctgctctccgggagcttctggtcttagcatgggacacagtcactaagtcaacgagatcctactggatagtgacaggtgctctaagggaataagatgagataatgggatagaaagtggctgggctgggactgggggctactttgggtgggcaataataacaggcctttttgaagaaatggcagttgagttgaaatggatgaaaagatgcaaagatccacgctttcccaaatgacagtttgagagcaaaatacaggttcccagccccatcttagatttcgtgaatgaaaatttgaggggcagggcctaggaatttgcctttttttcttccacatgattcccatgcactttgaaactggacaccttccttggggcttttactttagaatcacactgatgaatttcagggtaccttccagttccccgagtctgtggcttagggaagggagcctctttgtgtgtgaaagccaggggtagggagaggagcaggactgcttgtggtcagactgcaggatgcagaaaataagcgtgcgcagctcctcaccacaccgcgctcacccagggccctgcgtctttggctgtcaggagttctaaacctgcccccccggaggccctccctcatcccactcccactcctgttgaattccacatactgagagggttgcagtcatagctgcatggatcagttctatttcttgtgcgttgggaaccattccaaacagttggtacatgcgcactctccaggcatatttttaggatcctagggtgggttgcctgtgtctccccgcccccaccccgtctgccccccacccccgcaccatccgccctgagtgtgggagggaggtcttcatgctgccggcactcgggacctgcctgaccaccgactccgccggagtgtgggcttttaaacctgcagcagctgctgcagtagaaacgcgcattagtcgcagcagacacaggcagcctcaggtgggacaagtcttgtctcttccagcctgtgggggagccacggcttcccccccacaaccaccccctgcccacggagcaagaatgtatctccctggcaggagacctggcgcgaggtgaatggagaaacctgttgtgtccccttccttcctcccctggcctcagttccccatctattcaataggaagaaccctttgggatttctttgcgagagaaaggggagttttgctttaaacggagctcttcccggccgtgcgcggtggctcacgcctgtaatcccagcactttgggaggccgaggtgggcggatcacctgaggtcaggagttcaagaccagcctggccaacatggtgaaaccccgtctctactaaaaatacaaaaattatcacgcctgtagtcccagctacttgggaggctgaggcaggagaatcgcttgaacccgggaggcggaggtagcagtgagctgagatcgcaccactgcactccagcctcggcgacagagcgaggctccgtctcaaaaataaatgaataaataaatttaaaataaaataaaaaggagcccttccccctttcacttcctctcctccgcgatcgctgctttcagctgggcaacagcacagggcggtcctgcgcatccggggggctgcgctcccagaccggtggctggggagtaggttgcaggggtgtcactgtgtcaggggaggaggaggaggaggaggaagaagaggtagcggcaaggtcgcggtctgaggttccggtgctcgccgccgcccagctcccagccgaggctttctcaaccgcgtcaataaaaggccgccccgacccgcccccgcgccccgcagccctgccggacaccccgggctgcagctgagcgggcgcagacgggccgaggcgggcgc

SEQ ID NO: 16992 - DNA, 2300 bp, Homo sapien
ggtgaaggctgttcaaacacagtgagttcatgtctaaaatatgttttgtttccctcattcctttccccatcttctagttactaaaagatgtaactgaactgcagatccttggtgaaatatctttcaacaaatctctatatgagggactgaatgcagagaaccacagaactaaggtaattcctggctggcttctgagtagtgcccaaggaaaattgtgcctaacctttgagcacctccacagacattctgttgccctcttcctgttttcagccttaacacttctgatcttggctctgccatcgctgcctttgtgacctttgagtgagtcagcttcttatgaaataaggcaattaagaggcctaagctgaggagttctgagttgaaataactaggctggaatctgcagtatatactttgatttgaaaatggattgattaaaaaaaaaaatttcgcagctgggcgcaggtggctcacgcctgtaatcctagcactttgggaggccgagacaggtggatcacctgaggtcagaagttcaacacaagcctggccaacatggagaaaccctgtctaccaaaaatacaaaaattagccggacatgatggtgggtgcctgtaatcccacctacttgggaggctgaggcacgagaatcgcttgaatctgggaggcagaggttgcagtgagccgagatcacaccactccactccagcctcagtgatagagtgagactcagtctcaaaaaataaataaataaataaaaaatgaattacctaagtgagaaattgttttttgtatccagtaactgtcttagtgtgctgtatcagtgtttagttatagtattaaacagtactcaggaatgcataaatcttttataagatttagactagatactggaactcttggaattctttttgcaaaagtatgactagaagtcagactgatgcctgtgatttgtggactgaatgctttgtgtgttaccctgtgttttcattcttgttgacccttgcctggacatggcttcagaggtgatctatctgtgagctctgagctctttagttaggcatgattctctactagagggaatgtcaggagagtgatgctggattgctaaatataaggtcctctgttttcctccctggaggaggagaaaggagcaattctctagacatgccaatataacatttccttttatttttaagtagtgtatttctttttcttttcttttctttttttttttttttttttttgaggaagaatctcactgtgtcgcccaggctggagtccgttggtgccatctcggctcactgcaacctccacctccccagttcaagtgattcttcttcctcagcctcccgagtagctgggattacaggtgcccaccaccatgcctggctaatttatttattttttttaaatagagacaggatttcaccatgttggccaggctggtctcgaacttctgacctcaggtgatctgcccgccttgacctcccaaagtgctgggattacaggcatgagccaccatgtccggctaagtagtgtatttctaatacagaaaatagagggaaatggaaaatacagaaaacggaagaaatagaagtgccccattattgcactgcccagattttaacaaataaaaataatagcaagaaaatccaagccatacagagaatggtaccaaatgaaaaataattgttccttcatttctcccttcccatgcccccagcagggaggagttactattaagtttcttatgtgcacattttaaatttgtatgtttccccctcttacttactgatacttttatttctatagcatggattccccaaaattcctttctttaaatccaatatcctaagcaaagtgttaagtagttcctgacaataagcccctgacttacagtgactctatgagtataaacaaactgtatccaaatgcatttcagccacaagaaagggaaaatccagctcatgcagcataagggcatatgctgtttatccagtgagggaggccggcctggggcgatggcctggcttctttggtccttgtactctgccgtgtgggggacgcattccttcatggccagcacaaagttgccacatctccaaatgctgtattttcacatggcaggatacaaaacaggaagcaagaagtcagtagcaaaaggatgttggatttttcttcatgtgccttcccttttcagggatgaaacagtttccaaaagctcccaggagacatcctcttacatcttattagtgagatctgaatctcatgtcagtcactggcaaaggagaatagctgtg

SEQ ID NO: 16993 - DNA, 2300 bp, Homo sapien
cgggaggctgaggtgggtagatcatctgaggtcaggagttcaagaccagcctgaccaacacgatgaaaccccatctctactaaaaatacaaaattagccgggcgtggtggctcacgcctgtaatcccagcactttgggaggccaaggagggcggatcacctgaggtcaggagttcaagaccagcctcaccaacatggagaaaccccatctctactaaaaatacaaaattagccgggtatggtggcgcatacctgtaatcccagctacttgggaggctgaggcaggagaatcgcttgaacccgggaggcggaggttgcagtgagccgagatcgtgccattgcacaacaagagcgaaactccgtcttgaaagaaagaaaagaaaagaaaagaacacctaggtcgggtgcggtggctcacgcctgtaatcccagcactttgggaggctgaggcgggcgatcacctgaggtcaggagttcgagaccagcctggccaacatggtgaaaccccctctctactaaaaatacaaaaattagctgggcgtggtcgccggcgcctgtaatcccagctactcgggaggctgaggcaggagaatcacttgaacccgggaggcggaggttgcagtgagtagagatcgtgccactgcactccagcccgggtgacagagcaagactccatctaaaaaaaaaaaaaaaaaaaagaaaagaacacctgagctaaatttaagaagaaaccacctacgtcaggacctagaggaagagcagtgtcaagcaaaggaacagcaagtacaaagtcttgtggccagaataatgctgtactggcgagctagaagaataggacagaataacccgattataaaaggggcagtgggagagaaaggcgagtactaggagatgaagttgaagaattaagcagagaccagatcaagtactgccttgctctggccatgaaaaaagtatggattttagtctaagtgtgctcaagcatcagttttgtttgtttgttatttttaataagcaggggaatggcacaatctaatgtctgctcttagaagacggatagctgttacgtgggaattatttgtaaagaatgtgggaaaagcagaggcaagaaaggcaggccgaaggttattgcaacagccctggcaagaaagggtagcttgaattacaacggcagtggaaatggagagaagtgaatgggtttaggatatattttggccctgaaatggcagggcttgctgctggaatagacgtggggatgtaggaaagaggagtcacaggtaatccctcgagttccttgtactgtaactggagtatatctccctcctgagggtagctaaggaacgggttgggacagagggttggttttttgcaccaaaagatctattttggacatggacatgttatgcaaagatgctattatctcttctaggggcgatgcccgtgagcaactggataatcaaatctggagcatttcagtctcaaacacctcctcagagtgatcccaggagatctctgcagccacggtgacattttctttatctgaagcgatgacacagctcactgaatgccattcttccacatgctggaaaagcgaggtctagtgaacacaattcctttccgtgcggaaagtctgaaatctttttaacacttcggacacagagcatcgtaaggtcccagaatagagggtgtgagcaatttcagcgctcacctcggcccaagcgaagctccagcgggagcaattgagacccagggacgaagctagggagggcctggcagcccccggcactggccggcaggggtaacccaggaaaaacagtctcctggcctctcgttacccgcttcaggccctccgccctcccctggcctctcgggacggccgcgcttacctgaaccgaactgtacgcacaagcgcgctcctgactccaggtgcacaccgtggaggcctgaaacgagagccatgaccgcgacgcgctgaacaaaccaagccgccagttttccgtcccgtcccggccccggccctggcgaggtgcgcatgcgcagggccgggagctaggaccccgcggcaggcgggcgcgtccgcgtcgcacggaagtctcgcgatgtttgcgtttgaacctcttggcgggtgccggccatggcggcttcgctcccgggacctgggagccggcttttccgcacatatggggctgcggacggcaggagacagcggcggccgggccgggaagccgcgcagtggttcccgccgcaggaccggaggcgtttcttcaacagcagcggcagcagcgacgccagcatcggcga

SEQ ID NO: 16994 - DNA, 2300 bp, Homo sapien
ccaggatcaagcgctgcctttagttgtcctctctgcagcctcctttcgtttggagcaggtcctcagcctttctgtctttcatgacattgatgtttgtgaagagtacagtccagtttctgttgtagaacgtccttgaagttggtcccggaatatttgtttaaagtgagttgggaaaccacattcacatgtcttttggttatgtgtgtatttgtcaaacagccagccttgtgctgcgtgctgtgatggggagcattactcaacagagcctggccctgaccttggggatgtagtttgggtttgtggggaaagcagctaccgccaggtgggctttacggacccctgtgtgtctcatgactagaggcagtgacgcttggataaatacatactggatggatgcaggatgagtccgcattctagaagtgtgcagaggtacagaagtggccctgctccctgtccagcacccagtcatcagctttccctggcttcccgaggcaccctgacgttcacactccaaacacaaagtcttctctcaggaatctcgagtgagctgcagtctgggttctagccctgccctagcagggatctgctcagtgactgggctgctctcttcctgctttaggccaatgcgggggagaggagaccactgtgactctccccagtgcccttggagcgcagaatgaagtgaggggaggaggagggtcacgagccctggagcgctgggaagacaggctgtaggccgcaggccccgatcctgcctgggacgaggttcaacagaagtaggatggtttcatcatgacctggcaggaaaaccaccagacctggaattttgcttttacaactgtttaacttctgtttcatacaggatggaaaccggtgaattgtaatctcacataaccgagcaagatctagtagtcataagcactttgtcagagcaaagcagacaaggcaaagtgttggaaatgtcatcggatcttcacagaaccttagccaagcagcctttcaatgcgagaaacaaaataacatggatttttatctagtaatgaagtcaacaccattgtccaccctgggttaacacattcacatctcaaagcgaatggggctgcagacactcgtgttagagagccttggaatgtcctgcctttttacgtttaattaaaattaaataaaatatacaaaattcagttcatcagttgttctagtggcattttaagggtttagtaccatatgtggctcatgagtaccatcctggacagcgtcgacctagagcagttccatccccgcgcagagttctgtttgacggcgccactctgcacttccagcagcctggggagcaggggtgcaggagagttccttctgtgtcacagacttggtcacacagtacagatctcagatcagcacttaaacacgactgccagctgtcaacggcgtgttctgtggaatgctgggatgcatcacaggtatgctggaagatgtatagaattttacttctgttattctggtaactcagagtcctgttcagtcagtttccacgtcaggttgctgtcctggttttaaagagaatgaacgcagccgaagttgaatcgaggcagtgatttcactcagtgcgttgggtctttccactcacctggccctccagaaccccagggccttgagtgcatgggctggtacaagagcccagtttttggctggggaggcacttcctatgggagggggacgcctgtctcagtgctgaggcaaccaccaccgaggaccctgggctggaagctgggctgagatgtctggtggtaggttctgaggcaggacaggggaccgactcaaatggatgatacgaacggcaggctggattcacgttgctcctgcacctccagcatctgctgaggacacctagaactgtggccctggccaaacctcagctccctattccatgaaagtgtgggtcaaagtgtgggtggtagagtggggctgacagtggcccctaagctcctagggtccagcccacaactgaggaagccacacggctggttgtgtacgagccggagtgtctctgtttggttgaaagtgccggtctgtgggtccttgctggtgtgtgtgcttctgtccccgcctcctggcctcctggctgaggggaagctgagtgggccacggcccatgtgtcgcactcgcctcggctcccacacagccgcctctgctccagcaaggatgtggctcttccacactctgctctgcatagccagtaagtcctctcacccgctgcttcgaggggctgctgtgccctcagctccagccaggtgtctgcagac

SEQ ID NO: 16995 - DNA, 2300 bp, Homo sapien
gcatgcctctgcagggtttagaatatgctccttcacagactttccttttggttttacaccagcagctcaggtccatttgttccacggcctttcagcactcagcagtctcctgctacagatcagcgaagccattctggaaggaggtggtgtgcagtcaaaactgggtctttgatgtaaccaagagaaatacacactcgagtaaccttacagttttcacagacacacagagagaacccagaaaggcagctttaaagatttttacttctcggagttactggccttattagtttctctaaccctcctgcccactctcagtcactcagatcttgcaacatcttgagtgtgtcctgaatgatgaggccttttctttggagtttaagagtaagaatggatagtcaggacaggcccgtggcaggcagctgggcgtgattttaccctggacactccccacacatgtgggcacagggctgcacactttgtgtgttcctcttagtcttatgtgtaggagattttacatacatgtttgctgcttgatgataattgcagatacctcatttgtttcccactctcctctctggagagttaccaggtacccaggataatttgtggcgtcctcaggatgtagtctcctcctctggcccccttgtagtctgatcctgtgaacccctctccgttcttcagccactgccctttccagctgcatttgtacagcagcctcttcactggtctctgccctgtctccattctgcacactgcagcgggatgaacctttgttgttgttaccagcttaatttagatgtaatttgcatacagttcagccatttaaagtgtacacttgagtggcttttagtatatttacagttatgcaccagcaccgtaatcaattttaaaacactttgatcacccaaagaaaccctgagtccattagcaattctccctattccctcttccctcttagcctctggccaccactgatcttccttctctctctgtggatttgcctgttctggatagttcatataaatgggatcatatactatgtgtctatttgtgactggcttcttaacatatttctgaggttcatccatgtcatagcttctatcagtatttcattttttaaaattgccaaataatagtccattttatgggtatgccaccttttttttaatccacattggttaatgggcatttgagttgtttctactttagggctatatatatatatttctatttctattatttatttttgagacacagtttcgctcttgttgtgcaggctggagtgcaatggcacgatctcggcccactgcaacctccacctccggggttcaagcgattctcctgcctcagcctccagagtagctgggattacaggcatgtgccaccacgctggctaattttttgtatttttagtagagacagggtttcaccatgttggtcaggctggtctcgaactcctgacctcaggtgatctgcccacctcttcctcccaaagttctgggattacaggtgtgagccactgcacctggccctactttttggctattatgaatagtgttgctacgaacattcccgaacaagtttttgcagggacaggtattttcatgactcttgggtatatacctaggagtggaattgctgagtcataattatctttaaccttttcaggaaccaccaggtggtttttccaagcagctgtatcattttccattccaccagcagtgtgcgagggttccagtttctccacatctccaccaacactcattattttctggtgtgaagtggtatctcattgtagttttttgtttttattttttctttttaaaatacattttgtacagatggggtttcgttatgttgcccaggccgtctagcactcctggcctcaagtgatcctcctgccttgacctcccaaagtgccgagattacaggcatgagccaccacgcctggctctcattgtggttttgatttgtatttccctaatgactaatgatgtcgggcaccttttcacatgcttcaggatgaactttcttaaatatatatctgattctgttattcctctgcttgaacgttttccaaagcttcactattgccccgagaataaattccacactcctgatcgcatgagcccagtaattcaaggctgtggtgagctatgatcaagccactgcactccagcctgggcagcagagcaagacctgtctcaaaaaatacatacatacataaattccaccctttttgatagcatgttatgaggctcaccaaggtctatcctctggcagtatccctggcctgttct

SEQ ID NO: 16996 - DNA, 2300 bp, Homo sapien
agtcgattttcaaattttgtcagttgttccaataatgtcctttatatattccccgcccagccccaggtctaggatccatccaggactgagtgtgtaagtatgtaatgtttccttagtcccccttaagctgaaactacttctatcctcccatgttttccaagaatataggtttactattttatacaatgtccctcagtttgggtttgtctgatgattcctcctgattgaatttgggttgtgcatttgagacaggcgtgccacagaagcgatgtcatgtcatttccagagcatcatgtcaggaggccctggatacttactcgtcccagtcctagggacgttcactttattcacttggttaaggtaatcatcactaggtttttccactgtaaagttgctattcttccatttgtaatttaaaaattggtgggctggctggttacagtggctcgtgcctgtaattgcaacactttgggatgctgaggcagaaggatcacttgagcccaggagttcgagaccaggctaggcaacatagcaagacctcatccctattttaaaaaataaaaaaatgattaaaataaaaaattggtgggcagatactttgagatcacgtaaatagcctcttgctcatcagagcttcatgcctttctgactatgtcatttctttaccagtagacaggtgctctaaggaagagccttctgtttttacctgtttgtttatttacatcagtttagaatcatggattctttattcagtgggttatcatccatggatatcagtatttaattttatttatttttttgtttgttttgagacggagtgttgctctgtcaccaggctggagtgcagtggcgcgatcttggctcactgcaaccgctgcctccctgcaacctctgcctccctgcaacctctgcctcctgggttcaagcaattctcctgtctcagcttccctagtagctgggactacaggtgcatgccaccatgcccagctaatttttgtatttttagtagagatggggttcaccatgttggccaggatggtctcgatctcttgaccttgtgatccgcccgcctcagcctcccaaagtactgggattacaggcgtgagccatcgcgcccagcctaatatcagtattttaatttacaaattgtcttggatttggccagtagagccccttcaagctgttttgacatactccatgattctttaagcactttctttctttatggcacaacaaaacatcttgcttttccagactcattttgcatcttacctgctccacatctggaatcagccatttctccaaggagctggtgggcatggtttgaggggttcgggggttgggggctatacatactggtttgtgttgtcacgtttacctacagccctggatatatttacagtggtgtttgttctttacagtcagagtgtccaagaactgtggaaggtctttgtattactacttttgacaaaaatttatgatgactgaccacctttctttcctgttaactgacatttcaacttgacaaatgtgatctttaccacatttactcatttgagtggctgagtacattctacatgtatagtattatgctgttttctttaagccattttgaggagcacaataaactggaaaaatgatttaccaaatatatggaattatatgtagtctgtttccttaatcctgatgctgtgttgttggcatgtgatccttcagaagtgaatatcatctttcatggggtggcaaaaatgccactattttgagaaagtctttttgattcctgggtacctgtaatgacctaaagctcttttatgccttttggaaccttgtatcttgtattgtttatttttgttttctccattaagtcatctggctccaaacagcagttttaacctcattcgtctctgtattttgctttatcccctctacactgcattgctgtagtgggcactcagagtgtgaatgttggtagtggatttttactttttgttggcaaattgcgctgatctgattccagctatggaaaacattaaaaaaaaaattcaacattgtctttacactcacaggaaatcctaggtaactattgtcattaatttttagatgacaaaaaggaacttggagcagccagaagaagtcagtattacatgaaatatgggaatccaaattatggaggcatgaaaggaattcttagcaattcatggtgagtccaaaaccttcaaatgcaatagtatttgagtttttcttaatccttcagttggtattccgtggtgaaatgtctaaaccctgtgtaaactggaagg

SEQ ID NO: 16997 - DNA, 2300 bp, Homo sapien
tccccttcccttccatcttttcccttcccccttcccctttccccctacccttcccccttcccttttcctttccgttccgttccattctgttccattccttttgttttttcttgacagagtctcgctctgtcgcccaggctggagtgcagtgtggcatcatctcggctcactgcaagctctgcctcccgggttcacgccattctgcctcagcctcccgagtagctgggaccacaggcgcccgccaccacgcccggctaattttttgtatttttagtagagacggggtttcaccgtgttagccaggatggtctcgatctcctgacctcgtgatccgcctggctcggcctcccaaagtgctttctctctctctctttttctttctttcatctctctctctccttccttccttccttccttccttccttctctttctgtctctctttctctttctttctttcttttttatttatttttaacttttcatttcttttgagacaaagtctcaccctgttacccaggctggagtgcagtggtgtgaccttggcatactgcagcctcaatatcctaggctcaatccattctcccacctcggcctcccaagtagctgggactaccggctcatgccaccatgacttttgtatttttttgtagagacagggtgtcactatgttgcccaggatgatctcactccaagcgagtctcctgccttggcctcccaaagtactggggttataggtgtgagtcaccatgcctggtctatatttctcttcattagttggtttgtatatttactgatgataatctgttgctagatgaggctgtagtgatgaatgcgatgcagaatctgctctcaagaagcttaccatttccatgctgtgtaatgtcttattttacattttattttaggtaatgtagtttggctggatgaaatgacagccacacgagcacttatcaatatgagctccctgcctgcacaggataagatcagaagcagggatgccagtgaggacaagtcagctgagaaaaggaaaaaaggtaacaacacaaaggagggaactggggtctgaaagtcctcttctttacacagtcctgtttctgagcagagctctatatagcatctcatcaccaagtgtttctgaactaatctatgatgcttgagatcatcaggaaataggagaaaatactggacttttaaaattatatgagatagttcatcttgtatctcattatatgaaatattttatcttgtttcatcttgtccttcacattccattttagacaagcaggaagacagttcagatgatgatgaagctgaagaaggagaggttgaagatgagaactcaagtgatgtagaggttagtaataggggaaagatagatgtaaagttattgtaaaaaattgctcactgtctttttaacttaagccttaaagacttagttacgttttttctctagctttcaccattagaccttctgagggtgcaccaggctcttgtcctttaagttagtgtggatatagcgattcaccttgaaatcttagaatagtgcttatgcttctacaaaaaaagaaaatagttttattgagaaatactttgaagtgttatctaattagtaaaatgaagaaacagcaagtaatggcatacttcctaatggattatgtactgttgttaaaaatattaacatgcattcatttaaaaaatatttactgagtacctattatataccatattctaagtgctagggatatagcttcaagcaaaacaaagtcctggccctctcggagcctgcattctagtggggagtgcagaggatacactgatgcacagatatctcatactgtgtcaggtggcaatgagtgttgtgaaaagagtaggggatagagaatgatggagactgttcttttagacaaggtgggcaggggaaatctctgagttagaaattctacagcggaactagtgctataatgcttgtaagtattaaaggtagaatgcttttcttaatggtagctttactactgaagaaatatcaaaaggactttaatttttatattaaaaatactcttctttcttaagttggatacgttgtctcaggtagaagaggagtctttgttaagaaacgatcttcgtccagctaacaaacttgctaaaggaaataggttattcatgagatttgctacaaaaggtaaatgtaatatttggtattgttttatattttcaatcaaaatgatttattatggagtgacatccttcttttttgaatagaagttagatcaagtaatctcaaagttcccttcaaactata

SEQ ID NO: 16998 - DNA, 2300 bp, Homo sapien
gccaggcacggtggctcaggcctgtaatcccagcactttgggaggccagggcgggaggatcacttgagatcaggagttcaagaccagcctggccaacgtggcaaaaccccgtctctactaaaaatacaaaaattagcctcatgtggcgatgcacacctgtaatcccagctattcaggaggctgaggcaggagaattgcttgaatctgggaggcagaggcagcagtgagccaagatagtgccactacactccagcctgggcaacagagtgagactccatctcaaaaagaaagaaaaaacaaaaacaaaagcaggtggtagatgtgtgtagtttattgtacattaattaaacctaaataaagctggtacaaatgtaaataaacaacaggtggtgggctagattttgcttgagggttatagtttactaaccctgatttaagtcattaaaactgtgactaaggtatattagaattggagggactctcagaattacatagttcacctaccttgtattatttatcagaacctgagaaacagaggaaggaacatatttgcctcaggccacatggcacattagtaacagaagtgagagcctcagagcttcatttcccaaactgagatataggggacgcatagttttgagaaatactcttttaagtttattttccgtaagatttctcaaagctcttttcttgctaaattatcttccttaaagaggcacattaaattagttgctacaaagccaactggctgtcatgcctccattctacatatcccagggataccttcatcatccacgttttccaatgggaatgatgaagggggaattcgtttagcatgtcctgacaaggagcagcaaagggcttccctgtagggggcggtagtgtaaaggacaatccaaacttacttgacagttatcaagaactgctaatacttacatattgagtgtttaactacctgtgttctgttccaagtagtttaaatatacacaactctttttcatggaatacttaagttattttgtggaacccagtttggaaacgcagctctaggctaatttcatcagagagattttactacccttttctttcttttccctccccttcccttccatcttttcccttcccccttcccctttccccctacccttcccccttcccttttcctttccgttccgttccattctgttccattccttttgttttttcttgacagagtctcgctctgtcgcccaggctggagtgcagtgtggcatcatctcggctcactgcaagctctgcctcccgggttcacgccattctgcctcagcctcccgagtagctgggaccacaggcgcccgccaccacgcccggctaattttttgtatttttagtagagacggggtttcaccgtgttagccaggatggtctcgatctcctgacctcgtgatccgcctggctcggcctcccaaagtgctttctctctctctctttttctttctttcatctctctctctccttccttccttccttccttccttccttctctttctgtctctctttctctttctttctttcttttttatttatttttaacttttcatttcttttgagacaaagtctcaccctgttacccaggctggagtgcagtggtgtgaccttggcatactgcagcctcaatatcctaggctcaatccattctcccacctcggcctcccaagtagctgggactaccggctcatgccaccatgacttttgtatttttttgtagagacagggtgtcactatgttgcccaggatgatctcactccaagcgagtctcctgccttggcctcccaaagtactggggttataggtgtgagtcaccatgcctggtctatatttctcttcattagttggtttgtatatttactgatgataatctgttgctagatgaggctgtagtgatgaatgcgatgcagaatctgctctcaagaagcttaccatttccatgctgtgtaatgtcttattttacattttattttaggtaatgtagtttggctggatgaaatgacagccacacgagcacttatcaatatgagctccctgcctgcacaggataagatcagaagcagggatgccagtgaggacaagtcagctgagaaaaggaaaaaaggtaacaacacaaaggagggaactggggtctgaaagtcctcttctttacacagtcctgtttctgagcagagctctatatagcatctcatcaccaagtgtttctgaactaatctatgatgcttgagatcatcaggaaataggagaaaatactggacttttaaaattatatg

SEQ ID NO: 16999 - DNA, 2300 bp, Homo sapien
accatgttggccagatggtctcgacctcttgacctcgtgatctgcctgcctctgcctcccaaagtgctgggattacaggcttgagcgaccgcgcccgaccttaagtttatttattgatatatttacaaattttgcaattgagattaaaggagataatgtacttaaaatatgtagtaaaaaaagccgggtgtggtggctcatgcctgtaatcccagcactttgggaggccgaggcaggcggatcacctgaggtcgggagttcgagaccagcctgaccaccatggagaaacgtcgtctctactaaaaatacaaaattagcatggcgtggtggcgcatgcctgtaatcccagctacttgggaggcttagacgggagaatagcttgaacctgggaggcagaggttgcagtgagccgagattgcaccattgcattccagcctgggcaacaagagtgaaactccatctcaaaaaaaaagaaaaaaaaaaaaaggtagttaaaaaagtacgcaattggctgggcgccgtggctcacacctgtaatcccagcactttaggaggccaaggcgggtggatcacgagggcaagggatggagaccatgctgaccaacatggtgaaaccccatctcttaaaaatacaaaattagccgggtgtggtggtacgctcctatagtcccagctactggggaggctgaggcaggagaatcgcttgaacccagaaggcggaggttgcagtgagccgagatcgtgccactgcactccagcctggcgacagagcgagactccatctcaaaaaataaaaagtatgcagtcctgataaggctaagtttcttttttgaccatagccttcaacctttctgcctcctcagaagtaacagcagttatcagtgtgactcatattggccttttctgggtgtctgtgtacataaatatgtacccttagtaaatgtatggtattgtttaatgtcatcaccttgcatgtaattttttacaacttgttttttcactctgtgatacatcttagaatctttctgtggtatataattatctcattttttaccacataatattttataatgtggataaagcataatttattaccctggtaactactgggttattagaaatcgtgccttagcaaacatcttcgtgtgagctacttcgtgagcccacatgtatgtgtttgttgaggggcgatactgaggactggagttcctaggtccgtagggcacgtgcaaaatcacgttttctgcagacccttccatttgccctccgcagtgacgatgcccaccagccggggaagtaagcctttcccctacttactgccagcacttcacactaaaagatgtaagatatctcgattcaaggaccagagacgcaggaaaaataaggtgtaaaatctggtccgtgaaaactggtgtcttcttgttttcatgtgcatgttaatgattggtagtgaggtcaacccatctcctcatatatttattggccttttgtatttccttttatgtaaattgcttactcatgtcctttgcccatttttattttgggttgtctttttcttcttaattgacttgtagcatctctttagtttcatgctttgacatagtcacgggcagcatctcttctctttcagaattgtctccactactgcgcgtttctctttaacatacatttaaaaattttagaagcagctggctaacttcaacaaatactcctgttgagcttgatagtgctctgattgctacagattaatgtggggagaggtatcgtgtattttatcaacaccctttgtttaatctttctgagcctgataggcctgttctgaattaatgctgtcgttgagtgataaaaattaagatagtttaccttactgttatgtctcgtgctcttttgaaataattatagtttctctcagcatgtttctttctaaactcgtgttgtctgaactattaggaaggagtgtggatgggatgtgcagttgcggacaggaaaattctatcatcttttctgtgtcttgtctttctagcaatccccaaggtgagactggagacaatctatatttgcggagtagatgagatgagcacccaagatgtcttttcctattttaaagaatatcctccagctcacatcgaatggttggatgatacctcctgtaagtacacccgagtttcctgtgaatatgcttttgttgatgatttttcaagagttcttgccatcagagatggtgaatggttctggcccatactacttgtttatgccgaacttctgctgttagtccaggagagaaaaaattgtcgagcagt

SEQ ID NO: 17000 - DNA, 2300 bp, Homo sapien
gcaagactctgtctcaaaaaaaaaaaacagaagaaagaaactgaataaggccgggtgcggcggctcacacctgtaattccagcactttgggaggccaaggagggcggatcacgaggtcaggagatcgagaccatcctggctaacacggtgaaaccccatctctactaaaaatagaaaaaaaattagccgggcgtggtggcgggtgcctgtagtcccagctactcgagaggctgaggcaggagaacggcgtgaacccgggaggcagaggtttcagtgagctgagaccgtgctactgcactccagcctgggcgacagagcgagactctgtctcaaaaaaaaaaaaaaaaaaaaaaaaacaaaaaaaaaaaaacaaaaaacaacaaacaaaaaaagaaaatgaaacgggacttgtactcagcgactcctgctctcttctgcttatttcctgtgtggtccccaagccctgctgagccctcctcttccctgtctctgggccttgttgccacttataccccttgcctcattcaggcctcaggcccctccccagacttatctagccaccttccccctggtctcgctgctgctggcctccctccagtccagccaacacattcaggcggggacagccctgataaagcacaacaaatctgcctgcatctcttgcctgaagtttgtctgaagcttctcaaagccacaccctggcgctagcattcacacgtctccgggttctgccacccgctcgtctggggccgcctcactccctttcccgagcaccagccagctggcttctgtccatttcctcctcatcctgtggttgccttccctccctgcctccacagttgtacccctggtgcctctcttcctgctataccccctgctgaggggtgtctttcccctcagcccaggaattttaaaagggatgaagcatctaagacaacagggggaaccgaagtcaacagtcctgagagtggctttctgctccctagtcttggaaggatgggctccccaagaccactggtggcaaagaaacctggggtttggccgggcgtggtggctcacgcctgtaatcccagcactttgggaggccaaggcaggcggatcatgagatcaggagatcgagatcatcctggctaacacggtgaaaccccgtctctactaaaaatacaaaaaattagccgggcacggtggcgggcacctgtagtcccagctactcgggaggctgaggcaggagaatggcatgaacctgggaggcggagcttgcagtgagccgagattgcgccactgcactccagcctgggccacagagcgagactccatctcaaaaaaaaaaaagaaccctggggtttgggcagagagagttggagctgatgtggcgctgagggggctgctccctcccatctgagtctcccatctctgcctgcactcttctggctggcactgtgccagcctgctaacctccctgggcctcagtttcctcctctgtcaaatgagagaggatcttctctgggtgtagaaaaggacgaggtggtgagtgggtctgaaggcctctggtgtcccataaagcgactctcctcaccatctttgccacccattggggtgtccagcacccatggaactctgtctgtgcctctgtcctggagggagacttgacctcctgctcaggaaaggctctccaagcccttgttgtgaaattcctgcctgctgtccggaactcagtcttcccatccgagggacgaaggtttcgggaagagaggtggacaggaaggggtcctcatcagcggtcccaccctcctctccttccttcgccctctccaggccagaaatcagcgaggagctcaaggacctgatcctgaagatgttagacaagaatcccgagacgagaattggggtgccagacatcaaggtcggggaactgggggtcttgggctgggctgggacacagaaaacaggagtcactttccctttctggagggatcaacaccaggatgcatgtgtgttgggtttgagtctgtggactttggacccctccaggtgattctggtaatggcctgacctctccccctctccctgccctcccggccccgacagttgcacccttgggtgaccaagaacggggaggagccccttccttcggaggaggagcactgcagcgtggtggaggtgacagaggaggaggttaagaactcagtcaggctcatccccagctggaccacggtggtaagagagccggggtagatgctcccttgtcctggagggcctgggggacctgagccttgctctgtgcctggctccttgggggg

SEQ ID NO: 17001 - DNA, 2300 bp, Homo sapien
gccaggccgcgtctacgagggagctgggatctggtcagggcggggatccttccccttctgtctgcggggccgggtctgcggggtgcctcgcggagtctgctcgggtctgcgccggccgccgggaccgcatcgccgcgggtgccccgccgtctgcgttcttccccgcttctgtctgcggaccgcatccatccccggtgcactgtcccccgcgcccggctcctggtggaggccacgtctgtgcggagtgggcccggcccggggcacccacgtgcggttctccgcggagcgctcctcccacggcccgccggagcgtcttcctgcaggagccgggggcggggtgggagatgaatggggcggcggcggcgcgcggctcaggctgcgcagggtcctgccttggctggggcgagagggggcggcagaggcgggcgctgcggcttcggggcccgggaggcgcagggctggtggctgggggggtgtccacgtgcgcagggacctgcgtgtgctgtttggaggcgggtgtgcgtgtgtcacgtggacgcgggagtgtgcctgtgtctgcgtggggggtgcaggacaggatggagtggtgtgtgagggcgggtcacgcggacacgggcgtgtgcctgtcaggggagggggtgtgctcaagtcttggcgttgcagggctgtgcagagaaggctgtgtcacaggccacaggaccgggccttggtggtgtccgcagggcgggcacaggagtgtgggaggggcacacagcctgtgcgcgctggaggatcccagggaagtggcgctggcctccccaagccctgccctctttcctccagtacatacaaattgaccccccactgcgtcccaggcgcacacactctggggacccttcgcctcttcctcggtctcccaccgtcagtcctcacagcagccatgggagtcgttttaaacctcacctaaccgaggcactcccctgctcacaacctccccctggctttgggggcctcctgggctctgtccaccaagctctccccacccccaaaccaagcccggagtcccagccaggaaatgactctcctatatgcacagtgcaaacttccatcctcgcctcatcctgaaatcctgctcagtgctcagaagagagctcaggtgccacctcctctaggaagccatccctgaggccagcacaatgagtgagggggctttctctccagatgtaactcctcttgctatcaggtgcctcttatgtggggaagactccactccagccacgtcagcctccctgctgttcttcatactgagcaagcactgtcccctcatggcgtttgcacctgctggtccctgcacctgaaatgctcttccccagataactacactgcctactgccccttccttccttcaggtgtctgctccagtcctgctcccaaaaggccttcctcaactacactgtatcagcagcatctcccagcccctttctcttgatccttcttactcggctgtatttttcttcctatatgtaccacttgacatatcatatctgaatcactggctttcttgtttgttgcttcttgcccccacgagaaattaaactgtatgagagcagagacttggtctttttggttcactgctgtatctccccacacaggcttgcacagagtctggcagacagcaggtgctccgtgactatttgtgcttgcatcccaggcgtccatgtccctggctgctccctagcctgtgaccccccccccaaccttgcccccagtctgaggccacttctgctcctctatccatgacattccgagttcctggaaggccaggtctgggagaactataaccacatttgcatgttggaaatccctccagcagctggtgtggaggatggggtagggtggggtggaggtgttagcctggagtcagggaagacccacatagtgggaaacgaagcagtgggtagaatctggacttctaaggggtttgacttggtgagctcacccagcaggtagtggggagatcaaggagggctcagaagaggcgatgtctgagctgtcctccaggcagcagaggagagggaggtgtgttcctggcagaaggcacagcttgtactgaggcctggcagcagaacagagtatgcaatttgggaagctgtggtgtggctgcagtggagagtaagtgtggggttgtggggagcaagggtgggcaacagggaaaggacgagtgacaaggagggctcccggattgctgacctgggtcaggaaagaatggggagggtgtggtacccgtctcgcaatggagacagaggaggacgagcaggttt

SEQ ID NO: 17002 - DNA, 2300 bp, Homo sapien
gccccatatcctgcttggcctgacagcttctcacattgttgtccaagccttccttgtcgaaagatttccttccagcagctcctaggacacaccctttcctgacttcccagcctgtctggcgtgcaaggaaaagacaggtttcaattgcagctctgccacagttcactgtgtgtccttgggggaagtggcttaactctccaagcctcctctgtgagtcaaggataataacaacttctttttttttttttttttaaatagagacagagtttcactatgtggaccaggctgttctcaaactcctgggctcaaatgatacgctccacctcagccttccaaagggctgggattaccggcatgagctactgcacccggacaataatagcttttagtagggttgaggaaagacctgtaaacagcacctggcatacagtcgagctctgcccctcaatctatccaccctctcaatggtggagtccactagttgttccggatatctgttctcccggtagcaattcagtccttggttcttggttgggcatgtggctgcccagaatggaagctgcatttcccagctttctcttgcagctgggtctggtcatgttaagtaagctcaagcggtgtatgtgaaagtgccacgtggcaacttctgggaactttcctgaaaagagagctggtgcagaccctctgccctcttcttcatccttttctccactccactgcctggaatgcgttatgtgattgctggagctctagctggtatcctgaaccatgaggtcaaaagccacactcaagttgctggaattattcattcaacaacatccactgagcacctgtgccatgcgacaggctgtgtgctggacgaatcaggcacagtgcttgccatccaggagctcccagtcccaatgaggaaccagcaggtaaacagatgccaggtacaaggaagtacctgggtggggccactaacccatgctggaagtggggaggtcatggagaaggtttccaggcagaagtaggattgaattgaaccctgaaagacgagtaggcgttaaacaggcaggtggctgggagtaaggctatacagggcttgattagacctattctcacggtgagccatagaaaatgcctctcggtggacttgtgttcctgaaaacttgctctgggtgccagggagagaaaggctagtaggaggtgagactggatggggctggaggccagggaggaggctgctgcagcaatcagggacaagatggtggtagcctgagctaagggaggggaagtggggtggagaggagtgggccgattccagggatagttaagaggcagtatggcagggcctggagatggactggttggagcaggaaacagggaggcagcaggtgactcccaggctcctggctccacttcgagacagggacgcaggaggttagatttgggggaaggatatggggcaagtggtggtgccagaggattcacacgcggaggcgttaggggaagaggtggcggcagagtccccaggaacagccacagcgaaggtcacctcactgtcctgctgagttccctctactccctcggccctcgctaggccattcctgtcgccggctcaccgagcaagcacttcactctgtgctaagccacctctcggcctctctgcccccgccccgcagaagctacactcctgggcctgccattcaaggccttcctccccgggcctcgcccctccctcgcacgcaccgcgcctcgcccgggagggaggggcgctctggctcctgcaggccgggatgggggcgcaaagggtttggcggggaagcacggtcccctgcaggcccaggagaagggcccacgccgcggccgggagggacttcggggaccccaggacgccgggggcgtggcgaggtcggccccgccgcaggggagggagggcccctaccgcgccgcccaccgcggtcccttagtccaggagggggcgggagtcccgggctccgattgggcggcgctggcggggccgttcgctccgaccaatgagcgccggccgggcgcggcggtgggcggggcagcgagcgctgcccggagccgcggcgcccgcgggctgagctcggcgatctgggccccagcgaggcggtggggcggggcggggcggggcggggcgcgcagcaggagcgagtggggccgcccgccgggccgcggacactgtcgcccggcgcccaggtagggatcggcggggcggggacgcgggcgaggagcaggaggacgaacgccttaacacctgccccgagcctgcaagggagaggcggggggggtct

SEQ ID NO: 17003 - DNA, 2300 bp, Homo sapien
atgtgtgttgtgtgctcacgtgccacacagtgtctcatgcacacaacccagtgtacacaccacctacgtgcacacagcatccttccacactgtgtatgtgaacagcttgggccctgcaaacacaaccatctacacacatctacacccccaagcacacacacatggtccgtgccatgtcacctccatagggaaaggcttctctccaagtgtgccaggccaggacagccctcccagccatgaatccttactcagctacctcgggttggggtgggagccccagccaaatcctgggctccctgcctgtggctcagccccagctcccaaggcctgcctggctctgtctgaacagaaggtctgggggaagcgacgggtggagtacaataaagggaatgaggacaaacctctgccgtccgtgctctctttccagacctctctgaaacacagtgtgctcgtctgtgaaatgtggggctgagctgggcaatctctgagatccctctggatctgccggtggggaccagtgagccgactcatacgccctgagcccagcagggtcagtgctgggtggagaggtcagctcacctctgtccacgggttgccatcttggcacagccctgaacattggcgctcttcccaaccctccatggctgggagaggcctggcagtggcacaagtagagaaccccaggagtggcctcgtgaaacagtggggaggaaggggctggctgtgccaggagggagatctggcggaatcccaaagaggggaggagggacttgactgaggctgtgtggagggccctgctgtgggcatgacctcaggcctggatttacagccaggtaggatctctgggcagcatcccccacccagtcaccatgctctgtctagaccagtgccgtcccatagaaccttctggaatgatggaaatattctctatctatgctgtccaatagggtacccagaagccacaggtggcctcggtggaaatatgcagccaaggaaatgaaattcgtattttatttacttttaattaattaatcaatattttttttttgagacggaattttgctctgtcgcccaggctggagtgcagtggcacgatctcggctcactgcagcctccagcccctgagctcaagcaattctcctgcctcagcctcccaagtagctaggattacaggtgcccaccaccacgccttgctaatttttttttgtatttttagtagagatggggtttcaccatgttggttggccaggctggtctcaaactcctgacctcaggtgatccgcctgcctcggccttccaaagtgctgggattacaggcgggagccaccatgactgcccaatttacttttaattaatttaaatagttacatgtgactagtggctaccagactggacaacacaggccagcccctgccatctccctcagggccttggccttctgccctcttccccaaccaagacctatcatttagattttataagactggaacttcctcttctgcccccccttctttctccagacacacctgcttttgcactttctgcccccttcccttccaagtgagcagaaaagggtccctcctctgtattcagcctcaccacccagcccagaggctgcccagcagaagccacctccattctcctacccctacatctgtccccctcttctgcctcctcctggcccaggttccccagcagctctgcccctctcccctcactgcaacccttccagaaagaccagtccacacttccctctgcaattggcctccaccccaaccacttctcctaggtgcccttgccaaggtcactggcagtgtcctggttgccaagtcttaagcagacacttgggccccatatcctgcttggcctgacagcttctcacattgttgtccaagccttccttgtcgaaagatttccttccagcagctcctaggacacaccctttcctgacttcccagcctgtctggcgtgcaaggaaaagacaggtttcaattgcagctctgccacagttcactgtgtgtccttgggggaagtggcttaactctccaagcctcctctgtgagtcaaggataataacaacttctttttttttttttttttaaatagagacagagtttcactatgtggaccaggctgttctcaaactcctgggctcaaatgatacgctccacctcagccttccaaagggctgggattaccggcatgagctactgcacccggacaataatagcttttagtagggttgaggaaagacctgtaaacagcacctggcatacagtcgagctctgcccctcaatcta

SEQ ID NO: 17004 - DNA, 2300 bp, Homo sapien
gaaagatgcattttagagccagtgaaagagacattgaccccgacagctggctgtcttgctcttgtggagttatcagcagcaggaaaataaatgtaggtccctggggtacactgtggatatgataagatccccaaatgagacggtgctccaggccagtccactttctcagggccagggccagggcctaggctgtaactgaatcacgtgtgtgtgctctgtcagtccatcaatctgtccaagcaagtctgtcagtccatccgtcaatctctctgtcagcaagtgtggctccttggaggaggaggaggaggaggaggaggaggaggaggaggaggaggaagaagacatggtggtgatgtgagaggaagaacttcctgatcttccttccttccctccctccctctctcctccctccctccctcttccttcctccctcccttttttccctccctccttcttctttcctccctccttccctccctccttccttttttccttccctccctccctccctccccttcccttcctttctcctccctccctcccttccttctttcctttactccttccctccctccctccctcccttccctccctccctcccctccctccctcccctccctctcttcccttccctcccttccttcccttccttctccctccctcccttcctccctccttcctcccttcccttccctttcctcctccctctctccctcccttcccttcccttccttttccctccctccctcccttcctccctccgttccctcccaccccacccactctctagaacgcatatcagggagaagggtggctgaaaagggacccagaatggcccacacagtctcagcacccaccccactccccatcacaagcagctgtgtcctggtgcctcccattccaatggccacaggggcagctgggaaaggaactgtctagggtcaaggtcaggccaaggggagacgtggccaccacagttctggctcccagcatctctggattttctttagaaaagcccatgacacccactggattagcagaaactccgcgaggggtgaggctgatctacttgacaaggagagactgacctgggtgctggaaggggccatgggcagccctctgtgggtgacccccattcagacaggctgccgggattcccagccccagggcctggctccctgcccagagcacttccagctcatggctcgccagcaagaagactccttatcagccttaagggtggggcggctccgacgacagggccgtgggggctcgccagggaggcccctgcttccagcttgaacctccagtaccaccccgggtgagcttgggcaactcatttctcttctctgagcttggttttctcatcttcaaaacgaggggtggggctggggaggcctccagctctgaggagccaacgtgggaccctctgcccaccccaaacccctgtgttcagggcccgagctgggggtgggaagggaaggcagggactgcagaggtgctgtgccccagactcaatggtggcctccagttctctgtcccgtgttgctgagacccatcccctgtgagcctcgacctagaaggaacagcccttattaccccaatttacagatgaggaagcaggctcggagaggcaaggtgacacccagcccccacagccaagaagtggcagagccagggatctccgaggtcaggctctctcggctggtcttgggccccccatggcactggtgacggatgtggtgctggtcttggctgggcacctgccacctctctccctctgatggtggccccggcaggacagacagtgggagaggagagctgggggatagagatgccagctcagcaccgaggttgaccgggcacaggccaggctggaactcagagcctccttcctctctgccttgctcgctgcagacccccagggacgaagcagccaaccctggtgggggagggtggagggtggtggatggggctggggatggaggtctcattttggcagtggaggggagtcgcggggagtcccctaatctgaggagactccagcttcccccaggccctggccagagctccatcttgccaggttttggggggaggataacttgaggagtcgactgagagctttatctttgcccctgtgacgggtggcctgtggtttcctgccaacaactcctgtttccggaggcccaacaaggcccacgcagagccaggaggggcagtggggctgggcctgggtggccccaccagccccgccccatctatctttgggaatttatttgtccatgggcgaggctggcctg

SEQ ID NO: 17005 - DNA, 2300 bp, Homo sapien
tataaaatgtcaggctgagcgggatgcagtggcttatacctgtaatcccaacattttgggaggccgaagtgggtcgatcgcttgagtccaggagtttcagaccagcctgagcaacattgggaaaccctgtctctacaaaaaaaaaaaaaaaaaaaaaaaaaaaaaaaaaaaaaaaaaaacctgggcgtggtggctcacgcctataatcccagctacttgggaggctgaggtgggaggatcgcctgagcccgggaggcagaggttgcagtgagccgcgatcatgccactgcactccagcctagatgacagagccagatcctgtctcaaaaaaataataatggggctgggcacggtggctcatgcctgtaataccagcactttgggaggctgaggtgggtggatcacctgaggtcaggagttcaagaccagcctggccaacatggcgaaaccctgtctctacaaaaaaaaaaaaaaaatacaaaaaatagctggatgtggtggcgggcgcctgtaatcccagctactcgggatgctaaggcaggagaatctcttggacctgagaggtggaggttgcagtgagttgagatgtcgcctcgccactgcactccgcctgggcgacagagtgacactacgactcaaagaaattaaaaaaaaaaaaaaggaaaataataataataataataataataataaaatcaataaataaaataccaggccggaggagccacaaccagaaaaccagcattcctctagctccacagcaccaggctgagacgcagctgatatcagggaatccatctggatcacccatcaaaagccccaaagcacctttcggtccagccagtcctcagggagtgtctttgctcagggaggcaccgagaggcggagaggaggaggggcccagtcctgtcccaggaggaagagcacagaatctgggggtgtgcatgatctggataggggtcagcagctccagaccaggctggaagttgaggctctcaggagcgggtgaggggctgtgttgttggggcagggcgcagctgcagctatctgggaaagcttcctggctgcagaggcacagaaggggtttggggtttgaacagccagctgtgcgggctcaatcctggcatctctgaccctgtgcagccttggtggatggcagagactgaggctctagaaggcagagcccagctcgtggtgggaggcagataagggctggggtgaggctgtctgggtctctcaagctggagggagcggcaatcaggctgttctcttagctcctccttttggcggggcgagtggtttctgccttcctgcgacttcctcctctgacccgctgccacttctcctggccctcctggggcgggtggagctcgggagcgctgaggcggaggctcatccatctctcccctccctgggccagggtcagtcccctgggagccctgggcagagacccccccaccccaccctctcgggcccctctggggagccccacctttgctccctggttacatttcctgctggggtgacggtgtgagtctagggtaacgagcctggttttctgaactttcttatgcaccggctctttgttaaaggttctggttatgtgaggaataacccctcgccggtgggcattggaaaagaataaagaaagcagaaacaccaaataaggagaacatccagcactttcctctagagaagacccgcttattcagaggctttcgggttccctctggagtcacttcgcagaattcgagctgggaagcaggacgccccgggcccaggagagcccagaggaggcgacgcgcagcccagagccgggtgctccgcagaccgccccagctctcggccagatcccacccctagcagctccgcggaccgggaccgaggacccccgggccacgcgcccccggctcccgacaggcccagcacgcgccccgcgggcggtctcagtttcccctctgcagaatgggcgggggacccaggcggtgcgccccggggcgcggagggcggccggaaggggtgtgatggggggcgggccccgcgccgccccgccccggggagggagtcccgggcgcagcatcctggcgcgggccggggccgccgccgccactgccgtcgggtaaggtcccagcacggacatggcctcgcgcggcgcccgcccgggcccgagtcccccgcgccccgctttgtagccccccggcggagaggcggcctcgacggtgcggacggcgcagacggccgggcgggcggcatggaggcggcgcatctgctcccggccgccgacgtgctgcgccacttct

SEQ ID NO: 17006 - DNA, 2300 bp, Homo sapien
cagagcagcgcgtggcaaagcagaggcggggaggaggaggaagcgggaggcccaggtaaacctcaggccacacttgggccagaggcagggtccaaaggccggcgggaaggcagccagtcccaggaaggcagcaggcgcactgcctggggccctgccttcctcctccgggttccgcagtgtcctgcgggctaccagagaggtccacggcgggcggtggggccaggggagcctggccgaagagcagaggcccccacggcgccctgtgtgtggaaacctccggatggccgcaggggggtggggggagaaccaaagccctgggatcgccgggggaggggcgggggcttggctcgggcttgggaggaggatgatctggaggaaggcctacagcagctttccattctttcagccctgagcccccgagtctccgcctcgcatccgttcgggcgcggtgtaaactccacgcctgagctccacgagacacggcggggcggagggaggagggagagaccagtccacacacaggcgtaccttattatatagaatttgtacaatatatttcttttcgtttgcatattttacccacagcttaacatcctttttacaggctgaactcactcaggctgatagaatcaaaattctttcaaccaaataagaaaaattcaaaatcgtaaacccgtaagaaaacaaattaaaaacggtgatgaaaatacgtcactcctctcgttaggaacagtgtctgtttgtacaacaggtatgctctggaacaggatttctttacagcgtaggcacgtgtttccacctttgctctgcgggcttcgcctcctccgggcctggggctcctggaaagcgccgggacgcggcggctctggctcggcagcgccacccggtggccggagacagaggcggccgggccgagccgggagagcagccgcgggtgcgagcggactcaggcttgtttcccgtgaactgcagcgaagatcccagaacagcaagggcagtgggcggacaggtgctctggggagcccagcgtttatttacagctgatcttcctgacgggaggatggagtacagcggcggccactgccataggggaggtgactccggccctaccgcccgctttactcggagtctggggtgtggaggggcgtgggtggcgctatctcgtctaccttccaggttggctgtgagtctgagcacgcagcggggcctccctcccaagcactaagacttgtttcctgtgagtcccctcttgggaaactccttactgggaggcctcctcgggtctgagggatgaagaaggtggggccttctctggggtggtgcaggcagctcccaaagcaaggtaggtttggcaaagagcaaaagatgggaaaagggtttctacggagccagcagcacctgcctattcaggtcccaagccacaggaaccaggccaggcctttccaccagggcaatggcctcagtcctcaggccaccaagttccaggacctgccccatgtgttcccgtctcccttaaatcccaccctccacccgccccgggatggttctaccagaactctggggcttagctgagaacccaattgtagggctgtgaagcccgctgcaccttggagtcctgacccagaaggcgaaagtgctcttataggaagatgcttccagacctgcagacttgggcccttgcaatccagatccctgcagaccctgcacagagggatcttcagaggccacggggcacactgggccatggcaatgctgacctggtcaagcttggccttggtggtggggccccttctctggctctggcactgtgtggtgggacgtgcttcggcccagacactgcccctaaaggcatgctccaaccccacgggtcccactaaggccggcacgcagcccacacgccagacttgcttcatgttcccaagcgtggctctggagggagaatcatcatcggcactccagggcaagactaaacccatcaaaagaaaaatgtaaaacagcactgactagaactaatgtcgttattgctacaagtgacagccaaacagccacgcagagtcccagaggtgggtatgacagactaccatgactatcaagcagaaataaaattatgtgggtttttactcttaaaataagatatcctctgatcatcttcacggtacataagctcacgcgtgctcctcacattctgctcctttcacagaatggtcagtccccggtcatgccctcgagcccctccagggagacagtgtggttctgctctaaaaacgtgaggtggaaactgaaatatgtcaaaacaacaa

SEQ ID NO: 17007 - DNA, 2300 bp, Homo sapien
ggttcagaagaggtaagggacatttccgtgcagctgaagtgtggccagggagagaatatgtgagggcgggagggtgtgcgcctcctggcagcagcttctggatcgatcgacgctccgacaggccgggaagcagttgctagtcctttgtaaggcgaggtgggaggtggcctgtgctacgttacctggatcatcttcaaagtgcactgtggttcctctttaaaacttatgtttgtagtcggcctctgagaggaaactcattttacagacacagaaattgggcaggcaccaagatgtctctcatgtgtaatcccagggagcagacagcacagagcaggaacttctgctcaagatatttttaaaattaagaacattccctttctcttggccaggaagttcagagctagtttttgggcccaactttttaatttgcgtagaactttacatatctgcaatccagtctcctccatcccccgtatcctaattttgacttcttactcattgtaaattctcatttaatttttcttttattttgtgtttcgtgtttctcttttattagtttcttatatattgcctaaaagcctttatgaggtgaagcagggttgcattagttagggtacagtctaagctgcggtaactaagaaaccagaaatataatggatcagggcagatagaatttgtttttctctcacataacagtccagaggtaggcagagtctggggtgggtgacagctctgctccacagagggacccagcaatcccagcgttctcatttgtggagtgaaagctccctcggccaccccacctctcggttctagcccagaggaaagaggggaggtggagaagggagtgcaccattagtccagtagactccagaggtggcacaccacctcgctcacctgcactgcccagaacccaggggcatcagcacatctagctgctaaccatgtctctagctgggtgactgtggctcttgctaaaactcagggagctttagagagagagaagggccaccgagtttcggccagagtcgtccacctgttcagactgcgttcaaataaggcaaacaccaggctgtaaccattccagctgtttctgtacctcacttctgttttctgtgtgtcagtttcctttttctgttcgtaaacctccaaccacagcagtggagtcactctgaacccattctgattcaggagctgcccaattcggggatcactctttgctcatttaaactctgttaaatttaaaaaaaaaaggagagaaggggagtccaggcatggtggtatgagcctgtaatcgcagctactagggaggctgaggcaggcaggaggatcgcttgagcccaggagttccaggccggcccgggcaacatagctccaacacgtcatctctaaaaaaaacaaataaattttttttaaaaatgtttttttaatgaaaataaaacatttaaattaattttaaaaatggaaaagatagaaaaggagaatggattttgcaggagagtttgcatctcctgccacagagcatacatgcattctgtatccatgcataagtgaaggctgtgaatccagttggcaaaacacggaatatgataatgtcattgatactaacagaagaacaactctgaagaacattgccaacaagtttaagtgcaggttaaaactggcctgtctacactgttggtactcaactttgtgctgcccttctgcaggtttgatggtgatgagctcaccacagatgaaaggatacggtccctggctcagcggtggcagcccagtaagagtctgaggctggaagaacagagcgccaaagctgtggatacagacatgattatcctgccatgcttggtatgtcacccgacctcggacccaaagtatctgcaccccatcccccaccccataccaccactgtaagaaggctagacctctgtaatggtggtcttgggtttgcagtcccggcctgcacgctgtgaccaagccactgctgaatcgaaccctgtgacccagaagctgatctccagcacagagagcgaactgcagcagagctatgccaagcagcgccgtagcaagagcgccgccctcctgcacaaggagctgaactgcaagagtaagagggctgtccgggactacctcttccgagtgaacgaggccacagctgtcctgtacgcccgccacgtgcttgcatccctgctcgccgagtggcctagccacgtgccagtgagcgaggacatcctggagctcagtggccctgcccatatgacctacattttggatatgttcatgcagctggaagaaaagcatga

SEQ ID NO: 17008 - DNA, 2300 bp, Homo sapien
tgccatctgatttcgatggatggtaaaccataggatcttgattatttttagaaacgcgtgggccttacacacagataacttcaaagaggaaatacaattttcctgatggcttctctgtctttccattgtttcaaggaatctgatactactacttcatgggaacacaactttgtcagacgagaagaaaaattgaaaagtttcttactttcctctctaaatgacaattcctgtgcttcatcatagaagatgaagggaagaatagagggagctagcctcctaggggatgagcaacaggtttgacagttggagtggaaggaggtagacaagttgaaaagctgggcgatggccaggcacagtggctcacagcagtaatcctggcactttgggaggccaaggcaggtggattgcctgagctcaggagttcaagaccagcctgggcaacatggcaaaactccatctctactaaaaatacagaaaattagccaggtgtggtggtacgtgcctgtaatcccagctactcgggaggctgaggcatgagaatcacttgaacccgggaggcagaggttgtagtgagcctagatcatgccattgcactccagcctgggtaacagagcaagactccctctgtaaaaaaaaaaaaaaaaaaaaaaaaaaaacctgggcaatatttggcatggagatgagcagctgacttatgagaatttcccatacctgagaggcagcgattgggaggaatgatttttcaaggaaacatatgtcagctcccttttaggataatcttcccaacagaggatatccatgaaaggaggagctcagttgaaggctgttcggtggaagcactgatagggaggtcatggagggcactcaacaccacagcagctggcctcagtggcatttcagctctgatccagccctgggagtttgtagttgtagaattgagaccattcatctgctgtttcttttgttggttggtttgtttgtttgtgggttttctctggcatttctttgtttgagacagggtctcgctctgttgcccaggctggagtatagacctgtgatcacggctcactgcagcctcaaatgctttggtttaaggggtcctcttgcctcagcctcccaagtagctgggactaaccacaggcatgcactatcatgcccagttaattttttttttttttttttttttggagagacagggtcttgctaagtttcccaggctgctcttgaactcttgaccttgagccatccttccacctccgcctcttgaagtgctggggttacaggcatgagccatggtgcccagcctgctgtttctttagttcatgacgtttatcacaatgtgctactgtttccattgtttacatcatagtaggaaagggaaaataaactccctaagggcagcaataatttctgtctttgaatccttcattcagcaaatatttgttgagcaccaagggccagatggaactgagtatgtagtgttggagccagaaagaaggtccctgctctcctggagcttgtggtctgaccggcaagagagacaacagggggcctgcgagaaaaactgctgtgggtcaaaaaaagcctttttctctagtaaaatttgaaccgatagataaggagtcagctttgggaaaactggacagagcattacacgcggagtgagtagcaagctccaggcctcaaaatggaacaagcgtggtggtcaaggagcagaaagaacacctcccaggctttagaataatgcaggaaaggtggggcgcagccggagaagcaggcagggaccttgtaggtctttgtcagccatgatcagaggcttggattttagcctaaagagccccagacagcttttggaagttagagcaggggagtgtgacataaaataggcttcattcaaaagtatgtgttgaatggacgaatgaatgaaagagtgaatgaacagactgagttacagctaaggttgtaccttcttcactccaaggcagtcacacatcattcttcttctgcttggcaggctcacggttttgaggagatccgtgctactttccttcagaccgatttgctgaagttgctggtgaaaaagtgcagcaaagggactggctttagtaaaacgtggctcctccgggacctggaagtaagagacgagagggactcctgctcctctttcctggtgcagatgtgctggcctaggagttagaagcatcaccgagttccagctgcttctgccctgtgcacactcctttagtacagtgttgaaaactcccttgcttctgtattccctgttggaaatagggattatg

SEQ ID NO: 17009 - DNA, 2300 bp, Homo sapien
ctctcccctccccctcccccataattttaacttttttttttttcaattatgattcttgtttgcatctagcaaaagagtgcattgagaagagtcttctattactaaaatttctgcccacgggcataagttcaaaagaaagctgcgaaaagttggagactgctgatgaaaccagtcatctccagccactcaacaagcgtcagaggacaagctctgtggtggaagagcatttccaagcctcagtatctcccactgaagccgcaccccctgccacaggagaccagagtcctggcctgggcacccagccaaagctgccatccagcagtggccttcctgctgcagacgtgtcccctgccacagctgaagagcccttgtcaccttccacacccacccgccggcctcccttcacccgagggcgactccggctgctctcctttcgatccatggaggaggccagactggtgcccacagtgaaagagaaataccctgtgctgaaggacgtcatggacttcattaaggatcagtcgctctcgcacaggaggtaagcccgttgttaccttcctgtcgctttctctttttaagccgtaggtacccagtctagtcagaggcttgaagttcatgttaaaaacgaacaaataatatttaggatagatcaagacttgttttagaatattcaagaaaagttttgatttttttttttttctttaaagaagtaatttttgggtgggcacggtgattcatgcctataatctcagcagtttgggaggccaaagtgggaggatcacttgggatcaggaattcaagaccaacctgggcaacatagtgagacccccccccctccatctacaaaaaattttttttaaaaattagctgaggctgggtgcggtggctcacgcctgtaatcccagcaatttgggaggctgaggcaggtggatcacccgaggtcaggtgttcgagacctgcctggccaacatggtgaaacctcatctgtactaaaaatacaaaaattagctgggcgtagtggtggatgcctataatcccagctactcgggaggctgaggcaggagaattgctcaaagttggaaggcagaggttgcagtgagccgagatcacgccactgtactccaacctgggcgacagagcaagactctgtctcaaaaaaaaaaaaaaaaatgacctgagtgtggtggcacctgcccgtagtcccagctacctgggagcctgaggcaggaggatcacttgagccaggtaggttgaggctacagtaagtcaagattatgccacttaactccagcctgggtgatagagcaagactgtctgaaaaacaaaaaaaagatattttttcatgtaagatttatatattatactgtttataaagtatatctcaagaacgtaccgttagaattttaaaaggaagcattttttgggtagctgccacttataaaactgtcttattttaacccagggagaaatttggatttggcattttctagaaacatggccgccctatgttacccaggctggtctcaaatgcctgggttcaaggaatctttctgcatcagagggttacaggcatgagccaccacacccagccaggatttgatattttccaacaaaattatttgttcataggcctacatctctggaagtattgcatgtttaagttagtgaggaatttcctgtcctaagaattaaggctttgtctctatggaaagtgaaaatatcaatgttcctttttaattcgttaagttaaataatgggttgtcggacttctggacagttggcatgaactgatttgtagtgctgctgagtgatgacttaaaaatagtaaagaggtattggtacttctcctacatggtgtttctaatacctcacaatagtgtttcctctttgatatatggcatcagggctttggcggggatattttccgtctgccccagctcaagagttttctgggtgttcctgacttgcattgtgtctccagtgttgtgaaggttctttccctgaggaaagcccaggcccagagcatcctggaagtcctgaagataactcagcactgtgcagaatcccttgggcagccccactgcttccatccacctttcatacttttcctgttggaacttctgacctgtcagaaagattttaccaagtaagtacaaaggacaggtccagaaggaaaacagcaaagatcattgtaaataaatcctgattatcttctctgattaatagcagcatcatttctatgtaggatacaaatgtacgtttttggttaattcattctctcattccaaggaaagatgggt

SEQ ID NO: 17010 - DNA, 2300 bp, Homo sapien
gtgtcagtgctgtgtgcttttgaagtagtttgccatggctgtccttgcttccctgcctggacagcataatgatgtggctcaaattctcccctagttagagatgaagcagaagtccctgatgagcctggggaatgaagcagaagaaaaacatagttcagaagctactgaggtgaaccctgagagcctgggtgagtgtgctaacaccagctgttgtccctgagccttctgttttcgttttagagcctggaaaaccaattactcaccttctagattatcttaattgaggctgtgttgacctagggaaagtaacacagatgctaaatatagtatccaaggatgtatcataaatagagaaaatcccaaagaggagtaatgttttattggcctgctccaaatggaacatctttctaatcacttctcttaggcggcatcaggtgctttttgagctacatcttttttcttttttgagatggggtctcgttctgtctcccaggctggagtgcagtggttcagtcatatagctcactgcagcctcccactcctgggctcaagcaatcttcccgccttagcctaccgggtagctgggacatcaagcaggtgccacaacacctggcaaatttttttttcctctttgtatcgcctgtgttaagcaattaaaaacttttttttagagaaggggtctcactgtgttgcccaggctggtgtcagattcctggcctcaagtgatcctcccacctcagcctcccaaagtgctgggattataggcatgagccactgcacctggccttgttatgattttaaagtgtgctcacactgaatattcagtgaaataaaagaattactattattttttaaatattatggttgttattttttaaaactcatatatttttaagagaaatatgctaaaaatttttacagataaaatagtgtggtgctggaatgtgtgtggaagtaatccggggagtgaggggttgatgggggtgaaacaagattggccgtgagttaataatgacggaagctgagtgacaggtacatggaagggtccttatggtattttctctatatacatgtttgaaaacatctacaataaaactttttctaaaaagtgtgctgatagtactggcgagattttgatttctataatgagataaaatttgattctgttcttctattctgtcagtaaatatgtgtatcactttttcgttttttggtttttttgtttgtttttttttttggagacagtgtctcactctttcgcccaagctggaatgcagtggcatgatctcggctcactgcagcttcaacttctcagactcaagcaatccttcagcctcagcctcccaagtagataagattataggcgtgtgccaccatgtctggttaatttattgtttttttatagagattgggtttcaccatgttacccaagctgaggtatcaccccaagtgatcctcctgccttggcctcccaaagtgctgggattacaggcgtgagccaccacactaggcctatatcactttattcatgaagctgtctcttgccctaaattgtgacatttaacttattttctctacagaagtaggcaataaatttaaacttttttttttaactttaaattctagggtacatgtgcacaacgtgccggtttgttacatatgtatacatgtgccatgttggtgtgctgcacccattaactcatcatttacattaggtatatcctctaatgctatccctctcccctccccctcccccataattttaacttttttttttttcaattatgattcttgtttgcatctagcaaaagagtgcattgagaagagtcttctattactaaaatttctgcccacgggcataagttcaaaagaaagctgcgaaaagttggagactgctgatgaaaccagtcatctccagccactcaacaagcgtcagaggacaagctctgtggtggaagagcatttccaagcctcagtatctcccactgaagccgcaccccctgccacaggagaccagagtcctggcctgggcacccagccaaagctgccatccagcagtggccttcctgctgcagacgtgtcccctgccacagctgaagagcccttgtcaccttccacacccacccgccggcctcccttcacccgagggcgactccggctgctctcctttcgatccatggaggaggccagactggtgcccacagtgaaagagaaataccctgtgctgaaggacgtcatggacttcattaaggatcagtcgctctcgcacaggaggtaagcccgttgttaccttcctgtcg

SEQ ID NO: 17011 - DNA, 2300 bp, Homo sapien
ctataaacagattagtcatttccaaggtaccttgtaactgaagttgttccacagagcagcagtatttcaggacttggtggtttagcttaatctgtggtatgtgtttacaaagtatcacaattacattctggtatgtgggtaaactttctctaagttttaatagtatccatggttttttttaaccttttctttctcatttcaaagattctcaatatattaaggcaaaaatagaactgtcatatgtcttcttctctttctagagttaggaagtaacatggtagtacctcaggcaaaaatggcattagtcctaagctccccactgtggaaacctgtcttcaggcatcaggtttgtccagagttggaattagaagcaagctggcccactcacccacaccggaatagtaaggaggtatttactcttccgttttctttctatttagactggaaactgcctgcaagtatttattactttaagttataaacacttgtgtttctatcttactacccgtattaagcagttagctccttgaggccagaaactataccttgttaacttgttaacgccaccgtgtcccacaggggccagtgcgcaataggtgttcagaaatactgaatgcgtgacttgggtgaaatgtaggaggtgctcagtaaatctctgttgatggagttatcaggcaaacaattgagtgtacttctagtgcctactgagtcaagctttagagcaatgatttgtgctataccttttgttctccttagaattacagcacatgatttaggtgtataagattttaaaaactaaaaagtttgccctgtctttatttttcacctctccttccctctatttctgtattctacttttcttccttcccctccctgccctgccccacgttattcagtagttaattgccaaatccagtggctcttcctcagcttctgttctccttgcctctgttaaatttggctccttcagaccctctcttctttggatccatgctagtccgctgtcttctcttacatctgactgcccacttgcctccttcattgacttttcatattcctccttccctaaagggtaggctttattcaggctttcttcccttccccacagcccaccaagacttcatcctctccactttcttctcctgtcaaacattgtggccctaattcctaatatcagtctccaggtctggttttctccccgctccaagtacctgtttccatcttcctgtgaggcatttccatttaaatgtcctgactccccttaactcagaagtgtaaaaccaaagaccggtcacttctgtggtggtcagtgttccccaggcctgaagccactgctccctagcatcccctgtcctcacctgtctccccattcctgtccagtcagcttgcaggtcctgtggattcttcctcatgatgttcatctctgtcctttcctctgtctgcatctttatccgggccctcatttgcacctgccttatgacattcgtacctaccaagttttttttataatcactgcattatcttgtcattccactgccaagcaccattaatggctccccattgcccacagggtgaagtctaactcctcaatgtgacagtcaaggctctctgcagtctcctttcaccttacctatctgactctagttcccatcactccccagctgagacttcaggccaggtcagtctccccactgactcgtaacctctgctaatggttatgttcctcagagccaaatctgccaatccttcagggtccaggccaaagcccatatcctccaggaggcttttcttaattactttaacctaccaggatctctctcctttgaattctcagcactgggtatcccttctaggcatttggcacttgataatcttttgctttacgggaatgctagttctaatgcttttaatgttttatttatgtttatctttttttaactcatatctctgtctggtcttcctaaaatagatttaaacttccggagagtgttcactgtgttttatacttctgctttggcctaatagtttgctcaataaattttattttttgaatgaatgtgttaaatgtgatgggtttattttttgtttccaggttaagaacattcctgacgacccctgccgccattttcttcttgattttgcccagtcagagcctgctcagaacttctgtgggccatattcagaacttttcaaaggattcatacaggcatgtagaaaacaggccccaaagacagatatagttgctggttccactattgatcaagctgtgaacgccacctttgctgctctggtgtatcgca

SEQ ID NO: 17012 - DNA, 2300 bp, Homo sapien
gttggccaggctggtcttgaattcctgacctcagatgatcctcccgcctcagcctcccaaagtgctgggattacaggcgtgagccactgcgcccagccatgactattatttttaagggttgggatgccttaaaggtacttttttcataagaaacacacaaactacattatctgaattctggccatgtacaggaagacattcttaaaatattttaaaagcctctgattttaaggtgaacagaaccttttaaaggcactgcaagtacccgctggtttactgctttatgtacacacccttcgtggccactgaagattctacatgactggctaactcattttcacaaaataagtacctttttggtcataccgtggtgttaaaagaaataggatcccaggaaggaggtagtgagacattaaaaacaaaaaatagggtgcgggtggagggagagagagcatcaggaagaatacctaatggatgctgggcttaatacctgggtgatgggatgctgtgtggagtaaaccaccatggcacacgtttacctatgtaatacatctgcaaatccaaatcctgcacatgtacgcctgaatttaaaataaaagttgaaagaaagaaaaaaaaaaaaagcaagagatctagttgatagtctgttttactaatgattcactgggtaaccctggatcagtcttcttaactcgaagtgaagcgcccagtaaataaactcccaaaatgccttccaaggaaaatattttgttgccaaatcaatttgctctcttaatgacttagcagacatgatcttggtgattatatgaagaactgcataattacaagtattcacaggaaacctggtatttgcctatcagtttcggatcctatgaaggtttaaatgagtctaatatatggttctttaaggatctacaaaccagtatgtattttagaaaagctagtttttgcatgaggaggataggttttagaatgtgagcctttccagcatgttactactgtctttccacacttattcggcgcccacactgaattgggaaggtgctgtgtaaaaacctggacaggacaatacaaaaaatggttctcagcgccactcctcctatccttacatctcttttctctccaaactgttcgagaatctgatagaagatctccagagtagcgtcaatcaactgcacaaaggtctgcattacaacatacagagagagacatatgggcttgtccagctcttcagagcaaggacggcctgatgcagactttccagacctctaacataggttaaagagaaacgaagcaaacgcctggtgaaaagctggaaacacctcatatgggtccccgcctggcctctccaaagcaaatgcccacctcttccttcagtcccctgggggcgaccgccctgccccatccccgcagtcgcctgccggccctgacctcctcgaactgctcgctagagcagccggcgccgcgagcctccagcagctcccggaactgctccagagtgacagactcttcgccgcggcccagccgctcttccagccagcgaaacaacgcgccgcgatgcctcgacaccagcgactcgcaggggggtgtgggcagcaacgctgcagcagcctctcgcagcctggccggctccagcagcgccgcggcgggtggtagcgctggagccgcgacgcccgggccgggggtcgtgcccgagaccgcggcccagtcctggtgtgggccccagccctcgccaccggcagctgccgcttcgtcttcactgctgtgactcggagcgttccccatggggtctccgtcttgggcgcctggctctgcagccgccgccgccgcctccccgcctcgacctgtcaacctccgacagcagctggcgggcggggacgcggaggagacgacggcggcccctgcggcttccggcttcctggccgtcaagcgacgaccgctgtcgcaaaggcgccgtcacgtagataggcggcctctaccaactcacgacagctaggcggggagcgccgcctcaaagggtgcaaccttgatttcccagaggacgagtctgtctcagtatctacgtcattccgtagcctccgctgccgccatctttgttggggctgacaacctgcaagccaagaagtacgagaagggccaggcgcggtggctcacgcctgtaatcccagcactttgggaggccgagacgggtggatcacctgaggtcaggagttcgagaccagcctgaccaacgtggtgaaaccctgtctctactaaatacaaaatattagccggacgtgggggcgcgtgcctgtaatccc

SEQ ID NO: 17013 - DNA, 2300 bp, Homo sapien
ctgtgtggagtaaaccaccatggcacacgtttacctatgtaatacatctgcaaatccaaatcctgcacatgtacgcctgaatttaaaataaaagttgaaagaaagaaaaaaaaaaaaagcaagagatctagttgatagtctgttttactaatgattcactgggtaaccctggatcagtcttcttaactcgaagtgaagcgcccagtaaataaactcccaaaatgccttccaaggaaaatattttgttgccaaatcaatttgctctcttaatgacttagcagacatgatcttggtgattatatgaagaactgcataattacaagtattcacaggaaacctggtatttgcctatcagtttcggatcctatgaaggtttaaatgagtctaatatatggttctttaaggatctacaaaccagtatgtattttagaaaagctagtttttgcatgaggaggataggttttagaatgtgagcctttccagcatgttactactgtctttccacacttattcggcgcccacactgaattgggaaggtgctgtgtaaaaacctggacaggacaatacaaaaaatggttctcagcgccactcctcctatccttacatctcttttctctccaaactgttcgagaatctgatagaagatctccagagtagcgtcaatcaactgcacaaaggtctgcattacaacatacagagagagacatatgggcttgtccagctcttcagagcaaggacggcctgatgcagactttccagacctctaacataggttaaagagaaacgaagcaaacgcctggtgaaaagctggaaacacctcatatgggtccccgcctggcctctccaaagcaaatgcccacctcttccttcagtcccctgggggcgaccgccctgccccatccccgcagtcgcctgccggccctgacctcctcgaactgctcgctagagcagccggcgccgcgagcctccagcagctcccggaactgctccagagtgacagactcttcgccgcggcccagccgctcttccagccagcgaaacaacgcgccgcgatgcctcgacaccagcgactcgcaggggggtgtgggcagcaacgctgcagcagcctctcgcagcctggccggctccagcagcgccgcggcgggtggtagcgctggagccgcgacgcccgggccgggggtcgtgcccgagaccgcggcccagtcctggtgtgggccccagccctcgccaccggcagctgccgcttcgtcttcactgctgtgactcggagcgttccccatggggtctccgtcttgggcgcctggctctgcagccgccgccgccgcctccccgcctcgacctgtcaacctccgacagcagctggcgggcggggacgcggaggagacgacggcggcccctgcggcttccggcttcctggccgtcaagcgacgaccgctgtcgcaaaggcgccgtcacgtagataggcggcctctaccaactcacgacagctaggcggggagcgccgcctcaaagggtgcaaccttgatttcccagaggacgagtctgtctcagtatctacgtcattccgtagcctccgctgccgccatctttgttggggctgacaacctgcaagccaagaagtacgagaagggccaggcgcggtggctcacgcctgtaatcccagcactttgggaggccgagacgggtggatcacctgaggtcaggagttcgagaccagcctgaccaacgtggtgaaaccctgtctctactaaatacaaaatattagccggacgtgggggcgcgtgcctgtaatcccagctacttgggaggctgaggcaggagaatcgcttgaacccgggaggcggaggttgcagtgagccgagattccgccagtgcactccagcctggacaacaagagctaaaactctgtctcagaaaaaaaaaaaaaaagtacctggaaaaagtcgcagacagcgagcttttcgccagtgccaggaatacagataaaacgagagagactaagggagggagcgcgagcactagcgcgcgagagagagagcgagagcgcgcgcgccgatgacgtcacgctcggcgtctcggccatcttagctgtagatagaggcggcaacctcggaagtgcggagcgggtgggcctatatagatgttgaggtgcggaggccgtgggcttttgttgggcctggctgtagccgcagcagcggtaatggcagcacggcttatgggctggtggggtccccgcgctggctttcgccttttcataccggaggagctgtctcgctaccgcggcggcccaggggacccgg

SEQ ID NO: 17014 - DNA, 2300 bp, Homo sapien
ctggcaaggcaacatctgtaaaaaagcactaggctggccgggtgtggtggctcacgcctgtaatcccagcactttgggaggccaaggtgggcggatcataaggtcaggagatcgagaccatcctggctaacatggtgaaaccccgtctctactaaaaattcaacaaattagccgggcgtggtggtgggcgcctgtagtcccagctattcgggaggctgagacaggagaatggcgtgaacccgggaggcagagcttgcagtgagccgagatcaggccactgcactccagcctgggcgacacagcgagattccatctttaaaaaaaaagcactagactggtggtccgagtccatattctgtcagtattcaggtgtgagggtttcaggcaaatcgcatcctttaaccccctcagctgtaacacagggacaccagcataaacttaatttgacaaatgtttcttgaggcctaacatatgcacaactttggtctacgtatcaaggactgtaaaggtgactggacccctttcctctgccctaaccttctaaggaaggcaaacaggtgcatcttgtactagaagcaggaatgactcagaccaaatgtactatatgacgggccataaaggaataaagtattgatgcatgctcataaaccatggatgaaccttgaaaacactatgcttaggggtggggggaagaaagattatttgggaccagggcataatgaagagatggttggaattattaaggaaactgtgagggtaggggcggggcgggatctcgtttatctgtgccctaagagcccccacaaaagtccggcacacagcccgtatcctagggcttccgacgctgggtaatgggtaacaagagacagaagacatgtttctccaatgtaagtcacgcagggcggtggtggatgacagagctggcccacagtcccgccagagccagagagcctagaaggatagtgcatgcagctcgtcccgcccaccgcacgggtttgatggatgtggggtggggatggggggggaaatagatgaataatgaaccaacgaacgacgcgcaggtggctactggctcgcgccagcggagagaaaggcgtgagcagcctcgctgatacctgcgaagccgctatagtgggacccaggctcgtagtgcctccggccggaggacacatcgtagacacggccgagcaacgccaagtacaggcccgggtcccctgggccgccgcggtagcgagacagctcctccggtatgaaaaggcgaaagccagcgcggggaccccaccagcccataagccgtgctgccattaccgctgctgcggctacagccaggcccaacaaaagcccacggcctccgcacctcaacatctatataggcccacccgctccgcacttccgaggttgccgcctctatctacagctaagatggccgagacgccgagcgtgacgtcatcggcgcgcgcgctctcgctctctctctcgcgcgctagtgctcgcgctccctcccttagtctctctcgttttatctgtattcctggcactggcgaaaagctcgctgtctgcgactttttccaggtactttttttttttttttctgagacagagttttagctcttgttgtccaggctggagtgcactggcggaatctcggctcactgcaacctccgcctcccgggttcaagcgattctcctgcctcagcctcccaagtagctgggattacaggcacgcgcccccacgtccggctaatattttgtatttagtagagacagggtttcaccacgttggtcaggctggtctcgaactcctgacctcaggtgatccacccgtctcggcctcccaaagtgctgggattacaggcgtgagccaccgcgcctggcccttctcgtacttcttggcttgcaggttgtcagccccaacaaagatggcggcagcggaggctacggaatgacgtagatactgagacagactcgtcctctgggaaatcaaggttgcaccctttgaggcggcgctccccgcctagctgtcgtgagttggtagaggccgcctatctacgtgacggcgcctttgcgacagcggtcgtcgcttgacggccaggaagccggaagccgcaggggccgccgtcgtctcctccgcgtccccgcccgccagctgctgtcggaggttgacaggtcgaggcggggaggcggcggcggcggctgcagagccaggcgcccaagacggagaccccatggggaacgctccgagtcacagcagtgaagacgaagcggcagctgccggtggcgagggctggggcccacaccag

SEQ ID NO: 17015 - DNA, 2300 bp, Homo sapien
agctcacagccctgaatcaaagaatctgaaagctggagtcagcgtcctgctttgggagctgcctgagctcctgtagtcacggcagaccagttcagactgtgaagcaggaggctatggctggggagaccagatggtctctgcaggaccccaccacgatgtgtgagtcgtaacaggctctgtggcccccttggagtgtgggaagtgtgggagccgaggttattcaggaagccttcacagcagtggttctcagactaatggttttctggttttctttctttcttttttttttttttttttttttttgagacagagtcttgctctctcacccaggctagagtgcagtggcaccatcttggttggctcactgcaaactctgcctcctgggttcacgccattctcctgcctcagccctgggactacaggcgcccgcctccacgcccggctaattttttttttgtatttttagtagagacggggtttcaccatgttagccaggatggtctcgatctcctgacctcatgatccacccgcctcagcctcccaaagtgttgggattacaggcgtgagccaccgtgcctggctcaaactttatggttttcaaactttctttttgtattttctatttttgagatggagtcccattctgttacgcaggctggagtacaatggcgccatctcggctcactgccacctctgcctcctgggttcaagtaattctcctgcctcagcttcctgagtagctgggatgggaggtgggatgggcgcgcaccaccacgcccggttaatttttgtgtttttagcagagagggggtttcgtcacgttggccaggctggtcgtggactcctgacctgaggtgatccacctgcctcggcctcccaaagtgctgggattagaggcatgagccaccgcatccggctggttctcaggctttaaatgtatgcatatcccctgggaagtttctaacaattctgatgcccgggttgcccacccccaagaccagtcacagaagaatctatgggagtggaaccccgactctggtatttgaggccagggaccaaggacagcagacccggccacagcagacgctgttggattggatgaggctcctgctttacatttgtaatcagcatgcctatacgccaggtccaagcgtggcgttttttaaaatgtccccattcctttcagtggctgtgacgtgaacagtcccagacaaccaggcgccaatggagaaggagaggaagaggctagagatgggcagacccctttgcatttggcagcctcttgggggctggaagagacagtacagtgtcttctggagtttggtgccaacgtgaacgcacaggtgtgtcgtttctcttttccggggagagaggtgtagccccagcatgagggaagcctcctcctatggcagaggaccttgcacagtccccagttccaggcgctgctgcttcatgaacacacgacctccctagcagcgttcatgatttcaggctgactgtgcttctctgtgcctttgtccttactacaacaggaggaagatttgtttcagctctttctctttgcctcctattcccccttagttacagatttcctctgagagtttagtcccaaatcgcatactgtatttaggaaaatgtcccagtagctcacttgagcacccctgagttacgccctttgatgcttttcaacattcgagcctgtgcagatttatatataaggccctatagccagataaggagtggtggcttagagcggagactcactgcagatgtgaaacacatgtttgtgctggtcctacggtcaccactgggtcactggaacgtggtgtaacaggaagtgacatttagtcatttctctttggcctcttcaaaagctgagtcaaacacagggtggtagtattgatcgattctcataactgaaatttgatttaaaagttataccctttcatatttttcctgagttttatcttgcaattgaacattaaattctgtgccttgttccataggatgcagaaggaagaacccccatccacgtggccatcagcagccaacacggtgtcatcattcagctgttggtttctcaccccgatatccatttgaatgtacgagacagacaagggctgaccccgtttgcctgtgccatgactttcaagaacaacaagtcagccgaggccattctcaaacgagagtccggggctgctgagcaggtgagtgaataacacctgaccttctccacatggtcctgggcgtcgcggaacctggagactagacagatgtcaccgactaaacaggtctcctca

SEQ ID NO: 17016 - DNA, 2300 bp, Homo sapien
ctttaaatcctccttttcgtttctgacactcttattctgttctcagattcttctttttaaatttcttttctttttcttatttaattttagagacagagtcttgctctgtcacccaggctgcagtgcagcggcaggatagagctcactgcagtcccaaactcctggactcaagcaattctccagcctcagcctcagcctcccaagtagcgacaactaaaagcctgcaccaccaggtatagctaattcagatccttccttccaaccttttgtctcttactcctggctgtcctccaaggccaccactttccctgcaatcctgaactattgatgcattcttttgattctcccttgagtaaaagtcttttttgaaaggtctcatgctgggccgggcatggtggctcatgcttgtaatttcagtactttgcgaggttggggtgggaggactgcttgagactaggagttcaagaccaacctggccaacagagactccatctctgaaaaaaaaaaaaaacaaaaaacaagaaaggtctcatgctattcagctatgttactgtttagccctccattttgcaattgtcttaactaatcgtatagtcctccccacattcaccaaagattttagctcctgatgctcctttcctttcctacctctaaatcccaacatctaattttcctgccttctcacttccacttcagccactctattccgtggctctgtcctggactttttttttttttttttgagacagagtctcactctgttgcccaggctggagtgcagtggcacaatcttggctcactgcaacctctgcctcccgggttcaagcgattctactgccccagcctcccgagtagctgggattacaggcatgcaccaccacgcccggctaatttctgtatttttagtagagacggggtttcaccatgttggccaggctggtcttgagctctagacttcaggtgattcaccctcctcggcctcccaaagtgctgggattacaggcgtgagccaccacgcccggcctgtcctggacttttctcatctcctagtgctacttcactatgaacctgtttgccactttaaccaccaagctctcacaacattgcctgcactgcactggccttcaattatcagagacctgcagtttcgtggctcctccatcagtccctagccagtctgtatcccacgtttgatggcctgggctgtcgtctcatagcaccctcaatttattttgggcaatgcaatcccaagccctggataaatgctataattcaaaatatctgctactgcagcctggtggctgagttctagaaaaaagtgatccatcaacacatacatgaggcacatgaaaccaggccttccaacttcagcgtcctcttccaaagtttctttgctcttcttggtctccttccttgtctcataacttcacccataaaatcgatgtcatcaaacgatctccctgattttcttcccccctatatatctgcacgcatgttcttgtttcctaccgttttagtggaataacaggtgacctgcctctagtctaaatttaatccgttttcctgagttctgcatcgcatgcagagcatcctacctccccagggacctctccactgactcctttctcccagcctctcctttctttacaaacctaaggaccaacaaaccccctctctcgaccctctcattgccaagcttctccagagtagtctgcattcgttgtgtcatccttttcggtgccctgccaaggacgtggaatatgacagggctcagtcagtgcttaataaatctcgagcctcaaaaatacccggtaaaaagaaacccggctctccgcttcccccagagtccagcaaccccctccgctttcattcacccactttcctaccctcggctccgccttttgccgcgcctcccgcgattctcgcgagacttggtgattccgttccgcaccgccccggttgagccgcgcacttctcgcgaggttgcaggcagtgccgggccagacatggcggaaggtagggtttttttgtggagccgcgcgggaagacacggagctgtgggggcgctgctggccgtgcgaagctgccgtgggaggggaaggccgggcgtggttgcatgggggctccgcgggtctcgcgagccttcctgtctagcctctccggagcttctcgggccggggtccggagcgcggttcctatgacaacgtccctcccgcgatgccgaccccgcgggactgcggccggctgcggagccgggctggcaggtcccgcgccggtgctgcgtgcagccgcggggcccc

SEQ ID NO: 17017 - DNA, 2300 bp, Homo sapien
aattcagtgcttgactctatgttcccacgatctaagctccaaattcctcctccactccacctcactacccactaatgcttatccttaacagcacctaaagcttctccaactttaaatcctccttttcgtttctgacactcttattctgttctcagattcttctttttaaatttcttttctttttcttatttaattttagagacagagtcttgctctgtcacccaggctgcagtgcagcggcaggatagagctcactgcagtcccaaactcctggactcaagcaattctccagcctcagcctcagcctcccaagtagcgacaactaaaagcctgcaccaccaggtatagctaattcagatccttccttccaaccttttgtctcttactcctggctgtcctccaaggccaccactttccctgcaatcctgaactattgatgcattcttttgattctcccttgagtaaaagtcttttttgaaaggtctcatgctgggccgggcatggtggctcatgcttgtaatttcagtactttgcgaggttggggtgggaggactgcttgagactaggagttcaagaccaacctggccaacagagactccatctctgaaaaaaaaaaaaaacaaaaaacaagaaaggtctcatgctattcagctatgttactgtttagccctccattttgcaattgtcttaactaatcgtatagtcctccccacattcaccaaagattttagctcctgatgctcctttcctttcctacctctaaatcccaacatctaattttcctgccttctcacttccacttcagccactctattccgtggctctgtcctggactttttttttttttttttgagacagagtctcactctgttgcccaggctggagtgcagtggcacaatcttggctcactgcaacctctgcctcccgggttcaagcgattctactgccccagcctcccgagtagctgggattacaggcatgcaccaccacgcccggctaatttctgtatttttagtagagacggggtttcaccatgttggccaggctggtcttgagctctagacttcaggtgattcaccctcctcggcctcccaaagtgctgggattacaggcgtgagccaccacgcccggcctgtcctggacttttctcatctcctagtgctacttcactatgaacctgtttgccactttaaccaccaagctctcacaacattgcctgcactgcactggccttcaattatcagagacctgcagtttcgtggctcctccatcagtccctagccagtctgtatcccacgtttgatggcctgggctgtcgtctcatagcaccctcaatttattttgggcaatgcaatcccaagccctggataaatgctataattcaaaatatctgctactgcagcctggtggctgagttctagaaaaaagtgatccatcaacacatacatgaggcacatgaaaccaggccttccaacttcagcgtcctcttccaaagtttctttgctcttcttggtctccttccttgtctcataacttcacccataaaatcgatgtcatcaaacgatctccctgattttcttcccccctatatatctgcacgcatgttcttgtttcctaccgttttagtggaataacaggtgacctgcctctagtctaaatttaatccgttttcctgagttctgcatcgcatgcagagcatcctacctccccagggacctctccactgactcctttctcccagcctctcctttctttacaaacctaaggaccaacaaaccccctctctcgaccctctcattgccaagcttctccagagtagtctgcattcgttgtgtcatccttttcggtgccctgccaaggacgtggaatatgacagggctcagtcagtgcttaataaatctcgagcctcaaaaatacccggtaaaaagaaacccggctctccgcttcccccagagtccagcaaccccctccgctttcattcacccactttcctaccctcggctccgccttttgccgcgcctcccgcgattctcgcgagacttggtgattccgttccgcaccgccccggttgagccgcgcacttctcgcgaggttgcaggcagtgccgggccagacatggcggaaggtagggtttttttgtggagccgcgcgggaagacacggagctgtgggggcgctgctggccgtgcgaagctgccgtgggaggggaaggccgggcgtggttgcatgggggctccgcgggtctcgcgagccttcctgtctagcctctccggagcttctcgggccggggtccggagcgcg

SEQ ID NO: 17018 - DNA, 2300 bp, Homo sapien
acttgagcccaggagttcaagaccagcctggccaacatggtgaaactctgtctctaccgaaaatacaaaaattctccagccatggtggcacaggcctgtaatccctgccactcaggaggctgaggcacgagaatcacttgaaccagggaggcagaggtgcagtgacctgagattgtgccactgtactccagcctgggcgacagagggagactgtttcaaaacaaaacaaaacacacttttttgtagcgatagggtcttgctctgtcacccaggctagtctctagctcctggcctcaagtgatcctcctgcgtggagtttccaaagagctgggattacagatgagagccaccacagcctgcagggcactggtcttgaccctccctccctcatcaattctctgcagccacagcaaaacattcaaaatgcaagtctgctatttttctactcctagttaaaacttttcaggggcctcccactgtttaaggattaggttcaatttctaaacctttatccagccctgatctttcaccagatttggaaattattacaaaaaataaatcttttttttttttttttttacaaaaaataaatcttaagaaactaggaataggccgggcacagtggcccttgcctataatcctagcattttgggaggctgaggcaggcggattgcctgagttcaggagttcgagaccagcctgggcaacatggtaaaaccccatctctactaaaatacgaaagaaaattagcctggcctggaggcgtgcgcctgtagtcccagctactcaggagtctgaggcaggagaattgctttaactcgggaacctgagaggcagaggttgcagtgggccaagatcacgccactgcactccagcctgggcgacagaacaaggctgtctcaaaaaataaataaataaataaataaaataaaaaagaaagaaactaggaatagaagtaaatttccttgatttggtaaagtgaaatatcaaaatggtccctttggtctatttgatagggggcagtggttcacacttgtaatgctaacactttgggaggccgagttggaaggactgcttgaacccaggagtttgagaccagcctgggcaacacagagagacctctggcccccccctcctttttttttttttttgtgagacggagtctctctctgtcggccatgctggagtgcagtggcaccatctcggctcactgcaatctctgcctcctaggttcaagcaattctcctttctcagcctccctggtagctgggagtacaggcgcctgccaccaggctgggctaatttttgtatttttagtagagaccaggtttcaccatgttggccaggatggtctcgaactcgtgacctcaggtgatctgcccacctcggcctctcaaagtgctgggattacaagcatgagccaccgcgccccgtcaaaccccccgatctctataaagcaaataaaaaaatagcagggcatggtggtgtgtacctgtaatcccagatactaaggagactcagatgggaggatcccttaagcccaggagttccaagctgcagtgagctatgatcactgcactccagcctgggcgacagagagaattgccgtccataaatgataataataacagggccggtctcggtggctcaataataatagggccggacgcggtggctttttttgtgcactcttcatgtaaagtgagttatcatcatatattgcctctattttgatgtttggttaaaatggggcacaccagtactaacttcggctttctaacaattcctacttcgcacaccatgtggcagtgttagatggcttttgggcgctcgccaaggactagacatctaccacttcttctggcctcttcgctcctatatccactgcttcaatccagaggctgtatttgaccctctgcgacctctttgtcatggcgtccgcggggcgtctaccagcggaggcttgggctggcagccgggcgtcgaccttcccaaaatggcggcggacgggacaactgcgctcaaggggcggggttccgccgccgggggcggggcgggaggccgaggggtcgggctagcgggcgggacgcttcccaagtcggcagtctcagcgcgcctgcgccgagcggccctgcgcgcagtgaggcagtggcgggggaaggcaccggtggggccgacgggcgggttgaaggagggaagcgggcgagcgaagtcccagtgcgcgccgcggcagcccgggcaccctccccttccgggcgtgagtcgctgtgaaaagagctgaagcgagcggactcgcaccg

SEQ ID NO: 17019 - DNA, 2300 bp, Homo sapien
gcttaagtgatccttccacctcagcctccagagtagctgggactacaggtccatgccactatgcccggctcttcacccatttttaaattggtttgtcattttatgctttaactttttgtttagatataatttataacttatagaaagtttatcatatagcgtaaagaaactcttataatctttacccagattcatctattattaatatttgccccatttgttttcttactatacatatctaatattttttcctgaaccgtttgagaatgagtggcataaatcatggccctgtacctctagatacttcagataaggatatttacttatttacttacataaccatagttcacagatgctgatatgctatttcttcctgatccagttttatcagttgatccagtacaggagcgaggttgggatcctgtactgctcttaattgtcttattgtcttgtctctcttttttttttttttttttttgagacggagtcttgttctgtcacccaggctagagtgcagtggcacgatcttggctcactgcaacctctgcctcccgggttcacatgattctcctgcctcagcctcctgagtagctgggactacaggtgcacaccaccacacccagctacttttttgtgtatttttagtagagacagggtttcactatgttggccagactggtctcgaactcctgacctcgtgatccgcccgcctgggcctcccaaagtgctgggattacaggcatgagccaccgcgcctggcctatcttgtctctttgttgcttttaatccaaaacagtccctcagaatattttttttttttcgagacagagttttgctcttgttgcccaggctggagtgtaatggcgtgatcttggctcaccacaacctgtgcctcccgggttcaagcaattctcctgcctcagcctcccgagtagctgagattacaggcacctgccaccatgcctagttagttttgtatttttagtagagacggggtttctccacattggtcaggctgatcttgaactcccgacctcaggtgatccacctgcctcggcctcccaaagtgctgggataacaagcgtgagccaccacgcctagctccctcagtctttcttagtctttcatgactctgacatttttcaatatacagtccctttaaagaaatagtgtttctcaatttgggcttgtctgatgttttttcattttaaaaattaaaaaaaaaatttttttttttgagttggggtcttgctttgtcacccagcctggagtgcagtggcacgaacatggctcactgcagcctcgacttcccaggctaaggcgatccttcctacctcagcctcccaagtagctgggactgtggacgcacaccactacacccggctatttttttttaaaattttttatttttttggtatttttgtagcaatggggtttcaccatgttgcccaggctggtcacaaacttctgggcttggatgatcctcctgtcttggcctcccagtgttaggattacaggtgcgagccaccgcgtctggctgatgtcttctcatgatgagattccggttgtgccttcctggctggaatgccacatagatgatgctgtgacctgcgaagaccttcacatctggaggcacacgacaccctcctgcctctcacaggtgatttattttaaccccttggtcaagatgtctgattcctctactgtatagttactctttttccttttgttactaataagcaatctatcaagagatgcttcgtgaccgtgctgacaccctcccccctcactgaagtcttccccccagatttagcccccactgatgagttttgcacacaggctgtcttcttgtaggcagccccctctgctacctttgtttttccgggaaggaccttagatcctgggtaggtgctcatcctgcctggcagtcgagtgcaatgctgctgtcctggccaatgcccagccttcctcatttgccccggcttcaaggcattggttcacagtcccgtacgggcagctagaccatctcacagcaagcagcactctgggaggctcatctcatttcctgccctggaagcttcccttcctcactgcagccactgaagctgcaggctagatcaaggggaccacagagttgtccagtccccagggtgggggtgccaggagcccttgtcctccgtagcaggtctcagaggctgacgatggggaaatcgcactggtgaagctgccgtggggtcaggaggaacctgcgataagacgcccaacagttagggcaggtgctttgaggtttggagcctggg

SEQ ID NO: 17020 - DNA, 2300 bp, Homo sapien
gaggctgaggcagaagaatctcttgaacctgggaggcggaggttgcaatgagccgagattgcgccactgcactccagcctggacaagagctaaactccatctcaaaaacaaaacaaaacaaagagtggaatcacgtagagggtgtcctgtgcctgtgactttgcagaatggagaagctgggtcagagtgggaggtccaggctgcggacccctagagacccatgctgagccagccccccagcttccccacttcaggacagccctgcatccttggcctggactgcccatcccgtcctcacccacttcccctccagcagaggcacgagaggctataaataacacggctgtctacaggcccaaaatccatgggctttgtactggcctctctttattcagggcccagcagcagccaggctggagaccccaggctggggcagccttgagcgggatgcaggcacaggcccaggcctcccacgcagagtgctgacagctccattcccagcccagccacagggtcctgccagctctccagccgggaattcaaaagtggcagatgtgcctcagccggagtccccgaggacagccaaagaggaaccgaggcactgctgctgtggggaccaacgggaggcttgcaggcaggacgagtgtaggcagggacctcagggctcctctgtagaggcgccagcgcccgaaagtaggccttgtctctccaggtcgttgctgtccacatcattgctgtctggggtccctgcaggaggaaagatgctcagcctgcccgaaggttgcagaaggtgctttgggaccaggcctgggcctgggcacgggctgtcaggaaatcctctctgtcccaaatgcagaatacattccagatccaaccccttgtcatcaccttcaatgccactggcgtggtctaggcaccactctcccctggaaggggagtcggctatgcctctcggcctcaacactgaccctcctacagtctgttctcaacacagcagccagggagatgctttggcaacatcaatcagaccacctcggtgctcctctcctggaagccccacagcagctcccgtctcactctgagcaaaagccactgtctttacaaggactgcctgctctggccccgtatccctcacccctaccactgtccctcttgcttctgctgcagccacactggcctccttgctgatcctcaaacatatcaggtgcattcccatggcagggcctttgcattgattgtccccactgccggaagcgtctttccccaggtcgctgaacggctcactccctcgtttcctccagatctttgctctagtttcgcctgtgcagtggggatccttgcagcctgcacctacctgtcccttttttttttttttttttttttttgagacagtcttgctgtcgcccaggctggagtgcagtggcgagatctcagctcactatagcctccgcctcccgggttcaagtgattctcctgcctcagcctcctgagtagctgggactacaggtgtgtgccaccgcacctggctaatttttatatttttagtagagacagggcttcaccatgttgcccaggctggtcttgaactcctaaccttgtaatccgcccgccttggcctccccaagtactgggattacaggtgtgagccaccgcgcccggcccctttctccttcctttcctgctttatacctctccatagcactcgtcaccctgaacatgctatatctttaaccttttctgtttctggtctgtcttcaccaactacagtgtcagtttctacaggggcctggacttggcctcattctttcactccccagcatctgcaaccttccctggtacatagcaggggtgtactaagcatttctggatgaatgaacaaacaaactggccagggattcagggggtggccagtgctgtctgtccctagggtgccggccctgagccgggcctggtgcaatgggtagggtacctgtgacaggctgccaggcccgggtctcgtctctctccaggtacagcgcagtcagcaggaagcagccgccccccagggcgatgacaaaggcgcagcacaggaagctctgctgcaggctgcggaagcgctgcagataggagtcagggcgcctggcccgcaggacactagagatctgcggaggagaagggatgagtctgccaggcccaccagcctggcccccagaccctccccaccccacacacgcagacacgtcttacaagtcctgtgagataggggctgccagcgtctcccaggatgtggcccaccgtgatctgaagtgcctctgccgtcc

SEQ ID NO: 17021 - DNA, 2300 bp, Homo sapien
aaagggcttcttgtcctccctgtccctctgcccttggtggccccttatcccacacaaggacttattctagaggctgcctttgagttgaaaccccagtgaaacacagtgggaagggctggcttgcttggtggcagctcagaggtcccccaggtttgaaaggctcatgccaccctcttcccctgctctgggaccttcccagtggtgaaaagggaaggcagcagaaagagaatgctcccctttctgtcaaggccgaaagtgtccacctggacaggactgtggccaaagggatgaggagttttggggcacgggaaggggaccctgggcttgggtctagagttgtggttgtgcctccttcaccactagacacagttccacagctgggcagcctcccacagctggactctgtccacctgctggcaccatcacacacttacgagatcattgctggggccgggttctagccccacggagctcctagctctctgtccttgtttgttaatcacccgtcatgccaggccaccatggggaactccccccatccgcctttgcaggcctgagctcagcgagctggaaagaggcagcaggcaactttgagaatgaaatctgttttcctaaccctcccgtcacagtcattcatacccagcacgctgaagcatatttttagtcactttgcagaatttaaaatacacctcgaaggcgccaagaaacaccagcttggggattaactctgctcacaagagacagtggaggggggcggggggggtgcctcgtgctgtgtcacccgttggctatgccatgactcactgtggccgaaagcttcaccagatgcacctgcctgtggacgtggggtccggaaaagcctctagcggggagtgagctccagccctcggggatgatgccagagcctggggcagctccagccctgccacagcttcactgcctgttcgtaatgggtcacgtccgtgccctgggacttgtctgtgaaacacagggaatgattaactggtttccgagggtttgtccagttctaacattctgtcctctgcactttatacaggattttaatttcgattttaattccccaaacaggtgaatgggggagggaagggggagatcgtcacagagccacagcacctctaaggaggggtgaaaccgtgatgggatgtcaggaacacagaagcaccccaaccactctccataggaggcagacccccgccccgtcccaccaaggggaggtgaccacccgtggatttccagactgaatcccatcctgccatctgcccccagatacagaaatggaggcccagagagtgggtgtcatgttcaggatcatgccacacaccagggcagagctgagctaggacccagcctcctgtctgccactgggggctttgtaccctctctagcacatacctggaagtctgaagcttggagatgtggtccctcaggagggaaagccccttctgaatatcctgtttctgttgggccccaatcacagcccttgctctccccgccaggggctgcgggccactctgtggggcaagggtagggtccgggtgcccacacaggaatgggcccggggtaggttgggggctggatctgggttgccctggggaggtgggagacacagcccaccatgactggtggaggtctaggttctgggccctccctgaactggttaaatccgggcgtgtgagtatcggaggagccaccggctctccaactggcgcccctgactttagccatctgagactcctctctccagttctcccagatacgctaggctcaagccctcagcccggctcccagagcctccgccgggagtccacgcccgaggcaggggttgggtgaagggtactgagtaggtgctgggagccccgtcaccagcaccctgctcccagctccgtagccagagcaaaccctctcccgctccccgcgggcgttcgcggccggtcggccccggcgtgactgcgcccccattggcaggaggggctctgccgcccgggcccccagtccccgggccccccacccccagggcagcacgtgcggggcggggctgtggcccgagcccggagctgattgggcgcgggcctggtgggcggggccgggccgcagctgtcagagccgcggcggcgaacgaggcgcagcgagctgagcggtggcagcgccgcagccggggccggagcgcaggagccgacggggcccgaccaggatggtgcagtggcggctccgcggcgcacgcacgcgctgagcgggcccagcctgggccccgcgccccccgcgccccccgccgccccgat

SEQ ID NO: 17022 - DNA, 2300 bp, Homo sapien
cgggcgtatccgcttccccctggggtggctctgtgtcctcccgagtccatgggctgcggtggtggtggggaggcctggcgcagttcagagcctcagcacggagccaggcggtggcaggggtgcgccagggtcactgcacaggcccagagtgaagggaggagtccgtgcagattaagtgctcttggtgctgggcaggaccccctctcctgcctccacccccagggagcgcctgacagctgccggcagggtcagggtcccggggaaatcgcgtcccggtttattaagtgtaacagtttattcctgctggaaacagggccactcgtttcatcagattcaggcccttttccacccgccccccacctctcccgcaacggggtgccccgtgggtgctggttgcttgcacacaatgcccactaaggctggcactccaaagaggcgaggcagctggagctcggggaacaggggctgcctgggcacccacagagctggctgtgcctgtcccgcccccaccccagcccctcctgtctgactctggcctgcccagctttgaagccaacctcctgtaggttggggcctgcttggtctgatgggggtctggggcccagcagtgccggcatttggtgctgagggtgcccgcgggtgcgagcggaggctcttgcaggcaggggcctgcctcaccagctcctgtcccaggccagtcgaggcctggcttggtcctcagggaggggaaccaagatgggtctttagcttgatgggaggtgaggacaaatggctgtggcgggggttcaggttccctcgggaacatgtgcctctctagacctcagtgtccccgtgacccaggtccaagggcagaagccaaggcaccctggtctcaggaatggagcaggagccgcgctggagaggcagcagcatggccgttcctgatggctcgggtactccgaggctcggagggctctgggctaatggcctctagtgactggcgcctgggcaacccccaaagtatcattccttaactgcatgtagctgggagggaggtgaagattccaatttcagaggggtgtgctgggggcacagcaggtttgaggccaatgacgctttcagtatggggcaggtcgcagtggtctgggttggaggtgtggaagcccctggggtgagggtgactgcagctgtgtgtgggtgggaggggctcagggaggagaagggtgactggcaggagagaagcagccaggctggtggggtgggcagtagaggggactgtggggaggagggcagggcccaggggagagaggtgtcaagacgtagggcaggagtgagtctgagggtgtgggggcttcagaagtgccacggcccggggccagggccaagcgcgtgagcctttctcctctggccgctgacctgcccgcctgttccgcagtacgtggtcatccccacgcggcgcgccactgccgtggccttgcagagcttcacctcccacctgctgggggacgccgggagcccctacctcattggctttgtgagtagccccggggtggggctggccagggcaggctgggggactgcaggagggctctgccctgacatccacccccaaatcctcgcagatctcagacctgatccgccagagcactaaggactccccgctctgggagttcctgagcctgggctacgcgctcatgctctgccctttcgtcgtggtcctgggcggcatgttcttcctcgccactgcgctcttcttcgtcagcgaccgcgccagggctgagcagcagtgagtgggggggaggggaggccctgctgcaccgccgggaagcagggaccgtgatagccaccgtgagccctgccctggggtggggcggggagggtacagacctcccatgcactcagtgcacccactggttgctggggtccagccctgaggcccagtgccagggtcagcctggagctgtgggaggccacgggggtgtctggtggatccagacttgggtttgtctctggacttagtggttttcaaagctggggcccctccccttcctcttactttctgacttctttctcctttcctctttactcctctctctctcctctccccacccctgggctctcccatctccccctggggctgacgaggtccctgcccagcacctccggtcagctggcccccacgacacgatgtgccagagcagtgcccgggcccggcccccgctgatgcaccaccctgacccccgcccgtctctcccccagggtgaaccagctggcgatgccgcccgcatctgtgaaagtctgaggtggtgagtgcaggccgg

SEQ ID NO: 17023 - DNA, 2300 bp, Homo sapien
caggaccttctgcacaagacggcgcgcatcttcacgtgagcacgggggtgcagggcgggcaggtgtggccggcagcccccaggcgcaggagagccagagctctaggcttgctgtctgcacaggaaggagagagccaagcttccagcctgggcccctagctcgcaggctcactgctcagccctagaggcacacgtcacttagtgattcccacagtccttgcttcatccccgcgttctcccgacacagtgccaacagtgccctggagctggggtccatccctgcccttgacagtctcaagtggggctgtgccaacagtgccctggagctggggtccatccctgcccttgacagtctcaagtggggctgtgctggggtggagggggacagtgggtgcacctgtggcaggggacacccaacccagtcctcggaggtgtagtgtgcatgggagtttgtcaggctgggaggccttgggcagggcagaaagggaggaagagcatcctgacgggagctggtcagacacgcagctggaaggtcaggcaagcagcgaggccacagacccccgcaccctcgcaggccctgaccctagcggtgctggaggccacagaggcattatcagcaagagcagtggcgtggggaagggtctgagtctggtttgccttttcagaaacggctggcagcgtggagaagggtttgggaggggctgtgctggaggcagagggcccaggagggaggcggtggcaggcgtgggagagacaggcaggcacctggtagacctgccttcagagctcaggtgctggggaggtgaaggcctgggagctggggcgctgcgtggatagtcaggaggggtggggagtgtgactggcagtgcattcttcacaaacccaggcccgcccgggccacgccttctcagatagttctgccagcgtgcgtggacagtgtcgtttgttgagcatcctgcctcttgcccccattatatccccggccctgcagggccacagagggttctaagcacatgaacccttgtctcgctttacaaaaggcctgaaggccactgccccatgagagacaagtgtagacaggaggggtgccccaggcaggcagttggcccttggtgcagcctccactcagggagctgttctgttctcccctggagcgcccctgtcaccccagcactctgagcccacacagcttccaggcagcctgcaggcggccctgggccctcctctgtggcctgggtcgcctctgtcgtcttctaggtctgtttccccacttataaagtgggacttgggttggctctgcttggcggagcagggtggaccgagaatgttctgaccagctctcgtcctcaccacccacaggcaccacctgtgccgtgcccggcgctactgccacgacttgggtgagcgcgcaggggccctgcacgcccaggtggagcggttggtgcagcaggctggccgccagcccgactcccccaccgccctctaccacttcaacgcctctctctacctgctccgggtcttgaagggcaacactgctgagggctgcgtgcatgagacacaggagaagcagaaagctggcactgaccccagccacatgcccacgggcccgcaggtgagcagggcctggcccaggagcagccccaggcatttcacagccagggagtggaggccgggacttccccagggcccaaccctcagccttctgatgaaggtaggccaggctctgctcccatcccagggacccctctcctggcctcacccagctcgctctcccctggcctaggctgccagctgcttggacttgaacctggtgacccgggtgtactcgacagcactgagctccttcctgaccaagcgcaacagccccctcacagttcccatgttcctcagcctcttctcccggcacccggtgagtgttggggcctgccctgcttcctcatggtccctgctcagcccagcctgcacctcacagcccttgtcactccccaccaggtgctctgtcagagcctgctccccatcctggtccagcatatcacgggcccggtgcggccccgtcatcaggtgagagacttcccagctcccagcccagggcctgtctgaattaacccgcttaaccctcttctgactggatattgtgaggccccagagcgctgtcctggtgagcacgggcacagctgtccctgccccactggcttggctgtgggtacatggtctctgaagggggtggccgtgccctggcccctgccacacagtgaacacacaggagctgagggggcagggccagcctcactcccgcagcca

SEQ ID NO: 17024 - DNA, 2300 bp, Homo sapien
atcacgaggtcaggagttcaagaccagcctggccaacagagtgaaaccccttctctactaaaatacaaaaattagccaggtgtggtggcaggtgcctgtaatcccagctactcaggagggtgaagcaggagaattgcttaaacctgggaggcggaggttgcagtgagttgagatgacaccactgtactccagcctgggcaacagaacaagattctgtcttagaaaaaaaaaaaaaaaggtgcagcccagaggaggacggggacctgcttgggcacacagcctgggagccggagagcaatgacaagggctttgggctgctttgtcccaccctggcctaaacgttcaagctgccgactgcattatgaggggaaagtctgctttttaggtaccaaagatcacacagttttcaagagctcctgcacacgcacatgcgcacaccacgccacctcactcgagtctggggttatccccagtcagatgagttcaatgtaattaaattagttaaaactaatgactttcaattctgtctctcatgccaagccaagcatggagggaataatctagaattatgaattgggggctggggcttgctggcttctctgggaccctgaccatccttgtcaggttctgcctttcttgagtgtccaagggggagttggactccttgtccccttcaggcttttggatcctgtaactgcgtattaggtgtgaaaaagccgtcagctagctgggcgcgggggctcacacctgcaatcccagcactttgggaggccaaggggggcaagggggtggatcacgaggtcaggagttcaagaccagcctggccaacatggtgaaaccccgtctctactcaaaatacaaaaattagccgggcatggtggtacacgcctgcaatcccagctacttgggaggctgaggcaggagaatggcttgaacctgggaggcagaagttgtggtgagccgagatcagaccactgtactccagcctgggcaatagagcgagactccatctcaaaagccctcagctcttggggtgtccagctggggtcttctgttctggattgtgggggtgactggccagggcgggccagtggctgggtgttggaggcttcttgatgccactgctgccatttggccagccccttgcctggtttagaagggctggggacagggcctggccccagtgtgtgtcctaccctgcccgcagtcccctgcagagagctgtgacctgctgggtgacatccagacctgcatcaggaaaagtctgggagagaagccccgccggagccgcaccaagaccatcggtgggtccttggtcacgagagggactagagtggtggggtggggccagcggtcccctatccgggctcaacccctccctcttgcagacccccaggaacccccgtgggtagaggtgctggtggagatcttgctggccctgttggcccagcccagccacctcatgcgccaggtggcccggagcgtgtttggccacatctgctcccacctgaccccgcgtgccctgcagctaattctggatgtgagttgggacctttgggagtggaatgtgggctggggctcactgagcagcgagctgcaccaggggtgccgcttcagcctccagcctccctgccgggagcctgcggccggtgggaggggtctcaacgaggccttggcctggcctggccgcctctcctaggctccgttttcttctgggaaatggaggtctttggtcaaggctgagtggggcctggagaggagggcgggggctgcaaatgggtcagtggctggcacccctccccaggtgctgaaccccgagaccagtgaggatgagaatgaccgtgtggtggtgacggacgattctgatgagcggcggctgaagggtgcagaggtgttgccagcatgggccgggcgggggcggtggggagtgggacgatcggggaggtgtgtgacgcgcctgcctctaccacacaggacaagagcgaggaaggtgaggacaacagaagctcagagagtgaagaggagagcgagggggaggagagcgaggaggaggagcgcgacggggacgtggatcagggcttccgggaacagctgatgaccgtgctgcaggctgggaaggcgctggtgagtgggggaggtggaggggggggcggccggggagggctcgggtgtccccatgttgtgtgcctgcccgaggcctggctgaccgctgggcctctgtccctcagggtggagaggacagtgagaacgaggaggagctgggggatgaggccatgatggccctggaccagagcctcgcc

SEQ ID NO: 17025 - DNA, 2300 bp, Homo sapien
cccagctacttgggaggctgaggcaggagaatcacttgaacccgagaggtggaggttgcagtgaaccaagatcgcaccattgcaaccccacctgggcaacaagagggaaaccctgtctaaaaaaaaaaaaaaaaaaaaggatttattatgtgctcactgctggctcaggccccaacctctggccttttaagttacctagacttgagttctggcatccagagctaacaatcattcttcagatcacccacaccggatggaatctctagctattttatcagctaagaaaatcagggtaataacgaaaaagcagtagggcctggggctagcactgagttcagatccagctttcaggaggacagtggaaagagtgcagagcctctgcctaggccctgggccccacgaagcaggacaggcagagcccagggtactgttggcatctctgtccttcccttcaggacaccccttacctatctgcctcaaccagactgggtacaaaataaagatcaagtctcccggaaaccaagcaccattcctgcttcttggttaattttccaacagcttttgaagcaactggagtcagggcttccctgatgggcagcacaggtgaccaacaaccagagaggggagagcctgggttggtatctttcagcttccccctgctccgctcacctcctgcctcctggggcaccagatgtgcaaggtgaatgttttcatttcactttctagaacagacagcaaagcagggaagcggctgagagggtgagaaggcgccccaggggcttgggtacaaaggggttggagttgagcgtgtggaaattcaaggcgaaggttagccctgacctcccccaagggttaggtcctctctggaccacagccctctataaacagcttctcaaaccaagaagcgagggtgaccagtagcagttcccctcccctgccattgtaaaaggcttctctgatttaatagaccgtttgatcccaccacctttacctcccactcccaagaaaattcttctccgtaatggcaccacaatgtacccagttatttcagtctcaaacctggcatccccctcatttcctctcccccgacatctaactccatcacccaccccacctgctccacatcagcccaaatctgacctgttctcattttccctgggtccagtccaccactatctctaaatggtcttcccgtgcttccacctgcgcagacctacagtccatcccccacacagcagccagcatcatcttgttaaaatgtaaatcggatccaggcttgcccctgcattaaactcaccagtgacttcccatcaccctcagaatgaaatcccagcccggggccccatgcagccttgcttctcgccagcctcagcccctccagccctgggtctctgtagttgcaaggcttgggatttcgtccccttagatccttgcaggagtacgggggaggggggcccttcttgtcactcagctctcatcccaaatgccacttcctcacagaggccttccctgaccaacccctcaaatcattattggagaccctattgaatagtaattagccgtgtttttaacgggtgatgtattcacgttccagcacttaaaagcctcctcctgacccttgcattcctaattctcttcataattatgatctttttaaatgcatttggctccgtgttcctccacgagagcagaggctttgttccaaccgcctagcacggcacgccagcaggagcccagtaattgttgaatggctcaatgttcggagcgcaggggccgctctgggacgagtcggatcgaagtgctacacctaggtttgtttccgagatgggcccttagaaatgcccccctggggctccaaaggggcagatgccacagccgccagggcggagcgggtgtgagcagaaggctgggaaagatgggacgccgctaggcgagggacttccgctcagagctacggcggaaatgccgctcttttaactctgggccggtctctcttggttcccccgcccctccgggttcttccgcctccgagccgacacaaaccggtgcgcatgcgccgtgccctgacctggaagcggctggggccggagcacacgtgtttcgtgtttcggtgagtgtggcggagatggagagccgggatcccgcccagccgatgtcgcctggagaagcgacgcagagtggcgcccggcctgccgaccgctatggcctattgaagcacagtcgcgagttcttggacttcttctgggacattgcgaagcctgagcaggagacgcgacttgcggccacggagaagctgctgg

SEQ ID NO: 17026 - DNA, 2300 bp, Homo sapien
ccgaaaataattctgcctgctggacaaaaggaataatgctaggagcccgaaggccaggctgaggctggggcaggagatgggggcagcacagagccctaaggctctcagatgccttttcccaggaaggaaggatggaccttcattctgagattctaaccttcttaccctgtgttaacagaaagtgaaaccaaattattttatgacataaatgtcataaaatcataaaaatggtcattttgattcccatctccccaccattggcaaaattagaaggtggcaaccctaggctgctctatttggttggttggttggttttttattggcccaagaaaaaaaaaaaaggaaaccaaaggtttctctggggaactagagacagaaaccagctaagggaagaaacaggagagaaagaagtgaacacagcaggtgtacactttttttttagactgaaggtgtggttccaggactgtggcaattgggatagcacattctagaccctacacctgaagccagactttctaggagaggagcctagcgatctgacttaacaagctcctcaggtgatcgtgatgcacaccaatcttaaagaacccgtgtacttgctcgtgaagaggccatgagaaagggaagcagctggagagccagatgggatgatggatgattcaaaggatgatttttatggttgttgttttaatgtagaaaatacctgagcttttccatttttacttttttattgaaagacaatattcacatagaaaagtacacgtcatcaatgcccaactcaatgcattttcacacccagggcactcgtgtcaccaacactcagattaagaaacaacatctcggccgggcgcggtggctcacacccgtaatcctagtacttttgggaggctgaggcgggcggatcacctgaggtcaagagttcaagaccaggctggccaacatggtgaaaccctgtctctactaaaaatacaaaaaattagccaggcgtggtggcatgtgcctgtaatcccagctactcgggaggctgaggcagaagaattgcttgaacccaggaggtggaagttgcagtgagctgagattgcaccattgcactccagcctgggcaacaagaatgaaaactctgtcaagaaagaaagaagagaaagaaaagaaaggtaaaggaaaaaggaaaggaaagaaaggaaggaaagaaaggacatctccagcattccagaaaccccctggtacctcctccagtcactatctgacttctaagggcagactgttgttgctcttttgttgttgcctgtttgtgtactttgtgtaaatgaaagcatatagcgtgcgctgtctcctgcctggctgctttccctcgtccttatgcttgtcagacctgtgtatattattgcatataattgtagatcactcactctctttgctgcagagtggtccattgtgacttacatcattcattctaacgataatggatgtttgggcactttccaatttgggactgttacaaacagcactgttttgcaacaagtccttgatgggaatcccagaatgaatttagaaatgttggtttccaggctgtggcgctaccttctggacaagagtcgcaaaacacgcacagggagttacgaaccaagttgctcctcaaagaaacccagacccagagtagccacaggctgagccttgaccccggccagagaccagacacccctacgccagaacctagtcacgtgcagactcaagcacgtgggagctctgacccaagccaccgtgaaaccgtagctctaattcaagtccacagtccctagagtcccaggtgggtgggatccatgggctacatcccccaaggggaggagcccagcaggtgccctgagtatcaaggttgtggcattaaggctgaactccttctcgacctcactgagctgtggccccttacaggcagtcaccccgggaaccctgtcgcgagagctcctcgggccttgtgtcctaatggggcaggctcacatgcagcctccttggccccgtgccctgcccagacctgttctggattccacccccacccttccccaaggtcgctgccacctcccacctgccaggcttgggcagggcctctgagacacagccggaaaggctggcaggcaggagggctggggcgagcactggggggccatggagcgggcagaagagcccgtggtctatcagaagctgctgccctgggagccaagcttggagtcggaggaggaagtggaggaggaggagacatcagaggcgctggttctaaacccccggaggcaccaggactcttccag

SEQ ID NO: 17027 - DNA, 2300 bp, Homo sapien
gctctgacctggtggaacctgactgctgtactgggaggtgagctgggactggcgtgcaggaaagagggtactgcaccttgggtgtgggggcagggcccaggttccagtactgtctccgcatgccttgctgtgtggccttgggccagtccctgcccctcttagggcctcagtttccccgcctcaggcccaaagatggtaacttccctaactgtggatttgattttgtgagacattggcaggggggctggggaaagcttgtcctgcatcctgcatccagcctagactcagagcagagcaggacgacggtgggcagcagtaggggcagagccaggagactggagtgggaagggcaggcgccagggcccccaggccttggtgggaggttggcctccacttgcttgctgacatcagggctggtgaatgtgcagggagtccagccaggttcacgggccctcacctccctcgcagcctggtactgggcaggagtggagctaaaggagagtgggggaggggcctgcagggaaggctcacaggagcccctgggcctgggaacagagctgcagcctcggtccatctgtcatggagccaggtcggagggtggtgctgaccctccatcccgcccccttcccaccccagaatcactctcttcctcatgctcctggctcttctctcctctcctgggtgcatctccagctactgactcggagatctgactgctgagaaaaaggagccaagggggatggtcttgtaccatctgccttcccagaacccacagtgagcccccatctctgcccttgacagagtcccgccttcggccccagaagcagccatgccccgtccccgagaagttcctcctagagattcccatgtggctcaggagagaccagataactagcctgaggctggagagtgtggatggatcccaggcagccacaggctctacgatctgtcacctcctcctccctgccaggcttcccaccaatggcccagccagcctgccttctcccggaggatggagagaagcctagagaccagcctgtccagtccctctcaaggcttctccacacggtccttccttggatcttagaagggaagggactgggcttctgtggctgagaccagggtttttgaactccaggttcttgtgctgagacctggaggggctttgagtgctgtctgcggcaagagcagcagcagcgtctctggaggctgctactaaagattccacctggagaaagcattcagggagcagtttggctcaccctgtccagatggctacctggaatgcacacacatgctcacacatatatgcagcatgcacaccttttggcatttgcctttttcatgaaataattgctggaaggctccttggattaggtaacccagcgttccttcctgtccccttggggctgggggcgggggagagaaccagcatttagcatctgtcaggctgctccagttcctttggggcaatgatggccagtccaggagggtttgtgggctccaaacaaccttgggagcagaacatgatatgaacaagcctttcagacttctccttcctgcaggtcagctggctatgcatgcccagcctctgggcctctttcaggcaggccaggcttgggaaaaagaaggccaattaggaaaggttttttgcacaaaggaggatatgttctcatttttattttaaatcagctttatgatatagcgaaaacttagagttagctttgcccatcatcccatcgtcctaaagcaacacctgtttcccttcttcccttttctggtgatggtttggggtgtgcatttggaagggggaactatctgggttcagccataaagagcattgagaaggaataggggtaagacccctggcctacgggtagaggccagtgactgagactctcattgcgggagggggcgattagtcgcaaagccgcccattccaggatttggagatgcagctccagcacacccttctttctctgtctgcccttagcctctccaggatctcctaacggaggccccttggtgggtcgggagcctctaccgaccactagtgggaagggcacgaagatcttgctatacagagtaggactgggaggggacagcgcgtagtcgcagagtcagggaggggacctcaccacctgtctcctccctgaggtcttagaacagatacaagaaattccaggcgaaggtcccacaggtgagcgtgtgcctgcgagagccgtggccgctgcatagggagggccccgcggagtggggcggcagctgtgggagctgtaggtgtccccattagcccggga

SEQ ID NO: 17028 - DNA, 2300 bp, Homo sapien
tgggagttctgtgaataagagactttgcacaccttccaagtgaatatccactacattccacccctgttcctgcacttaaatcactggcctggaaagctgaagatggcatttgctgtcatctctgatcatctctgagtgtgcctgtctcccatctccatgttgtggaaggagcgtcaacagaaagttccccttgagatccgtcctctggatgtagaccgcagtgtttgtgataaacagtggcccaagacagcagggtttggggtggtcccgcacttggaggaagcccatcaaggaacgttggtttattttcacagctgtttggtggtaggactttcatagaaaaatcttgagattctatagagctccagccattagcttattctcagccaagaatcattgtataattgggttggattttagccatgcacttctaaaccttccctttaaggagcggatctgtgtcttcacctcatgcagccggctctcaacaccagtgcctgtgtgcctttgtggggtcccacgtgtcccttgggtggtatattggggggtgggcaggagatccctgggggtgtcaggaggaacatggcagagcctgcaggtgggtgagcagtattctccatggattggttggtccaggctgcagtcttgccctctctctcggattctcccactctggaaaccattcccttgctagctctctcgtctcttgtacgcttggggaggtgagacctattattaacaggacacataactgaaggttagggtttcaaacctgaagccaatctgggaacacaagggctctgtaaaaagcatggctatatgttactgagtcctcgcacacgttaaatggagctctcccgagttgcagacatggccgtacgctctgcgcatgaaacagagcagatcctgccagaatgcagaacaatttcttttaaactttaggaatggtgtccctcatgtctcacattcagaatgagacagactcgagtttttaaagttggttccatgatgttcttgtctgtggtctttgttgggggtggggggtgagagatcataagacagtttgtgagtttcaaacatgattttacctctaagacaaagcatgagaagaaaatccaggaaggtctcacaatcctaagatatttggaaaccaccgttttaggtcggggttacgtgaatgttccccatttgtgagacccaatttcatcttgctttctaccctggtatggaggaattcacatcttttttcccctttcccgagagaattatttcttggagctgctcataagagtcttctgtttttccagatagattccttcacctggattttgttaaacttattaagtcggaccaaattggcttgtgtgtttccctgaagtgaacgtttcaccagagccacgatgggttttagcttttctgatagctgatggatatttttcaaggcaagcgagagcctataagcactttctgaatatgacagagcacatgctggtgagaggagaccgcacaggccaggtgtttggggaacagtttgttaaagccaatgaatttcgcaaatgtgctagatgatgaagagttctcagctttcccggttgcagtgatcagaactctgtaactggagaccggtgtgagagaagattttattctctgccatcatgaccgggtctatacgactgcaggcaattgcacagaagactagaaatgctgattcagttggtcagtttggggtgggacatcttaccagtccagcagaaccaactctggcttgggtttttctagctggtgacaggtgaccaactcattctgatgagttgattacgcctgtggacgtggcccacttgatttattttttctccctctgttagctgtgctctcccaaccacctgataaatggacccagtatgattatttctgagccatcttatctctctcacttttaaagcttggattgggtttgcttttagagcttttgatctcttatctcttggttcttggacttgctttgataccaaacagccctcatagtcttttgaaagaacaccttaaaaattcctaggctgggcgcggtggctcatgcctgtagtcctagcactttgggaggccgagacaggacaaatatttgagctctggagtttgagaccagcctgggcaacagagtgagactctgtctctacagaaagttttaaaattagccaggtgtagtgacacatgcttgtagtccccattacttggaaggccaaggcgggaggatggcttgagcctgggaggtcaaggcatcagtgagcgatggttgtgccact

SEQ ID NO: 17029 - DNA, 2300 bp, Homo sapien
atcactttgtaccttttgaattttgaatcacatgaatgtacttcccagtaaacaattaagcagggccggacatgatggctcatggctgtaatcccagcacttggggaggccgaggcaggtggatcacttgaggtcaggagttcaagaccagcctggccaacatggtgaaaccccatctcgactgaaaatacaaaaagtagccgggcatgttggtgggtgcctgtaatcccagctactctggaggctgaggcaggagaatcgcttgaacccggcaggtggaggttgcagtgagccgagatcacaccactgtactctagcccgggcaacagagcaagactccatctcattaaaaaaaaaaacaccaaaaacaaaaaacaagcaaaccagaaaatatgcatcacagacatattttcgtggacttcatttgtgttaccaggctgattgtaatccatgccatgaagtttatgttagtattccccttttgtttacattgcctgataatttgtttccctttgtctcccccaagggaagcattcatttataatgaatttttcagctcagtgtgtttcagcaaacacttattgacacccacaaaccctgacactgtgccgtctccaggggaaacaaaagtgagagtcctgctgggtgtgtagtccctgcctaggacgggctcacattagtgggggatacacacatacaaatgctcacactgcagtattaactgtgcaacagtagaagtgtgcgcaaggagaaaagtgttagaaaggaaagctgggccgggcgccgtggctcacacctgtaattccagcactttgggagactgaggtgggtggatcacaaggtcaggagttcaagaccagcgtggccaacatggagaaaccccgtctctactaaaaatacaaaaattatccaggcatggtggcaggcgcctgtaatcccagctactcggaaggctgaggcagagaattgcttgagcccgggaggcagaggttgccgtgagccgagatcgtgccattgcactccaccctgcattccagggtgacagagtgagactctatatctcaaaaaaaaaaaaaaaaggaaagctaattcactctggtggggtggtggggggtgaaagtaccgggtaagactttcctgagaaaccggaggtgaactagggtttagaagcatgaatagatgaatagactaatccaggagcaagttcttttgagagaacagcaggtggggttctggggaacacatggctccagcccaaaaagaaactggagacgaattagggtttagaagcatgaccagactaacccagaagtgagttctttgagagaacagcaggggcggcggggggagggggggttccggggaacacatggctccagcacaggagatgccagggtgcagtgggatgagaggtgaggagagcaggtcaggttagcaagggcattgaatgccagaaacatttggacttttattctgcaggcaacagggaggcagcggcttttatgctcaaaaggaatgagtcccagtggctggcacagagaaggcaagtgtgcaaagctggtcgaatgaattccgtggcctgaatgtaccttcctcaaatgccactgcaaactgggtctcctcgcccacttcaccctctcctgcaatccaacttgtgaggcttgtgtgtgcgcgcgcgtgtccttgcgtgtgtgtgtgtgtgcacgcgtgcgtttagatggaggttggcttcccagccacccaggcttggcccaaagtccgtggtacacacgtgcataactcctacccccacctcgcctgcctgctgtaccaggcgttgattccctcttcctgcgtgttttcggtccaaatccttttctttttctccctcccgtcaagatagtggtttccactccctgctctcgccaggacaccgccttttggactggggctgaattctgccccttgaagctctgctccttggagctgggggccccagcggtaggcggagttgattggagacctgccacccacattccgaccccaagcgacctccgagagggcggggtctcaggctgggttatttagctcgtccacccttctccaccagaaggagcgaaacatctttgagcaagatgggtctctaccgcatccgcgtgtccactggggcctcgctctatgccggttccaacaaccaggtgcagctgtggctggtcggccagcacggggaggcggcgctcgggaagcgactgtggcccgcacggggcaaggtgagctccccagagccgggcggggtgggctgcgcccctggctccgagtca

SEQ ID NO: 17030 - DNA, 2300 bp, Homo sapien
aatgacagattgctactccgagacttgctgccttacttctgctctagcagccttcttttttgaccttgtcctgccctcatacctctggttagtgtcttaacttccagcttggaccctcgtttttgtgtgtgagctggtagagagttggagtgtggagactgttttttagtactatgtccttttggcttgagggaaaaattttgcaaaaactgtcaaggaggaagcccagctgtctctgggacagggccaggcccttttcgctcccaagcaggaagccgaggaccagagctggcgttgaggagtcttttaccatgaaagcatgtccgtgcccggtgttgatgccccatagagggctttgcttcttgtgtctacaggaaaaagagacctgggcttagagtctgctgctgggaacggatgggatgtacatctctggctctcagagctggctcactggcctcttccttttttcctccacatccagggcaagctggcctcattttttctgtctagggtggatgccttgagccctcagctccaacaggtaaagggcagggagggagagggagagcccggggatctgagcctggattgtctcttgctgctcctcctctagcttttctgtcctgccttcatatgcccatctgtgtccttcggcctcattgtcccatctcaggtttccctcagagctctctctgatctccatctcttttgggtgtcagtggggctgggggttctgtggctgggctggattcccatctgaccaggtttctgtcctttctcccgcagttggcctgtgagtgttattcccggctgccctctttaggggctggcttttcccaaggcctgaagcacaccgagagctgggagcaggagctacacagtctgctggcctcactgcacaccctgctgggggccctgtacgagggagcagagactggtagggaccagggctgctagttagtggaacaatagtgaggaagcgtggcaggaaggaacaggaggggagcccagagacatggggcagttggtttttggggaaaatgggttagaatacaggcaggtcgtccaccagaaatgacagaggaggggatggaagaaagacagtgtacagggtagttgtgcttctgccagctcctgtgcagaatgaaggccctggggtggagatgctgctgtcctcagaagatggtgatgcccatgtccttctccagcttcggcagaggttttcgggactggcccgctgcctagggctcatgctcaggtgtgtgtgggtattggagggagcggaggcgtggagcaggagggattgatgagggagtgtcgccttcatcaggagaaaggagatgaaggtgggtgtgggagttatgccagggagcctgctctgaaggtctccctgctctgattctctttagctctgagtttggagctcccgtgtccgtccctgtgcaggaaatcctggatttcatctgccggaccctcagcgtcagtagcaagaatattgtaagtgggatttgtcatctcttcagagcccttgctcaggataccaggcaaccaggaaagtactggggacctgagtctccccaaacagtgtcatcctggagtcgtcccagagagcttcctacttttgtccaaataacatcacttcctatgtgtcgtgacacaggagcacagtgtcagagtgtagcaaatgcttccttgggggagggtgaatttggggatcagctgagtcattgctgagaggcccagccatccttcttaccttccatccagggtctattttagaggataggggtttgattttgttgggagagctgagatcaggggttgggtttcttacctatgtgtacatatgtaaatggtcattccctgtttctgtctctctctggctctcactttcttcctccactctttatctctgccccttttttctccagagcttgcatggagatggtcccctgcggctgctgctgctgccctctatccaccttgaggccttggacctgctgtctgcactcatcctcgcgtgagtgggattgggctggctgtggtgaagggatagggcgtgccagaaacgagggtcaccattccttctctgccccaggtgtggaagccggctcttgcgctttgggatcctgatcggccgcctgcttccccaggtcctcaattcctggagcatcggtagagattccctctctccaggccaggagaggccttacaggtgaccatccaggaaggcaggaagggaataaagaggagaggggggtgagggggtgcaggtgggctggggcttctggcatgttgac

SEQ ID NO: 17031 - DNA, 2300 bp, Homo sapien
aagcgtaagagtagagatgctggcatattattatagttgctgtactgtattattagtggttgttaatctcttactgtgcctaactgataaaatctttcataggcttgtatgtataggaaaaaaacagtttatgtagggtttggtagtatccgaagtttctgaggtttcaggcacctgcctggggttttggaagcaccccctgcagataagggggcgctgctgcactatatttgatctgttcaccagtgggtggacgtttgggttgttttcccattttggttattatgaatgatgctgctgtgaacgtccatgtacaagttgttgtgaggatgtaggttttcatttctcttgggtatatacgtagggtggaatggctgggtcatgtgttcactctatgtataactttttgaggaactgccagattgctttccagagtggctgcgccattttatatttgtggtaaatatttgagagtatcaatacatcttgttctcactttcctttaggtctctgctaaatggctttttctttttttgagatggagttttgctcttgttgcccaggctggagtgcaatggtgtgatctcagctcactgcaacctctgcctcctgggttcaagcgagtctcctgcctcagcctcccgagtagctgggatgacaggcgcgtgtcaccataactagctaatttttctatttttagtagagacggggtttcaccatgttggccaggctggtctcgaactcctgacctcaggtgacccacctgcctcggcatcccaaagtgctgggattacaggcgtgagctaccacgcccggcctaaatggcctttttggagatgctttttgtatctactctcctaaataaaatcctgtcccctttgcctactctgggcactcctttccttccttactctgctttatttttccttggagttcttagcaccctctgatatactatgtatttactttgtcagttgtttattttctgtctcctcttaactagaaaataagtacctggcacctaaaataaggtctcacatgaagtatatatcaagtaaatattttctttttttttttttgagacagagtctcgctctgttgcccaggctggagtgcagtggcatgatctcggctcactgcaaactccgtctcctgggttcacgccattctcctgcctcagcctcccgagtagctgggactacaggtgcccgccaccatgcccggctaattttttgtatttttagtagagacggggtttcaccatgttagccaggatggtctcgatctcctgacctcgtgatccgcctgctttggcctcccaaagtgctgggattacaggcgtgagccactgcgcccggccatgtcaagtaaatatttatttaacgaataaatatttccctccacaaaagggagagaccttattaattttattcagctctgtattccttcacgtaacctcatgcatagtgtatgtgttggaagaaggaacgatgcacgccgttagggagacgcgggtgccgtgagaggaggctggccatttggggcatggagaggttacctggggggctgatgaggaaacatctttcgtgggcttccagaatgtgagagaaggggagaactggaaggaggattcttgttgactcggtctgtgttggcatttttacagctgtaaggaagccaggaatagggggaggaggatttgtttgagggtgaaggaaggataatggatgagttcagtgtccattcagcaagcatttatggatgtctcctattaggtgctgcccagacatatagaggtgaagcagacccatctttgaagtctggtagtgggattagttgggctgtcctgtgtttggcactacttgggtggggcatggagggaaggatcaggcaaaatataacttgaggaaaggccgagaaacagcctttcccacaggaaaaaaggggaaaagctcaaggcttctagtgggatggccttttggcctcagaggagatgtgacttcagaaaggcttcataggtgctgggacagagaagggcttgaagaatcttctgcatttttaacatcccgtttgtgactcgcttccctgttttctttcctccagaacctttcagctcttggggcattggtgagtctcagtaatgcacgtctcagttccatcaaaactcggtaagtctttggcccttttttttctccaggggcgtgttcccttaggaagtgggcatatgtacatctttgctttcattgtcaccgtccccaggattcaagacctctctctattcccaagagtgtggagagtta

SEQ ID NO: 17032 - DNA, 2300 bp, Homo sapien
agagcaacgaaggctttgtaatagactaggtgagagtgaatggtaatttggaccggagcggcagtggagatggagaaaaattaacgctattgggttaatgtattttggaggccttgaatgccaggacttgaaggattggataggaggcaataagaggaaaaacgggccaggtggggtggctcacacctgtaatcccaggactttgggaggctgaggccggcagatcacttgaggtcaggagtttgagaccagcctggccaacatggtgaagccccgtctctactaaaaatacaaaaattagctgggcatggtggtgggtgcctgtacttccagctacttgggaggctgaggtaggagaatcacttgaacttgggaggcggaggttgcagtgagccgagatcgtgccattgcactctagcctgggcgacagagagactcctcaaaaaaagaaaaatgatgactcttggatttgaatctaacaatcacaaaagtacacaaacataaacatagaggtattagcgtgttcactacagtttgcattagcaaaaagctggagcagcctttaagcattaattcagcaatagaattattaaatcatggtgcacccatttcattcataccacagtttaaaaaacagcataaagaaggccatgagtgaaaacaagccacacgcagaccccaatcttgtaaaatattcatttatgtgcttgtgcatagactaatattaggaaagtatacacgctactggggcagggctttgcgggggaggagcagtttttctttttactttatgcctttctgtactgtttgaattggcttttgcaaggcgcacgtcttgtatcatttctgaagttgcaaatgtagttaaaaatgtctgtgatttcaagttacctagagagttattgattccttctctttccctgccgctgccgagttgcgcggaggcggaggcttgggtaccttcaagattcagcttcacttgtaacccaccgccacggccgaggaaggcattgctgctggaggggtaatggatgttaatactgcttcacaagaggtgctgaagaccgctctcatccaccatgacctagcacgtggaattcgcgaagctgccaaagccttagacaaacgccaagcccatctttgtgtgcttgcatccaactatgatgagcctactatgtatgtcaagttggtggaggcctttgtgctgaacaccaaatcaacctaattaaggttgatgacaacaagaaactaggagaatgggtagggctctgtaaaaatcgacagagaggggaaaccccgtaaagtggttggttgcagttgtgtagtagttaaggactatggcaaggagtctcaggccaaggatgacatcgaagagtacttgaaatgcaagaaatgaagaaataaatctttggcgcgcgtacacacacacacacgttactgattcctaggcagggtgcggtggctcatgcctgtaatctcagcactttgggaggccaaggcgggcggaacacctgaggtcaggagttcaagaccatcctggccaacatggtgaaaccccatctctacaaaaatacaaaaaaaattagccgggcgtggtggcgcgcgactgtaatcccatctactcgggaggctgaggcagggaaatcgcttgaacctggaaggtggaggttgcggtgagccgagatcgcgccactgcactccagcctgggccacagagcgagactccgtctcaaaaaaaaaaaatgagagttattgattcctacagcgaagatgtcccaagactccgtccgctaaatggaaatcgttccgactttggcgccttttgtccggaccacgtgtacctttaacatcacaggaccgcctcggacacgctcacaggcagcctcatccgccatcactccgggaaccgagcaccccgctgcctcggcgcccaggctgctctctccgcgcatgctccttcccagcttgagcccgcgagtccagcctgccttcactcagtgcgcaagaccgcagccccctccccacgccccctccccagtaggcggccgtcgcggtgtgtttgcgtcatcgcgccacgccaccactggaacccgggggaagatggcggcagccgttctgagtgggccctctgcgggctccgcggctggggttcctggcgggaccgggggtctctcggcagtgagctcgggcccgcggctccgcctgctgctgctggagagtgtttctggtttgctgcaacctcgaacggggtctgccgttgctccggtgcatcccccaaaccgctcggccccacatttgcc

SEQ ID NO: 17033 - DNA, 2300 bp, Homo sapien
cggtgttaccccccttaaggccgtgtctccgaagttattcattcttcttagtgggttcgtggtttcactggcttcaggagtgaacctgcagaccttcccagcgagtactacagctcataaaggcagtgtagacccaaaaaaggagcagcagcaagatttaaccgcaaaaaacaaaagaacaaaaggtctacctaacagaagagtaccccagtgcattgcaattgccggttcaggcagcctgcttttattctctaatcggccccacccacatcctgctgattggttcattttacagagagccgattggtccattttacagagagctgattggtctgttttggcagggtgctgattggtgcatttacaatccgtgagctagacacaaaagttctccacgtccccactagattagctagatacagagtgtagacacaaaggttctccaagtccccaccagagtagctagatacagagtgtggattggtgcattcacaaaccctgagctagacacagggtgctgattggtgtgtttacaaaccttgagctagatacagagtgccgattggtgtatttacaatcccttagctagacataaaggttctccaagtccccaccagactcaggagcccatttggcttcacccagtggatcccgcttgggggccgcaggtggagctgcctgccagtccgcatgtgcttgcactcctcagcccttgggtggtcgatgggactgggtgccttggagcagggggcggtgctcgtcggagaggctcgggccgcacaggagcccacggagggggaggggaggctcaggcatggcgggctgcaggtcccgagccctgccccgagggaaggcagctaaggcccagcgaaaaattgagcacagcagctgctggcccaggtgctaagcccctcactgcccggggctggccggccactccgagtgcggagccgccgagcccacgcccacccggaactcgcgctggcccgcaagcaccgcgcgcagcccgggttcccgcccgcgcctctccctccacacctccccgcaagctgagggaaccggctccggccttggacagcccagaaaggaactcccacagtgcagtggcgggctgaagggctcctcaagcgcggccagagtgggttccaaggccgaggaggcgccgagagtgagtgagagctgccagcacgctgtcacctctcaccactgcactccagcctcggcgacagagtgagactctgtctcaaaaaaaaaaaaaaaaacaagaaaaagaaaaaaaacttctgcgcatccttcagaaagactgtcctcatctgttccccgctctggacagcctgcactccctccacccccgcccgggccaattgctgttagcggctgtgtcttctgactcagacctctgtaatagcattcctgggtaatacctgtgtatgtgtctcctcaactattctaggaaggcaggggccatggtaattcgtatgtgtccccatcgattggcatagtgaatagcataacataggcacggatggatgggtccatagatggaccgatggatgggagcgggtgagtgagtggatgttagctgggatgggtgggtgaaggagatggatagtcagagacattggaaaagggaaccctgcgaagatcaaatgcaaacaccaggaggagctgacacgctgcagtgaagaagcgggagggctggccacagaaggcggcacgctccgagtggagcaggtgagcggcgcgcactgaagcaagcatcacgcaattgaaccgctcacccacgtgttcccccccaccatcctccttcccagacggcgcttcagctcattccaccgcccccagcagcccggtcgcccccaccgccactgagaaagcaaacaaaggggaggagacccctgcaggttctggatgccgaaggccaatcgaaagacttagatcccctggaaggcgggcgccttggtttaggggggtccaatcggtttcaaggggttgcagcggggcggggagatgggcgggaggagtgggagctggccccgcgcgcgggggagggctaccaggctgggaaggagcgcgaagggctgggggcggagccaatggccccgcgtgtctgctaggagagggcgggcagcgccgcggcgcgcgcgatccggctgacgcatctggccccggttccccaagaccagagcggggccgggagggagggggaagaggcgagagcgcggagggcgcgcgtgcgcattggcgcggggaggagcagggatcttggcagcgggcgaggaggctgcgagcgagccgcg

SEQ ID NO: 17034 - DNA, 2300 bp, Homo sapien
gctactaatttcatggtaaatcaggttgcttgtaagctttctttgctgctggcttagttaccacctcactgcaaaatgagtctgttttccagcatctgtctaaagttttgctattaactcctctccctttgactcctttttaaaacaactttaggccaggcacagtacgctcacacctgaaatcctggcactttgggaggccaaggcaggaggatcctttgagtccaggagttcaagaccagcataggcaacacaatgagaccctgtctctacaaaaaaaattaaaaattagccagatgtggtagcacacatctatggtcctgactcttcagaaggctgaagtgagaggtcacttgagtatgggagtttaaggctgcagtgagccatgactgagccactgcattccagcctgggcagcagagtgagaccttgtctcaaaaaataaaattttttaaaaaaagcaactttctgttattttattagcatttagggaaggattaagtcaaatgccagacccatcaagttttttgttttttgaggcagggtcgcgttctgtcacccaggctggagtgcagtggcacaatccatggctcactgcagcctcgacctctcaggctcaagaaatcctcctatctcagcctcccaagaagctgggaatacaggcatcagccaccaagactggctattttttttaatttttaatttatactttttaaaaaattatttgaatttatttatttattagagatggagtttcactcttgtagcccaggctggagtgcaacagcgcaatctcagctcaccgcaatctccgcctcccaggttcaagtgattctcctgccttagcctcctgggtagctgggattacaggcatgcgccaccatgcccagctaattctgtatttttagtagagacggggtttctccatgttggtcaggctggtctcgaactcctgacctcaggtgatccacccgcctcggcctcccaaagtgctgggattacaggtgtgagccaccaaacccagcctttattttttaaatataggagatggggtctcactatattgcccaggctggtctcgaagtccttagttcaagtgatcctcccacctcagcctcccaaagagctgaaattacaggagtgagccaccatgcccagcccccaaatttttttataaagacagtatctcactatgttccccaggctagaccattcagtttaactgagtctaaccttcatgtgctaaccttgggcaaactagtttcattcttgataatctactataaactgttacaaacgatctttccaaaaaaggtaattctggtcataacacacttcttaaaaaccctttaaaggctcaaatgtcttcagactcaagtccaaagtacatagcttgcaagccttttcctgattccgctcctctctccagcctcaccattgtcatacctaacccccaccacgctccgttcactccaggcaggcagaatcccttgctggactccacatgcgctgttcccgtcacagcaccatgctgttgcctatgccgtctcccttttccactacaagctttcatccacgtagttcacctttaagattcagctcacgcctgtaatcccagcactttgggaggccgaagagggtggatcgcttgaggtcgagttcgagaccaacctggccaacatggtgaaaccccgtctctactaaaaatacaaaaatcagccgggcgtggtggcgggcgcctataatcccaggcacccgggaagctgaagcaggagaatcgcttgaacctgggaggtggaggttgcagggagggagatcttgcgactgcactccaacctggacgacagagtaagactgtctcataaataaataaacttgtgtagaataaactagaggccacagacagtgtcaagaagatggacaggtctgaatggcctcgggctaggggatattccactgtcgcctctgactacgggtggtcctgtggctgaggcgcagcgggccctgggagttgtagttcatcaagcggaccgaggaggcgaggctgcgctgagcatcctgggaatcgtagtgctcgctacacggtgccctctgcgcaggcgcacaccgagagccacttccggaacaagcgtcgcgtttctgaggagaaactcttggtgagaattcccagagtgataatggctacctacagcctggcgaacgagagactacgcgctctggaagacattgaacgggaaatcggcgccatccttcagaatgcaggttcgggatgcgacaacctggacagcggggagcgaaag

SEQ ID NO: 17035 - DNA, 2300 bp, Homo sapien
ctttcctggagcgtgtgtgggggcaacaaggacccatgggttcaggaattgatgagctgtcttgatctcaaaggtgagacttttccactgctcttcaggctctgcctccagggcttagcagcttccacctgacagttttctttacctgagccttttcccctggggccgcacattcctagaaccttcttctgatcctgtccaaagtacttagactcgagtccctgtttgccaaacggggtgatcattcaccatcaccttcatgagttttgccaattcattctaccacgtgtgctattgtctacttattaatatttttcttgaaatcaaagtactattttattttatttttttgagatggagtctcactctgtcacccaggctggagtgcagtggcacgatcttggctcactgcaacctctgcctcccaggttcaagagattctcctgcctcagcctcctgagtagctgggattacaggcgcgcaccaccaagcctggctaatttttgtatttttagtagagacagggtttcaccatgttggccaggctggtctcgaactcctggccttgtgatccacccgcctcggcctccaaaagtgctaggattacaggcgtgagccaccacacctggcctatttttcttttccaatattttattatgaaaatttacacatatacaaaagttgaaagaatggcacactgaatatccagtgcctccacctagattctacaattttatttatatatgtatattttacatatttacataaacatatattttacactatcaattttacagcaattacacgatatttgctttattaagtatccatctattcattcttctatccatcatccatcaccttatttcttgatgcatttcttttttttttttttttttttttttaatggagtcttgctctgtcgcccaggctggagtgcaatggtgccctcagctcactgcagcctccgcctcccaggttcaagcaattctcctgccacagccttccgagtagctgggattgcaggtgcccgccaccatgcccagctaatttttgtatttttttagtagagatggggtttcaccgtgttggtcaggctggtctcaaactcctgacctcaggtgatccacctgcctcagcctcccaaagtgctgggattacaggtgtgaaccgcagtgcccggcctcttgatgcatttcaaggcagattgtggacatcattgcacttcatcccaagacatttcagcatgtatattaagtagagttcaatattttaatgcttttttttcttttgagttcaaatttacatacaatgaaatgaattacttttaagtgtgcacaaactagttttgaaaacttaagtagaggccaggacggtggctcactcctgtaatcctagctctttgggaggttgaggccggtggatcacctgaggtcaggagtttgagaccagcctgaccaacatggtaaaaccccatctctactaaaaatacaaaattagccaggcatggtggcatgtgcctgtaattccagctactcaggaggttgaggcaggagaatcacttgaacctggaggcggaggttgcagtgagccgagatcaggccattgcactccagcctgggcaacaaaaaaaaagaaagaaaacttaaatagtaaattatcctaagcaataatatctgtgaagtcacaagtttgatgcattggttatatttttctcttaaaataaatatacaaccattaaaatacaaaaggttcttccatgtcctagctaaagttttgtaggatctgtgtcatccatactgcctttaagtctgcctagacctctatgatttcctttcatcctcccaggaaccctggcccttggtactacaattatcctcattttacagctggaagatatcacttccggagaggttagggacaaggggtgaggttacacagctacttgaggttacacagctactttacagcagagcttggaatccaaccctggtcttctgatttcccagttcatgacacccacttgtctcgtggttcgctcacttccttgtcccctaccttttccgtctgtcatctgccttcctcttctggccttcagcgtgataacctccctgactcactcttccctctgttggagctcagaacatgacactccaaaacatggcaccttggtaattacgaaaacagcagaagtaagtagctcactctgctctgtttttctgtgagagctggccataaaggaattctctaacttcacgtggaagtaggtcataggctctcatttcagatgggtcctgccc

SEQ ID NO: 17036 - DNA, 2300 bp, Homo sapien
caacatggtgaaaccctgtctctactaaaaatacaaaaattagccaggcttggtggtgcgcgcctgtaatcccagctactcaggaggctgaggcaggagaatctcttgaacctgggaggcagaggttgcagtgagccaagatcgtgccactgcactccagcctgggtgacagagtgagactccatctcaaaaaaataaaataaaatagtactttgatttcaagaaaaatattaataagtagacaatagcacacgtggtagaatgaattggcaaaactcatgaaggtgatggtgaatgatcaccccgtttggcaaacagggactcgagtctaagtactttggacaggatcagaagaaggttctaggaatgtgcggccccaggggaaaaggctcaggtaaagaaaactgtcaggtggaagctgctaagccctggaggcagagcctgaagagcagtggaaaagtctcacctttgagatcaagacagctcatcaattcctgaacccatgggtccttgttgcccccacacacgctccaggaaaggagctggaacctgcggaggagagacctgggcttagctgcggcgccttctttccttccccggctccttcctcattccagaggcgtgaagttgccaccaagaaagagccctttctcctgggactgggaaactccccagtaggtgagacggagtcatgaagtttcggggaatgagagcaaacggaacccggagatggggctcggtgagccgggaaggagttcaggctggaccagagagggtcctggaggcacctgcaaggaggggccgcccaggcgctgccctcgcagaggcaggtaaaattacctcgtgtagtatagacaccgatggtaagctctcaggtgtttccggagacgattcatgaactgaaccgatggcggggagtcggaagaaattcttttaccacaataacaacttccagtgacgctgccctcgttgccattgcctgcgcgggacggaggtggtcggcacccattcccaggcccagggtccccactccgctgttccctggcatccaatccacagccccatgacagcctctcggtggacccagggtcagagcgccaggctcaacccacacatcatcacgcccccgacaacatccataatcccgcccggagccaggcgtccccgggcctctgtccccaaccccaggcggctggctggctttcctcttgtccccgctgccttcatccactcaactccgtgggcctcgtgtcccctccccaactcacccccttcccgtgacaggggaatctgggtcccctgccccgcccccggctaacctggctgagtcaggtacaccagcaggagcagaagcaggagcaggagcacgcgggacccgggccgcaagtcccgtcccatctcggggctccgcggactctgcggggatggagccacctcgctctgactcccagacatgctccggcgcgtgacgtccagctggtgtctcaatggctttcgccggggaccggaggagacggcggccggagaggaggcgcgagccagctgcaccccccggccctgctgtgccccgaccgtgcgctcagtactcggcccgcgccatgccagcctctggacgcagggaaagccgaggaggtggagctcccgcgccctgcgcccccgcactgggcccggctccgtcgagggaaggccaggaatcttggaagaaaccgaaagaaaactccggcggcgggcgaggaggggcgggaggacgacggcccgaggagccgattcggttcggttcaggaggccgcccgcctggcccgtccgccgacctgtgaggcggctgcactgccggaccggccctcctcctccgaggcactttcacttccccgatccgggcgccgcgggacccagccgcgctgcatgagcctcccgggcggcccggtggagagagtcgccgccagccccggccgcgcgcacctgcggggcagccacccgcggacgcaccgagcccggggggcgtggccgcccgctgagccggcgagggctcgggcagccctgacgtcacaaccgcacccgcgcaccctccaccgcgaggtatttaccttcgaaaagtggtggcggctgcaggtaccggaggagtggggcggccgggaggggctaggtctaccggggctgcccgccacgcagatccgagcccagggaaccccctcgctcccactcccataccccacagacgcatccaaaatgcttccctccccaccaaaccgttcccgataggattagccctctctcctctctagccttaatttaaactctgc

SEQ ID NO: 17037 - DNA, 2300 bp, Homo sapien
gttcgagcacgaagggaagcaaaggtgaagcctggccggggaccccatgtccgcattggggttttggctaacttcacacctagccttgggaccaagctctccagctctctaaatgcagttgggggggagatggcatcaggctggaggaggtgcttgggaatccagggcccgagtcctccccagcctcagataccagatttctataccgatgcagccgggcatctcccacagtaagctgtcggggctttcggggatccccagagcccatgggacaggccatgctgtgacagaggagagcataggcccaaggagccaggtccttggtccctgagccccagcttgcggttccctgggctccatccactagcagatcaatgcccaagatggtgccatgctcatccgtcacaagtaagagacaggaaacgtgcaggggggcagcctctggggaaagagggaaaagttgaggtggtagggggcagcgagagacaaatgtggtcagggtcaggagtaccaaactcaaatacctacggggctaggcaagtaacctcactgagtaaagggctctgggtagagagggcacgctccttctaaaggggacagctgctacagaggaccagaatgcgctgccatgcagaaatgtaggcccactgtcagagcttgagatttttcttgggaatgtgtaaatccagacttctggatactttttttcttgcaatgtttaaacattaaattaaaaaaaaaaaccccactgtgggtcaataaaaacaccttttcaggccagattggcctgaaggccagcactcagaactagtggcaggggagggcttccgaagggaggatggctgggcaaggggtagggcagggccagccctgggttcttaccactcctctgtcccttcctcttctggggtcttgtttcgttctccaccctgtcctctcggcagccatccttgccacctcctgcctcccgggcagcctcctctgactctcctggagggtttgtttcctggggggactccctgctggtaggggctagctcccggtcctcctctggttccaccttctctgtgctgcctgcacccccgtcctctctcttctcttcttcttcatcttcctcctcttcctcctccccttcctccccatcctctaggctgacaaagctgatgtaggggctcaggtctcgcaggtggagtggagggttgtctcccaggagccaggcagtccccaggcctggtccaggacctggttctgccccttgccccaggctgatgcccacactatggttgggcaggacatggagcacccaaagggcagggtcctggggtagccttctgatctgggcctccagctgccggcagcggccctcaaggctagtccctacagctccacgctctgccacaaactttcggaaccagccgaagagaagggcagtgaaatcaaggaactcatcccggtatccagacacaaactccatgtcttcagcggcacagggccccggcccagactgagcaaaagaagggatatatggtgagggacaggagagcaatgatggagtttggggctgggtcacaaattgagggagagggtaggtttgagagtcacttagggttggatccgtggatatgctaggagcggagaagaggatttttcagggctgaggatgggagtttagggaggaaaatgggggctggacttgaaagtgggtgaccagggttggagaagactactcagggatgagatggtatttggggcttaaaattggagagttcacaccctcaaaagcagagtttaaattaaggctagagaggagagagggctaatcctatcgggaacggtttggtggggagggaagcattttggatgcgtctgtggggtatgggagtgggagcgagggggttccctgggctcggatctgcgtggcgggcagccccggtagacctagcccctcccggccgccccactcctccggtacctgcagccgccaccacttttcgaaggtaaatacctcgcggtggagggtgcgcgggtgcggttgtgacgtcagggctgcccgagccctcgccggctcagcgggcggccacgccccccgggctcggtgcgtccgcgggtggctgccccgcaggtgcgcgcggccggggctggcggcgactctctccaccgggccgcccgggaggctcatgcagcgcggctgggtcccgcggcgcccggatcggggaagtgaaagtgcctcggaggaggagggccggtccggcagtgcagccgcctcacaggtcggcggacgggccaggcgggcggcctcc

SEQ ID NO: 17038 - DNA, 2300 bp, Homo sapien
cagaagcaaaaccaaatgtatcagtcatcataattacctatgagtcagagacaaatagttggggaggttcaaagtattttctttttcaggcatcctctgattcaagaggtaaattctccatgtatttttctcaatccagttcctctgtcttataaatagcagagattctggcttttctccattttccacatttctgtagtggtctgagtgggccgcaaggaggggctgcatcaggggccactggctggtgacactttccaggtgacagcctcattgcataccctctgaagccctgcagcccttcctgctaccctcatctcttcatggcactcccacatcctacttgagctagggctcattctgtgggggccttcactctcctgtttgcttctgagacccaggaggcagaggttgcagtgagccgagatcacaccactaaactccagcctgggtgacagagcaagactccatctcaaaaaaaaaacaacaaaaaaccattagccaggtgtggtggcacacacctatagtcctagctactcgggaggctgaggtgggaggatcacttgagcccaggtggtcagggctgcagggagccatgatccactccacaccagcctgggcaacaaagggagaccctggtctcaaaaacatttttttaattaaaaaaaaaagaagtcgactgggtggcttggctcatgcttgtaatcccagcactttgggaggctgaggcaggtggatcatttgaggtgaggagtttgagaccagcctggccaacatggtgaaaccccgtctctactaaaaatacaaaaattagctgggtgtggtggtgggcgcctgtaatcccagctacttgggaggctgaggcaggagaatcgcttgaacccaggaggcggaggttgcagtgagccaagatcacgccactgctctccagcctgggcggcagagtgagactccgtctcaaaaaaaaaagaagttatcaaggaaactgcagcaccccaacaaaaacagaacttctttgacctcagaatggaaaaatggcagaagctgattctcacagagttggctcagatcgcatggctgttgctaaatcaaacaccgaggctagcaggatagaacgctctcatcaatgaggcctaggtcccgagcccaccctgagagacaggcagtggcctcaagaggaggagacatcaataatcaaataccaggaagacgaaatgcaaggacaataagagcccacaatcacctctttaatttctccctgggaagaatgctgcctgagaggctggcagaaacgaagaggccaccacacatctgctctgtgcttcctagtttacaaaatacttctcaggttgtcccatttaatcctcacaagtagcccacaaggcaagtggcatcacttatttatttatctatttatttatttatttatttatttactttttgagacagagtttcattcttgtcactttatttacttatttatttatttttcgagacagagtttcactcttgtcacccaggctggagtgcaatggcacaatctcagctcactgcaacctccaccttccaggttcaagtgatcctcctgcttcagcctctcgaatagctgggattacaggtgcccgccaccatgcacagataacttttgcatttttagtagtgacggggtttcaccacgttggccaggctggtctcaaactcctgacctcaggtgatccaccctcctcggcctcccaaagtgctgggattacaggtgtgagccaccgtgcccagacacaagtggcaactgagacttaagagacatgaaggggcttggctaagttgcaaagcaggtatggaaccaacagaggggctgtggagctgtgcagaaaaaacaggaaggcactaacccagggtaatgtgtccatagcccccaccttgtccagcaccacatcctcccttcacctcagggctgcagctcctccgcctctgcctcctcagggcccacatcctgtgcctctctcccttatcattctgatcctgccagtttctgccacgcctctgtctgaactttgctccgtgctccaggcttgttttcctctggacctgggaaccactggcttactttcactcaccgcctgtccttcctgacacctcaccatgtgtacgggaaaatgtgcccgctgtgtggggctctccctcattaccctctgcctcgtctgcattgtggccaacgccctcctgctggtacctaatggggagacctcctggaccaacaccaaccatctcagcttgcaagtctggctcatgggcggcttcat

SEQ ID NO: 17039 - DNA, 2300 bp, Homo sapien
caagcattgtccggctctgggatccagggaacacccacttctctctcgctctctttttttgtttgtttgttttttgtttttttgttttttgagacaaagtctcgctctgtcgcccaggctggaaagtgccggctaatttttacatttttagtagagacagggtttcaccatactggacaggctggtctcgaactcctgaccttgtgatccgcccaacttggcctcccaaagtgctgggattacaggcgtaaaccaccgcgcccagccgggaacacccacttctaaattctctatcttattcccaggggactttgtcttgacctggatacatgacctcttgcaatcatatacgtacgtcaggctttatccttttgcatttttgtggtttaattttcaaaactccagattggctcttcaatcattcattgcaccaacttttattaagtacttccgcacgtactaggcttcaagaatacaaaagtgccttcacagagctcaaggtccactgggggagaatttatcctctgtctcccccactggaatgtgacctctgatgacaggggccttgttattcttgcttacagcaagtggaatattgcttaagccaaaacatattattgctaaataggtattgaataaacaaaggagtgtgtatgaggggcaggtaaatctggggttgtggcccctaacaaatttagccaggcatttttaggccaggcacggtggctcacgcctgtaatcccagcactttgggaggccgaggtgggcggatcacctgaggtcagcctggctaacatggcaacaccccgtctctactaaaaatatacaaattagccgggcgtggtggcgaacgcctataatcccagctactcgggaggttaagggaagagaatcgcttgaacccgggaggcagaggttgcagtgagccgagatggcgtcactgcactccaacctgggcaacagagtgagacttcgtctcaaaacaaacaaacaaacaaacaaacaaaaaacatacttagccagattttctcgctttttgttttgcaaattaggagtccatctggtggtcacagggggaaaggcattccaggaaaggatataaggatacagaaagcaatggaagaaacagcatgatcttttcttaggggttcttagtctcctgtccccaaacttcttagagttattcctgttggaccgggcgcggtggctcatgcctgtaatcccagcactttgggaggccgaggcaggcggatcacaaggtcaagagatagagaccatcctggccaacacggtgaaacccggtctctactaaaaatacaaaaattagcggggcggcgtcttggcgcgcgcctgtagtcccagctactcgggaggctgaggcaggagaatcgcttgaacccaggaggtggaggtagcagtgagccgagatcgcgccactgcgatgccgccactgggcgacagagtgagacttcgactcaaaaaataaaaataaaaaagaattatttctgtttgtgtatgtcttcttctaaggtagggaggagtgtcccggattctcaaggtgttagggccctgagctctcagaagacctctcagaggaggaagagacttctgagctgacaggagttttctcagcttctccagttcgaggattcttgtcctatcctcactctgatgtcccctcacatcctggaggtctctgggttgctcttgccccatcccgtcactggtgggactcccgggaggtcacttccatccctagccctggtctctgctctgtctccactctcactgctggaatgtttcccagcttgcttggctgtaaacctaaggcaagttgcttgccatttttgagccagttccctcatctacaaaataggaaggataattctcaccccccaaaaattgttgtgagggttaaacaaaatactgcaaagcgctaaccataattcgtagcctatagtaaatattcagtaggtgatggttattttaattcgccctctctcactgcccctcctaccctagctctgggagcctctgcctccgggagcaggaaatagggttccgggagtggattagttttgggtttcacttaatctgggaggcccttccgcaatcggagccctcacagaggccaaactgatataaatctgcttaggaggcctgattcacagacgctacaggatggagcggggcgcaggagccaagctgctgccgctgctgctgcttctgcgggcgactggtttcacatgtgcacagacagatggccggaacggctacacggcggtcatcgaagtgaccag

SEQ ID NO: 17040 - DNA, 2300 bp, Homo sapien
acatcagagtgaggataggacaagaatcctcgaactggagaagctgagaaaactcctgtcagctcagaagtctcttcctcctctgagaggtcttctgagagctcagggccctaacaccttgagaatccgggacactcctccctaccttagaagaagacatacacaaacagaaataattcttttttatttttattttttgagtcgaagtctcactctgtcgcccagtggcggcatcgcagtggcgcgatctcggctcactgctacctccacctcctgggttcaagcgattctcctgcctcagcctcccgagtagctgggactacaggcgcgcgccaagacgccgccccgctaatttttgtatttttagtagagaccgggtttcaccgtgttggccaggatggtctctatctcttgaccttgtgatccgcctgcctcggcctcccaaagtgctgggattacaggcatgagccaccgcgcccggtccaacaggaataactctaagaagtttggggacaggagactaagaacccctaagaaaagatcatgctgtttcttccattgctttctgtatccttatatcctttcctggaatgcctttccccctgtgaccaccagatggactcctaatttgcaaaacaaaaagcgagaaaatctggctaagtatgttttttgtttgtttgtttgtttgtttgttttgagacgaagtctcactctgttgcccaggttggagtgcagtgacgccatctcggctcactgcaacctctgcctcccgggttcaagcgattctcttcccttaacctcccgagtagctgggattataggcgttcgccaccacgcccggctaatttgtatatttttagtagagacggggtgttgccatgttagccaggctgacctcaggtgatccgcccacctcggcctcccaaagtgctgggattacaggcgtgagccaccgtgcctggcctaaaaatgcctggctaaatttgttaggggccacaaccccagatttacctgcccctcatacacactcctttgtttattcaatacctatttagcaataatatgttttggcttaagcaatattccacttgctgtaagcaagaataacaaggcccctgtcatcagaggtcacattccagtgggggagacagaggataaattctcccccagtggaccttgagctctgtgaaggcacttttgtattcttgaagcctagtacgtgcggaagtacttaataaaagttggtgcaatgaatgattgaagagccaatctggagttttgaaaattaaaccacaaaaatgcaaaaggataaagcctgacgtacgtatatgattgcaagaggtcatgtatccaggtcaagacaaagtcccctgggaataagatagagaatttagaagtgggtgttcccggctgggcgcggtggtttacgcctgtaatcccagcactttgggaggccaagttgggcggatcacaaggtcaggagttcgagaccagcctgtccagtatggtgaaaccctgtctctactaaaaatgtaaaaattagccggcactttccagcctgggcgacagagcgagactttgtctcaaaaaacaaaaaaacaaaaaacaaacaaacaaaaaaagagagcgagagagaagtgggtgttccctggatcccagagccggacaatgcttgaacttaataagatttatagggcaattgtggtcagcttttccatttagtgttttcacatacgttatcatttaatcctcacatgaggcttgcaaagtacctattattatcctcaatttacagtggagggaactcaagcccagagtgaatttagggcccacaccactgctcagtaggggagctgttctgggccctgcctctcttcccaatactcagagtgcctcttgctacagctggccctacagggaagggaaatgcactgatctgtcactgctgtcgaatcccccaaattcccttcacccagttcctcgcacccagggtagctgccctttggggcgaagggcacaggggaaggggccttagtaggttaattattaatcctttgcgcctcagggcaccacgggcttctgtcccctcctggaggcggagggacacggactggctaggcgctggtgagggggcggcggtcccagcagcaggcatgggagtggcggcgcggcccccagccctgcggcactggttcagccactcaattcctctcgctatcttcgcgctgctgctgctttatctcagtgttcggagcctaggtgagctgccccttccctcacttgctccgggaggaagcccg

SEQ ID NO: 17041 - DNA, 2300 bp, Homo sapien
gagataattttatctcttcctttccaatctggatgctttttatttcattatcttgcccagttgctctggctagttacttcagcacaatgttgaatagattggcaaaagcagacatctttgtcttgtttctcattttaggggaaaagcttaggagaaagcttagggaaaagtctttcatcattgagagtgctgttagccctgggtttttcacagatgcctaggcaggggaagttcccttctattcctagtttgttgattttttgtttgtttgttgtttttttcttttttgttttttgtttttttgagacagagtcttgtgctgttgtccaagctggagtgcagtggcacaatttcggctcactgcaggctctgcctcccgggttccagtgattctccttccaaagtgttgggattacaggcacatgccaccgtacctggctaatttttgtacttttagtagagacggggtttcaccatgttggccagtctctactaaaaatacaaaaattagcctggcatggtggtgtgcctgtagtcccagctactcgggaggctgaggcaggagaatcacttgaactcgggaggcagaagtttcagtgagcctagatcgtgccactgcactccagcctgggcaacagagcaagagttgttctcaaaaaaaaaaaaaaaaaaaaaaaaaggaatacaacattggttcaacatatgaaaattaatgcaatataccatattaataaaggaaaaatggaaaattatctcaataaactcagaaaagcagtttaaaaatccaacattctctcgtaataaaaaacaatcgttggccaggcgcggtggctcacacctataatcccagcactttgggaggcggaggtgggtggatcacctgaggtcagaagttcaagaccagcctggccaacgtagcaaaaccccgtctctactaaaaatacaaaaattagctgggagtggtggtgggattacgcctgtaatcccagctactcaggaggctgaggcagaagaatcacttgaacctgggaggtggaggttgcagtgaggcgagattgcgccactgcactccagcctcagtgacaatagtgaaactccgtctcaaaataagtaaataaataaaaaaaataaaatacattataggagggtgggagagggggcacaaaaataaaataaaatacattatagggagggaaaggatggacagagaaacaatgaggaggctagtgcagtaatctaggatatagtctcccttcatagtcaaaggtactaggagtggagaaagtgggcactgctcagattttcacagattggatgctgatatgatgaaagagaaacagaagggctggggctgggcgcagtgcctcacacctgtaatccctgcactttgggaggccgaggcgggcggataacctgaggtcgggaattcaagaccagcctgaccaacacgtagacagcctgtctctactaaaaatacaaaaagtagcctggtgtggtggtgcatgcctgtaatcccagctacttgggaggctgaggcaggagaattgcttgaacccgggaggtggaggttgcggtgagccaagatcgcgccattgcactccagcctgggtaacaagagagaaactctgtctcagaaaaaaaaaaaaaaaaaaaaagaaaaccaaaccaaaacaaaaaaacaacccagaagggtctggatgacgaggtttttggtctgaggacctggaagaatgaagtgtcatttgagccagcaaagactatgaagggagaattttcgtggggagggcgtgttggagcttagtgttggacatggtaggtttgctatgcctaggtgacatccaagtggaaataccgaataggcaatcgtatatgtaggattctggagtccaggagaaagtggattgaagttgtgatttggaagttatcagtgtatgaaatggcaagatctttcatgttcattgtgggagtggccgtggagtcatttaataaacatacattatggagctgagcacctgcttggtgtgaggcatgacgcacatgcgcttgggtagctgaagggtgagggtgccatttattcacagagacagggaacacaggaggaggtgtagttcttagggggatggtggtgggacccgtgttggacgcgttgcatttgcagcgtctgtggagtgtgcaggatgcttgctgtatacttggctgcacaggggtgaagctcagggacaagtctgggctggagactcagcgtgtgtttggcaaccgaagccacgggagtgactacgataggccgggggagcgtgagt

SEQ ID NO: 17042 - DNA, 2300 bp, Homo sapien
gctgggattacaggcgtgagccactgcacccggcaggtcttttcaacaaatggtgctggaacaactaactgactatccatatgcaaaagcatggatttggacttctacttcacatcacatacaaaaattaactcaaaatggaccacagacctaaaaatgtaagagctggcactataaactttcatgcttcaaagaacaccaatgaaggacatgaaaagacaatccaatgggagaaaatattttcaaatcatgtatctgatgtttctagtacctagaatattaaaaaggacccttacaactcaacaataaaaagacaaatagagccaggcacagtggctcatgcctgtaatcctagcactttcggaggccgaggcgggaggatcacctgaggttaggagttcgagaccggcctggccaacatggcgaaaccccatctctttaataaaaatacaaaaattagccgggcatggtggcgcatgcctgtaatcccagctacttgggaggctggggcaagagaattgctggaacccgggaggcggaagctgcagtgagccgagatcacaccagtataaaaagacaaatagaggccgggcgcggtggctcacgcctgtaatcccagcactttgggaggccgaggcgggtggatcatgaggtcaggagatcgagaccatcctggctaacaaggtgaaaccccgtctctactaaaaatacaaaaaaaattagccgggcgcggtggcgggcgcctgtagtcccagctactcgggaggctgaggcaggagaatggcgtgaacccgggaagcggagcttgcagtgagccgagattgcgccactgcagtccgcagtcccgcctgggcgacagagcgagactccgtctcaaaaaaaaaaaaaaaaaaaaaaaaaagacaaatagagctgggttcagtggcacacacctgtagtcccagctacttgagaagctgaggcgggaggatcactggagcccaggagttcgaggctgatatagtgcaccatgatcccatctgcactccagcctgggaaacaccgcaagacaaacccaccccacacacacaccccaccctcgtctcaaaaaaaaaaaattaaaccccaaaaatatattaaacaaaagacatatcccaattttagaatgtgcaaagaacttgaaaaaacattgcatcaaaaaagacatacaaatggccaattatctcatggaaatatgctcagcatcactaatcattagaaaaataccaatgaaaaccacagggtaccacttcacacccactggaatggctataactaaaaaaatgcacaataacaagtgttggtgaggatgtggagaaattggaaccctcacacatggcttgtagggatgtaaaatggtgcagtttctgtggaaaacagtttgtcggttgctcaaaatgttaaacatacagttatcatagaacccataaattcctctgccagcatatactcctaagtatataactaaaagaaatgaaaacatggtgtggtcactttagcccaaagactctcaggtttattttgtgggccctttggactgtaactccataagatcggtacggcgcaagccactaggactgttttttgttttgttttgtttttgcttttgttttgagacagtcttgctctgtcgctcaggctggagtgcagtggcgtgatctcggctcactgtaacctccgcctcccaggctcaagcgattctcctgcctcagcctccccagtagccgggattacaggcgcgccccaccacgcccggctaatttttgtattttttagtagagaaggagtttcaccatgttggccaggctggtcttgaactcctaacctcatgatccgcccgcctcagcctcccaaagtgccgaacggtttttgggttttttttggttttttgggggggggggtttgctgactttcttgttttgtttgttgcttgccacgctgccatcaagtgctcactgtcgcaaaagaaccgtccccatgcagtactgtacttttcttttcccttctgccgtcaacctcggagtagcttcgctcccagaaggcctcaaagcgcgaccaaagagcgtgacagagcgctttacgacagttgctttgaggcagtaccggaggagaaagatggcggctaccttactagctgctcggggagccgggccagcaccggcttgggggccggaggcgttcactccagactgggaaagccgagaagtttccactggggtgaggaaggaatcggggttcataggacgtgcacaaggcctgacgcgatgggaagataaagcctg

SEQ ID NO: 17043 - DNA, 2300 bp, Homo sapien
gggcattcttatcatcctggaatgttccctcacgtgtccctttacaggcaatcttttccctacaccctgccacaagcaactactgatctgatttccatcactataggttgtttttgcctgttttataagtttaagaccgggtgcggtggctcacgcctgtaatcccagcactttaggccaaggagggcggatcatttgaggtcaggagttcgacgccagcctgaccaacatggaggaaccccgtctctactaaaaatacaaaaaattagctaggcgtggtggcaggtgcctgtaatcccagctactcaggaggctgaggcaggagagaacccgggaggcggaggttgcagtgagccgagatcgcgccattgcactccagcctgggcaataacagcgaaactctgtctcaaaaaaaaaaattagcaaaaggccgggaacggtggctcacgcctgtaatcccagcactttgggaggctgaggagggcggatcacttgaggtctggagtttgagaccagcccggccaacatggtgaaaccccgtctctactaaaaatacaaaaattagccggaaatcccttgaacctggaagggggaggttgcagtgagccgagatcacgccactgcagtccagcatgggcaacaagagcgagactctggccgggcgcggtggctcacgcctgtaatcccagtactttggaaggccgaggagggcggatcacaaggtcaagagatcgagaccatcctggataacacggtgagaccccgtttctactaaaaatacaaaaaaaattagctgggcgtggtggcggacgcctgtagtcccagctactcaggaggctgaggcaggagaatggcgtgaacctgggaggcggagcttgcagtgagccgagatcgcgccactgcactccagcctgggcaacacagcaagactccatctcaaaaaaagaaaaaaaaagagcgagactccgtctcataaaaataaaaataaaaataaataaaaaatagcaaaagactgaataggcactttataaaagaagacatacaaatggccaatcagcacatgaaacatggtcaatatcattgatctccagacaaatgcaaatcaaattgcaatgatgtgcccacaacacccattaaatggccaacgctaaagactgacaatatccaacgttggccatgccatggaataactggaaccaccatacactgattttggaaatctagaatggaaaaaccatttagaaaaaaatcgtttggcagtttcttataagttaaacatacactgatatgatcgaacaactccactccctagttacccaagataaaggaaaactatccacgcaaacttacaggaatgtttacaggagctaaaacaatgggcaaaactagaaacccacatgtatatcaaaagagaaaaataaatctgctttttaaaaaagattgaaatatcttgtattttaatacccgaaaaaattttatttccccctagactgccaattccagctgagcaggctctctaaccatcttatttactaccatactctcaatttctggcacggagtaagcgcgcaataaatgtttggtgaatgaatgaaagaatgcccgctttcatacactaatgggtttgtagccaccacccctcaggccttttacgccctcattccttccaggtacaaacgctatctgggctaggccaaatgtggctcgcagcgggtccgggagcggggcacctaccggcagctcccgcagcggaggcgcgtcccccgggcgccgaggcagcgcccgcggctggaggggcccggggcgggcgccgagcccgagggatgcgcgcagcgcggggtgccccgggaggcagcggccgggcacgctgggaccgacggcgcgggacgccccgacgccgggcagcacttacccgccgcaccgagagagctacgcggccccgcggccctgcagggcacagggcggccccctgcccggggctctcggtggcgcactgggcggcggggcgggccgagggcagcgggggcgggacaggacagacgagaatcccgcggaggtgaggccgggggccgccccgcccccgagggcaggccctgagccccggccccgcctcggccggccccgcctcggccggggcgtgggctccggctgcagctccggtctgctctcttggctcgggaacccccgcgggcgctggctccgtctgccagggtgagggggccgggaaggggcgcgcgggggtcccgggtctcggaaatcgggcggggacggaacgggctcgggctgcggggcctccagac

SEQ ID NO: 17044 - DNA, 2300 bp, Homo sapien
ctgcactccagcctgggcaacgagaacaaaactctgtctccaccaaggtgacattttccaccctgtgtcctgttccccaataaaaacaaattcacaaattcacaaaaaaactaaactaaactaaaactgtctaaaaaaaaaaaaaaaaaaaaaaaaaccaaacaaaaaaccccaccatgttggccaggctggcctccaactcctgtcctcaagggatcctgtaatctccgcattttgggaggccgaggcaggcagatcacttgaggccaggggtttgagaccagattgggcgacatggcaaagccccatctctacaaaacatataaaaatcagccaggtgtagtggcatgcactgcctgtagtcctggctacttgggaggctgaggttggaggatagcttgagcccagaagcttgaggttgcagtgagcagagatcataccattgtactccagcctgggtgacagagcgagactttgtctttaaaaaaaaaaaaatagaggctgggcacagtggctgacgcctgtaatcccagcactttgggaggccgaggcgggcggatcacgaggtcatgagatcgagaccatcctggctaacatggtgaaaccccgtctccactaaaaatacaaaaaattagccgggcgaggtggcgggcgcctgtagtcccagctactcaggaggctgaggcaggagaatggcatgaacccggaaagcggagcttgcagtgagctaagatcgcaccactgcactccagcctgggcgacagagtgagactctgtctcaaaaaaaaaaaaaaaaaaaaaaaaatagaattgacttgaaggagtcaggccggaaggccaaataggagatgaatggggatagcggcttgaataagggcagtggcaaggaaaatgggctaggggttagggaagggggccgactggctgtgcacccaaatgctaaaaacggtccagaaaggaatgtgttcagctatttttcaaggacttctaaattaaactctcttaaatgatgtttatattaaggctggtggtggagtctttcagaggcagtgttggtgctagaagagctcttgagggtcatacagcctcccccctcaatttcacagtgaaagaaaacctcagagaagcaaagcaacttgctcaaggtcacacagcatttcagtggtagaacatgactcgtggttcttagatagcattacccagcctccactgaggctaatggctgtaggcgctatgccaacatgactagatctaaggtgacccaagctatattttaagggactgaacgcagattccctctcttccccttcgccaccccttcctccacgcgcgactccagtgatcaatgaataattgtggaaacagttcctttgtgcagaacactttgttaaaagaggtgcagagatacacgtctgcggtaggattccttatcctgagatctgagagcacctcgatgcttccccaacctgctaggtgagggtggaaagggcattcctgaggcagccggtgcccctcctctgccccccaactcccacgtggtttctccagccaagttctcacggagtggcccctccctcagcggctccactgttgccatagcaattgggtgggtggacagcccgtcctatctagaggccacccagccctcgcgtggggagttaccataacaaccccctagtaatagagggggttgggtaccgcccccttcccccgcaaatggaaaggtgggtggcttgattggcagctgggcacacgaaagaaggagggaaagggaaggaaaggcgtcaaaggagatctgagaaggaaataagggagagaaagggcaaaaaaaatagggaaagaaaaggaaacgcgtgtgcgcacgcgcaccagctggtgggcgcgctccgcggccgcctcggccgccgcccacttctttcacgccaggctcgcgcggtcgctccgtcctcgcgcgcgcctttcgcctgctcgcctgcgcctgcgcgcaggtgtcggcgcctagggggagggggccccggcgcgctcgcgtcacgctcgcgcttccaccctcccagtgcgcggtcgctccgcgcctgcgcaggagaggtggtaggctcgggtggctggctccggggagatagcgcctgtcagtcggtgggtcggtcctcgcgccggccctccccctccccggtctccgggggaggcgcggtggagtccgcccccggggttctccgatgggggagaagcggcgacggcggcagtggagtaaccgagccggagcgtgagcggccccggtgccccgttccccacggaggccatgg

SEQ ID NO: 17045 - DNA, 2300 bp, Homo sapien
ggcagagcggggcaccccaaagcctccagggccccctgctcagccccctggcccgcccaacgcctctaggtaatagagttgtcccccaactcactctcacctctcacttctgccacccgcttccctggtgatggctccctctgcagtgcagctcagcaccccagagaagggagcaccgtgcctccctgaccctgactctgcccccccaacagtaaccccgacctcaggaggagcgaccctggctgggaacgctcggacagcgtccttccagcctctcacgggcacctcccccaggctggctcactggagcggaaccgcgtgggaggtatgtgagccagggctgggcagcctgctctgggcctgggggcttatcaccatggaccctgcctttggtggctttggactggggcacccacacggacagggaggacctgtgtgggtatggaacttggggctgagttctggggctcagggtgtgggcttgaggccatcccttgttcaggcatcagtgaccttcttccaccctgccgtccagtctcctccaaaccggacagctcccctgtgctctcccctgggaataaagccaagcccgacgaccaccgctcacggccaggccggcccgcagtgagtcacctggtggcaggcatggcctgcctcatcctggtttggggcttagcctcagggtgctgggtgtcaggggtggggtctccgctgatctaccgagaagggctgtggggatggagggactggtgcttctcatggtgctaacctttcctaacctctctcctaacctctctcctaacctctcttctggctctttcttcccctgcggcccctcccagagctataagcgagcaattggtgaggttagtgagatgggcctgcttgtgggagcccctcctgtcgccctgctggggtgtcccggcaccctttgtctacctccacccaggcccagcttctccctgcccctcacgtggctcctccctgcaggactttgtgttgctgaaagagcggactctggacgaggcccctcggcctcccaagaaggccatggactactcgtcgtccagcgaggaggtggaaagcagtgaggacgacgaggaggaaggcgaaggcgggccagcagaggggagcagagatacccctgggggccggtacggcatcgggagtggggccctcccactccaaggcacagggagggaggggaagtggcagtggggaagaggtggggctttggggcaagtctgagggagagcggctcccttctctagagagtggggtgagggtgcaggttcctgtctctctcccgctgccctgtgtgttgtggggtggcctcttcaagtgcctgtctgcccctgtgccagcctgccctgtgtgccatgcagggaagcacctcacggtggagcaggggctacaccgtgagggtggagcaggttgtgttttgaatagagacaaaagcctgggctctggctgccatctgctgcctttggcacttctgtggccacgggcaggacctggaggggccccaccttcctctctcacagcagcgatggggatacagacagcgtcagcaccatggtggtccacgacgtcgaggagatcaccgggacccagcccccatacgggggcggcaccatggtggtccagcgcgtgagtgagcctctgctccctcccctgtacctgtgtgtgccctcctcagccccacgccaaccctgccctctgtcctgtagacccctgaagaggagcggaacctgctgcatgctgacagcaatgggtacacaaacctgcctgacgtggtccagcccagccactcacccaccgagaacagcaaaggccaaagcccaccctcgaaggatgggagtggtgacgtaagtgggccggaggcaggtccgccgggagagaagagccctggcgatgggcaggaggtcccggtgctgggtaacggcagaggatggggcggagcgctgggagctggacagcgggggtgccagttggggagctggagcctggggaacagcagcaggggcagggccgcagctggacttgcacttgtttgcctgactgctgtccccctaccacagtaccagtctcgtgggctggtaaaggcccctggcaagagctcgttcacgatgtttgtggatctagggatctaccagcctggaggcagtggggacagcatccccatcacaggtgaggacaggaggacagacctgctgtgaggccagggtccaggggcagcctggaggggagcacagtggtcttgagacgcagcctcacaaagcatagccacaggacctctc

SEQ ID NO: 17046 - DNA, 2300 bp, Homo sapien
gaggggaagtggcagtggggaagaggtggggctttggggcaagtctgagggagagcggctcccttctctagagagtggggtgagggtgcaggttcctgtctctctcccgctgccctgtgtgttgtggggtggcctcttcaagtgcctgtctgcccctgtgccagcctgccctgtgtgccatgcagggaagcacctcacggtggagcaggggctacaccgtgagggtggagcaggttgtgttttgaatagagacaaaagcctgggctctggctgccatctgctgcctttggcacttctgtggccacgggcaggacctggaggggccccaccttcctctctcacagcagcgatggggatacagacagcgtcagcaccatggtggtccacgacgtcgaggagatcaccgggacccagcccccatacgggggcggcaccatggtggtccagcgcgtgagtgagcctctgctccctcccctgtacctgtgtgtgccctcctcagccccacgccaaccctgccctctgtcctgtagacccctgaagaggagcggaacctgctgcatgctgacagcaatgggtacacaaacctgcctgacgtggtccagcccagccactcacccaccgagaacagcaaaggccaaagcccaccctcgaaggatgggagtggtgacgtaagtgggccggaggcaggtccgccgggagagaagagccctggcgatgggcaggaggtcccggtgctgggtaacggcagaggatggggcggagcgctgggagctggacagcgggggtgccagttggggagctggagcctggggaacagcagcaggggcagggccgcagctggacttgcacttgtttgcctgactgctgtccccctaccacagtaccagtctcgtgggctggtaaaggcccctggcaagagctcgttcacgatgtttgtggatctagggatctaccagcctggaggcagtggggacagcatccccatcacaggtgaggacaggaggacagacctgctgtgaggccagggtccaggggcagcctggaggggagcacagtggtcttgagacgcagcctcacaaagcatagccacaggacctctcccttgggccctagcacctgcctgggcacagaggcaaggaagagcctctgagacccctccttcctgtcccacaggacaggaaatgctcagagttgccaggggacctgggcaaagactcaaagctaacaagtgacagaaatgggacttgagccagaccttttgactccaagtccagcactctatccccctctcccatgcacctcctctcctcctgtctttctcctcctttctgcgtattatgaggtgccaagacctgatataggggatggaggtaaaaagagatggggtgagaagctgcagcccctcctcccacctcctcctccttctggcagccctagtgggtggagagggcactcggctcgaccagctgcagtacgacgtgaggaagggttctgtggtcaacgtgaatcccaccaacacccgggcccacagtgagacccctgagatccggaagtacaagaagcgattcaactccgagatcctctgtgcagccctttggggtaagccagggcagggacagctgaggaggctctggcgtggctcttgtgctcctggttaggtgagggcctggctgagcctctgacctgcccaagggctcctgttgcaggggtcaacctgctggtgggcacggagaacgggctgatgttgctggaccgaagtgggcagggcaaggtgtatggactcattgggcggcgacgcttccagcagatggatgtgctggaggggctcaacctgctcatcaccatctcaggtacaggtgtggtgagtgggggagggaggaggggctcagctccttggcgctgtcaccatcttctgcctgggaggagggcaggcactggaaggtggggccacactttctcaccccttgtggtatgctgacagaggaggccagggcggtggcattcgggcctcagatgagaatgggggcgggtgtgtatgtctgtccgtccctcagggaaaaggaacaaactgcgggtgtattacctgtcctggctccggaacaagattctgcacaatgacccagaagtggagaagaagcagggctggaccaccgtgggggacatggagggctgcgggcactaccgtgttggtgaggatgtcccaacagagtggccagcgcatacttgttcatgaagagagaaatggatctgggagccagggacttggggcctgggtggggcagtgtagtgacagaccacgg

SEQ ID NO: 17047 - DNA, 2300 bp, Homo sapien
tagcccctccccccttttctccatttgagaggagagtgcttggggcttgaaccccttaccccactgctgctgactgggcagggccctggacccctttatttgcacgtcaggggagccggctccccccttgaatgtaccagaccctggggggggtcactgggccctagatttttggggggtcaccagccactccaggggcagggaccatttcttcattttctgaaagcactttaatgattccccttcccccaaactccagggaatggaggggggaccccgccagccaaaacattccccccattcccgacccccctctcctcttctagcccatgcccttccccggtggagggagggagcagggagccctcactctccacgccccttgcttgcatctgtatatagtgtgagcagcaagtaacccttctcctccctcccccctcccccctcctcaatgtagtggccttggatatcctgtttgttaataaagacaattcaaccagctcccaccatgcaggccgcatgtccttgctttctgtcagtactgtagactaggcagagagagcctccagggtggggaagaaaggggcagggtgggctgggatctgcaatgagtgagcctcatggggtgggatgggcagtgctgggccaagaaaacctagaagaaatgactgtggaagggtcagggcagcctcagccttaaacctgtgggcctgagggccaccagcactgaaggtgtttggttcccacccgctccagcagagccagaccagggaagaagagggtttcctggctacagcctccctgtgtgcaagtcctgcaaaggggtctcctgtttggctatgaaatgaatatagatagatagctcacaagctggcagccaccagagtcccgtggggctgagccttagaaaggctgggaggtcagcaaggctgaatgaagggcagtccttgctttctggaagactggcacctgagagcctatgtgaaccctttcctcctgctgacccctggactgcggccaggcctacacacgccagggaacgggcacacaccattcttgtgaagttcacaaactgcagattgatcagcagggggaagggatcataatgccgtggtggcggcagcctactttttcaaaatcaatttcctactggagatgggtgggaaattgaagtcggtgcgagctaaggctggatacacggcgcgtaggggagatcaggcactcggttgaagtaggccccgaggaagatgaggctggagcccacgctgaagagcaccagagcggcccagaagcagatgttgtcaagggcattccccatgcgcacccagtcggacacttcctggggaagggtcggcacagtcagtaaagaggcagctgcaggagccagcggcatgggagacagtggtgggcctctgcctcgctccacccgcctctggctcctgtcccacctcgccggtggcctcctgatctctcgtgctctcggccacgaagttcacggcatccacacagcagcggacctcgggggcggcggcgcccaggctctggcagaaggcagctggcggggaaaacaccggggtgggccttaggagcctcccccctggcaggcaccccgcgcggccccccgggccagggccactgtgctcacccgtccaggtcccctgccggtgcctctgcccctcaaacacgagctcgctccgtggctttttcagtatcagctcctccgcgcggagcaataagcccaccgacgacgcccgccttgggggcgaggcggcccggggggcctcgggcggcggcggggagcccaggaggcgcggcagcagctccaggagaacctggggcaggggcggggcttaggggacgaggttagtacgaagccccaccccgacccgggctgcaccgccccctccgcgcttacgtggcgcagccgcggggacatggcgtgggtggtgggcgtccgctgggacacgttgagcacgatgacgcaattcatgacaatgagcgtggcgaccaccatgacgaaaataaggaacctgaggagcccggaaggcatgacatcaccgttcctcctcccagctaccgaaggcgccgcgcgctgacctcacaaacacggcttctcctggtacgggctggttacgccctccagctgcgccccctacacgacgacagacgcgtcccccagcccttctcctgtcctaccacttgtggcggccatgaaggggacccccagctccctggacaccctgatgtggatctaccacttccacagctccaccgaggtgaggctacgcccgccaagggct

SEQ ID NO: 17048 - DNA, 2300 bp, Homo sapien
ggctgttgataggtctctgtcattagatgataactccttgaggcttgttttatccatctcaataaccgtagcactcggccctgtaagggggaactttgtaggtgtccactgatgtttgaataaatatttgcatttatcacaattcttgtcccaagccttgacgcggaagctctggaataagcagcagcacagatttgagacttagtccatgtaccagccacatgcaaagaggtaagctgggtcaaagagacccagaaagggagtctgaaatggaaatcgtggggttgataaggcagcagtggaaacagaggctttacacaagtgtgggaaatggactaggaggacactctgttatttgatgtgtcctcgcttgtaacatggaggtgattatgacctacctcataggtgggggaaggagacccaaaggtgatggacccgaaagtgttttgtgaagggtaaaataaacacaggtgtacgagatcaatagagttgattgataagtctcatgcattattgccaatctacttgtgtgaccctggatcccgaccttagcatcccctttcatgtattcaggacagtgatcattgctttgctggactgctgtgaggaaatgagatgtaagcagaaaatatgcttaggccagcccctcctacctcacgaggaacacctggacagtttcctaaaaatacagattcctggcaccctagtcccgaaatcataattctctgggaatggagcctaggaatctgaatttaaaataagcacccctccaggtgattagaatggttcaagaaggctttaaaaaacactgaggccgggcgtggtggctcacacctgtaatcctaaccctttgggaagctgaggcaggaggatcgctttagcccaggagtttgagagccgcagtgaactatggtggtgccactgtactcctgtctgggtgacagagtgagatcctgtccccccaccccctgcaaaaaacaaaaaacaaaaaaagaaacagaaaaacaaaaaacatcgaggctgggcgcggtggctcacgcctataatcccagcactttgggaggcccaggtaggtggctcacgaggtcaggagatcgagaccatcctggctaacatggtgaaaccccatctctactaaaaaatacaaaaattagccgggcatggtggcatgcgcctgtagtcccagctactccagaggctgaggcaggagaatcgcttgaacccgggaggcggaggttgcagtgagccgagatcatgccactgcactccagtctgggcgccagagcgagacttggtctcaaaaaaattttttttaaaaaggaacatcaaaaggatctattaaggtgtcatcaggtgtgtgtgtatgtgtgcacgtgtgtgtttaggagagtaggatgggaagacggtactatcatctgtgaccacaaggtggcagcagggatagacaaggagaaacaagtctcccacccagaggggctgggcatgggcaaacctggcgatcaggttgtggaaggaggtgggtcctttacatgatctcctttgctagatggaatctctgtaccgcagggctaatcccctgtgaccacctgtctctttatcaggtctttatggagactgttttttgccactctgtcggcaagaaaggcattgtgagcttgggtggtgatagtgtgtgttccacatgggtgagaatgggaggcaaggggtgtgtcacatccccagatgtgttcatcagtcagggtcacctacacagggcagcttactcaaaggacaacagtgcctgctgaaagcagtgtctcccaccccctgctactagaattgtggttgcaggtgcctctcaggagacgcccacatctgtggctggggagttggccaaataccaggcaaaggacgctgggctggggcggggcaggggcaggaaacacaggatggggcagctgcctctggaagcagccaaaatgtccccagctgcagcaggggtgagcagaggattaggtgacagtcccctaacagcccggaactaacaccctcctccccctcacacaggcaccctggcatgccccctccaagcctgccagagctcagaataaccctgagaaccacgcagcaggatggcaagggctccgcttggggtcctgctcctcttggggcttctcggtacggacaggggctagaggggcaattggacacacacagatactgacatgaagggactgggaagacaaagacagagaccaagatggagacttagacacagtatttcgttcccaggcacagcataattggtttaggagacagat

SEQ ID NO: 17049 - DNA, 2300 bp, Homo sapien
tggtgccctgggcagggcatggtggctcacgcctgtactcctagcactttgggaggccgaggtgggaggatcgcttgagcccaggagtttgagaccagcctaggcaacaaacaaatgtttttctgtctctagaaaaaaatttttaaatcagccaggtgtggtggtgcatgcctgtagtcccaactccttgggaggctgaagcaggaggatcccttgggtccaggagtttgtccttgagtgaggcatgattgcgccactgcactccagcctgggagacagagcaaaggagaccagcctggacaacatggtaaaaccccgtctctactaaagatatgaaaaattagccgggcatgatggcgggtgcctgtaatcccagctactcaggaggctgaggcaggagaattgcttgaacccaggaggcagaggtggcagtgagccgagatggagccattgcactccagcctgggagacagggcaagactccatctcaaaaaaaaaaaaaaaaaaagaagaagaagaagaaaggaggaagaggaggaagaagaagaggaggaggaggatatgaacaagaaacaacaacaaccttggactaggaatgctggcaggatggtgtggatggagagtagatttgagagagacgggagataaaatcaccaggacttggtgatggggatgaaagacgggagacgttagagatgactattagggattttgtttgtgttgactgaatggttaggtaaatgagtggatgatggtgccactcaccaggctgagcaacacaggaggagaagccatttggagagagatggtgagttcagctttgaacatattgttttggtgtctgtgggacatccaagtagagatgtccagaaggcagctggacatatgtgcttgtgtctcaggagaagggtctggactagagacatagatttgagagtcattaggttgtaggtggtggttgaaggcaagggaatggatgaggataatctcaggtggttgcatagcgtaagaaaagaagagaatgccgggcgcggtggctcatgcctctaatcccagcacttcgggaagccaatgtgggtggatcacttgagatgaggagttcgagaccaggctgaccaacatggtgaaaccccgtctctactaaaaatataaaaattagctgggaatgaagacagcctaagcacaaactctgggggcagtttaattgttcaagaaggggaatctatgaaggagactgagaaggcccaaccaaacaggtaagaagaaaaccaagaaaattacagggtcatgtgtcacagaggccaaaaggagaatcccaaggggcgagtggccatgggtatgcaggctgccgaaataaagtaagatcacagtggagaagtttcccatggatgtagaggagggagagcattaaagaccttggtaagaaccgagtcaatggagtagcaggggaaagaaatcagcatagactggggtgagaaggcagagagaaaggtgggagagaattaaaagtaggcaactctcagaatgcagctgtgaagaggaagagaagcgggcatctggagaggtttttttgtttttaagatggagttttgctcttgtcacccaggctggagtacaatggcacgatctcggctcaccgcaacctctttccacctcccggtttcaagcgattctcctgcctcagcctcccgagtagctgggattacaggcatgcgccaccacgcccggctaatgtatttttagtagagacagggtttccccgtgttggtcaggctggtctcgaactcctgacttcaggtgatccgcccgcctcagcctcccaaagttctgggattacaggcatgagccacgcgcccggccctggagaggtttttaaaagatggcagaaggctgtttggaggagtccacccccatctcccctgtgtaaaaggaaagcggaagagagaaccacaaagagggcctgggggaaagccgtggagtgaggcgataagggcttgtgtccaggggattcccggtcactggaatccctatcaggcctgcatttcctcctcacccccatccccttccttgccactggcttagtcctccatggggctagaagagagaaggacggagtcgagtggcaccctagaagacgctctgtgccttcggaggtctttctgcctgcctgtaagccggggttggtgctggggcaggagaggggtctgagggaggggaaagagccaaggacctggagctagtagttttaagttctgcaggcaagggtgggagatgggagtagggaggacaggaggtgtgga

SEQ ID NO: 17050 - DNA, 2300 bp, Homo sapien
caggcagggcgctggggctaggactctaggtccccatccccctcacccagctgccttcacacctttcccaggggatccgacaccccctcccaggcccccagaatggcttcctcaccagcccgttcttgtattccggcttcccatcaatcatccgcatgttctggattctgcaggagaggacgcaggggcatgagagaccgaaagggcaccctcccacccacctccaggcccaggctgcacactcaccgggtcttggcaatgtccacaggcatggaggcagcagtggtgacaagaccgctgatcatgctggcacagaagtggcacaagatgttgtcagagaagtagcctgggggaggtgaggcgggggtggcagtcagctcagaggtggctcaggccaggctgggaactaagggcccagctctggatctcacctgagtccagtaagaactgcttggattgggagtaggaggcgagctgggcagcattgacgacgacggcccgagccatggtagggatgcagccctggagggaggggagcggggaagagtcagaaacccctaaaaccagacctcacagcccccaagtctccagcccctccactcacccgccacagtgtgaggacaccctcttcccgggtgattcgaatcagggcgttaaacacatttttgtagccacggcgctggtcagctggaagcctggtgggaaggcagaaagaggtcaagatcaggattgcccacaggtgcaaagaaaggaaggccagaacaggtaaacactctgctccagatccgggataaaaaactggtcctttcattctagattcgagggaatggggctggggttaggttcagacttggaactcaccggccatcggcagtcatgcggataagagccacttcggctggtgttcccacaaaggcaccagtggcacctgcggtcatgccaatcacagccttcagcagaaagccagggggagtaccatcagccccagtcaggcgctcaaacagcacggtatagatgccaaggcgggtagtggtgtaggtggcctgacgcagcaggccagccgacagcctgaggagcagaggggtcagcatatcaggccaaggtctagagctgccaacccacagtctaccctccatcctgaggccccaatacccagtgtaaatgcccctcaggccttctgccttcaggatactggtgagggcatggaagctggttttgtactctcgagtcttggccccttccccgctcaactgcatccggttcttcaccaggtccaggggctggacaaaaactgtagctcccatcctgggggaagacagaggtggagtgaagggccaggcattccagatctaccagtgcccactggagcctggcagcaagaggttacaaaggtcagggcctgccatgcgattcaagaatcaggatgctggtgagcatgtgtataagagtctatatgtacaccaagtgcaacgggtctgaaaagtctagttgtccagtaggggccatgcaatgaaagtgctccaagcagcttcatgacagtcaagcagtgacctggggctgcacgcagtccgacacagggaggggaggaaggggcatccaagatttaggactccaggtagtcctgcaggagccatttaatggcctggaaccccctgccgcccggccgagcttagcaatgcgctgggaaactcagctggcccggcgggggttgtgcaacgaccctgcatgcagtccataagggtcctgcaatggggccctagcagcccatcggggaactcgcaatacgctggagatcgcgctgaccccgtgccggcacagttcactgcaacagacccagagatgaaccgggcccggttccttttgcccttcccttcctcctcttttcccatccctggggcctgagcttacccggccaggcccccaaacaggaacttgacggacttaggggaggtacggggcttcccgtctatcccgccggccccggcactcgccgtcgccgccatcgccactcaatggccctcggctccgggtcccgtgcgcgcgcggccccgctcgcgcccaaggtgacaccgcgcgcgcaacagagcgagggcgcgcgcacgcccctccagctctcaggtccgacacccgctggaagccggcgcgggcgcaggcgcgcagcgcaaaggcggccgggagtaaggcggagctgaaggaggagcttgatggaagcgtgcgagaaggggcgtaactgatttggaaaccagaggaaaggcgctgttttcaccgaattagaatcgcgggaaaatagagaagagttt

SEQ ID NO: 17051 - DNA, 2300 bp, Homo sapien
atgttgtcagagaagtagcctgggggaggtgaggcgggggtggcagtcagctcagaggtggctcaggccaggctgggaactaagggcccagctctggatctcacctgagtccagtaagaactgcttggattgggagtaggaggcgagctgggcagcattgacgacgacggcccgagccatggtagggatgcagccctggagggaggggagcggggaagagtcagaaacccctaaaaccagacctcacagcccccaagtctccagcccctccactcacccgccacagtgtgaggacaccctcttcccgggtgattcgaatcagggcgttaaacacatttttgtagccacggcgctggtcagctggaagcctggtgggaaggcagaaagaggtcaagatcaggattgcccacaggtgcaaagaaaggaaggccagaacaggtaaacactctgctccagatccgggataaaaaactggtcctttcattctagattcgagggaatggggctggggttaggttcagacttggaactcaccggccatcggcagtcatgcggataagagccacttcggctggtgttcccacaaaggcaccagtggcacctgcggtcatgccaatcacagccttcagcagaaagccagggggagtaccatcagccccagtcaggcgctcaaacagcacggtatagatgccaaggcgggtagtggtgtaggtggcctgacgcagcaggccagccgacagcctgaggagcagaggggtcagcatatcaggccaaggtctagagctgccaacccacagtctaccctccatcctgaggccccaatacccagtgtaaatgcccctcaggccttctgccttcaggatactggtgagggcatggaagctggttttgtactctcgagtcttggccccttccccgctcaactgcatccggttcttcaccaggtccaggggctggacaaaaactgtagctcccatcctgggggaagacagaggtggagtgaagggccaggcattccagatctaccagtgcccactggagcctggcagcaagaggttacaaaggtcagggcctgccatgcgattcaagaatcaggatgctggtgagcatgtgtataagagtctatatgtacaccaagtgcaacgggtctgaaaagtctagttgtccagtaggggccatgcaatgaaagtgctccaagcagcttcatgacagtcaagcagtgacctggggctgcacgcagtccgacacagggaggggaggaaggggcatccaagatttaggactccaggtagtcctgcaggagccatttaatggcctggaaccccctgccgcccggccgagcttagcaatgcgctgggaaactcagctggcccggcgggggttgtgcaacgaccctgcatgcagtccataagggtcctgcaatggggccctagcagcccatcggggaactcgcaatacgctggagatcgcgctgaccccgtgccggcacagttcactgcaacagacccagagatgaaccgggcccggttccttttgcccttcccttcctcctcttttcccatccctggggcctgagcttacccggccaggcccccaaacaggaacttgacggacttaggggaggtacggggcttcccgtctatcccgccggccccggcactcgccgtcgccgccatcgccactcaatggccctcggctccgggtcccgtgcgcgcgcggccccgctcgcgcccaaggtgacaccgcgcgcgcaacagagcgagggcgcgcgcacgcccctccagctctcaggtccgacacccgctggaagccggcgcgggcgcaggcgcgcagcgcaaaggcggccgggagtaaggcggagctgaaggaggagcttgatggaagcgtgcgagaaggggcgtaactgatttggaaaccagaggaaaggcgctgttttcaccgaattagaatcgcgggaaaatagagaagagtttgtttgaaggtctcgcgagatcgagtgagtacggctcgccaagttggagcgctctcgcgatagacacagcaactattcagctgcgaggggacgggagaggtggtgagcactctcgcgagatttgaaggagcggcggaggccagagggaggagaggtttgtaaactaggaggctccgggtttccgggcacttttattaggtcgtcttctgggccaccagtgccccttccatctccacaggcagtccctccatcgctaacctttttttaaccggccttttaggaccggaagtccttcatctcaagcatccaatgctgaaagcggcctgat

SEQ ID NO: 17052 - DNA, 2300 bp, Homo sapien
ctcttagcctcttgaaaaggcaatgacataaaacatcccttcaccaaactctcccatcatccctctcgctgtcccagatgggctaatctgtaccctatactgcaagctaatgcaattatttttgccttctaatattccaattgtaattcaattctcaaaccacccatgtcactttctctcaagttctgtttcacagtcccctctccagcacatactcatacagacacactcccctcccttcagttttctttttgtttttcttttttttgagatggagtctcgttttgtcacccaggctggagtgcagtggcgcgatctcggctcactgcaacctccaccttccggtttcaagtgattctcctgcctcagcctcccaagtagttgggactacatgcgtgcaccatcacgcccagctaatttttgccattttagtagagatagggtttctccatgttggccaggctggtcttgaactgggattacagatgtgagccaccgcgcccggcctcttcaattttctaattacccatctcacaaacaactcgactgctactaaggcccaactgagttcttgctatgtggcagtctttgggatgaagtactaccaaaattgcgtatctactttgatcttcacaataaccctaggaaaacttctaatatcccattttacagtaaaacaaactaaggctcagagagattaacttgcccaaagtcatataagcaataactagcacctgagaccttcctgataaggaccgttgatcctgccttctgtcttcgtccactttcagtctccctgataacctcggagttccaggggtggacactctgtcttctccctctagattctgggttctacactagacgtgctcagttcctaacttcattttcctacctccagtttcacccaggacaaacctccccaaccccagcctaggatggaggatcttgcgaaatactaaaaaaagaaaaaagacagaaaaggaaggaagggagggaaggaggaaaagaaaagaaagaaaatcacctggaggccctcctggctcaaggtagccccaaacagagctggaaggtctgcaaagtccatgctggcattgtggtccgaggtctgcggacaaaaaaggcgatgttccccttcagcctgcaacccttcctttcagcgccctttccccatccgtccctcagactcaccgctcgaatgagcccccgggtcggggccgctccccacagcacagcggccacaaccacaggaagcgggaaggctgcagggtgcatggcagcgggaggaaagaggctgaggaggccgcgcgtcctggtagcaaggagcagaagcggagttctgcgccctccctgcccctcctttaggatcccaggggtccaaccacccccaggtcccacttcccagctacatgggggcgccggggaaggaacaccaactcaaagaatgagatatccaacccgtttagtggagctgggtgggaggcactaaatgtatccttttctggtacggggataaaacgcggaaaggggacggagcctaacacaggtgacagaaaaacttcgggaagggtggcggagctcaaggaggtgggacttcctgctaggtgggccgtgttcccagcctctggaaaagggcttccggtagagaaaatcaggccgctttcagcattggatgcttgagatgaaggacttccggtcctaaaaggccggttaaaaaaaggttagcgatggagggactgcctgtggagatggaaggggcactggtggcccagaagacgacctaataaaagtgcccggaaacccggagcctcctagtttacaaacctctcctccctctggcctccgccgctccttcaaatctcgcgagagtgctcaccacctctcccgtcccctcgcagctgaatagttgctgtgtctatcgcgagagcgctccaacttggcgagccgtactcactcgatctcgcgagaccttcaaacaaactcttctctattttcccgcgattctaattcggtgaaaacagcgcctttcctctggtttccaaatcagttacgccccttctcgcacgcttccatcaagctcctccttcagctccgccttactcccggccgcctttgcgctgcgcgcctgcgcccgcgccggcttccagcgggtgtcggacctgagagctggaggggcgtgcgcgcgccctcgctctgttgcgcgcgcggtgtcaccttgggcgcgagcggggccgcgcgcgcacgggacccggagccgagggccattgagtggcgatggcggcgacggcgagtgccggggc

SEQ ID NO: 17053 - DNA, 2300 bp, Homo sapien
gggtcctcataacggccattctcggcgccgccccatcctaccctctccaggccagccagcgccgggatgagttaggggacaggaaacgaatttagacaggccctttcggctggcaaggcgcccgactgataacgctgggacagcacttgtcgcccggcgtggggactgtcggtcagagcccctttccccatcgactgtgggcgctcagcgcacggccccagcccatcaatgaatggggctgaatcaacagtgaacaaaaatgaatggaccgaggacgggtggccttttgtgagcttctgcacgcctggggctcttccggcgccccacttgtagcactgcggggaggtaggtctctgccctcggtagagatctccactttgccggctctggggccagtgcggggtctgccccgagctcctctgcagccataccagccgaccggcgggggacacacggcgcctcggcccgactcggaggcccttcccgtcggcgccggggcagcgcgcgcccggtgactcacccccgccgccctctccccacccctgctccccgccccgccggcccgcgcggcctcccagcccccaccccaggccacctgccccgccacccgtccagtctcccctctcgccccgccccctcatctcaggccgctcctcccgggatttttccaccctggggtaggggtgcggtgggccaggggtcaggagatggcgggcggggagcgccgccacgtgcccgggtgcggccccgcccgagcccgccagtgactcagccgcgcggctgtcgaggaacacggactcgaggggcgtcggggactgtgggattcggcgtggacgccagggatgcgcgccgcgctcgggaggagagagaaaaccaaccccctttccgcccgggccgcgctcggtgaccccttgcccctagcccaggctccggaagccgcccagccctcggcggcgggtcggaggaggcggtttcaccgcggccgccgcacggccgtcccgcccgtcccgccctccccaggtggctgtgagcgcacatctgactgcgaagaaacccaaagggcccgaagtgggactttccccttcttgaaaaagttgccactcttgcaacttgagtattcttccgcctcgaaaaatagccccgcctgttaagccccgcgggtgtccgcgctctgtgacctctgcagacacaggccaaggggcacggccggtgatccagacattgcctgcctggggcgggcggggctgggatgtggggtgaggccctgggctagagccgatccagagaagggacaatcctctagactgagaatgggccctggtgaacccaacctgcacgacccgagaagacgctggggacagaagtggccccggtgggtgccttcagctatgagagcgactagaggatttggccaaactcttctttgctttcttattacttgaataagtaaaatcaaaggtggtgaggcggcagcgcgcacggcttcgcccccgccccttccgccaggcgggagacacgtccccagcccgccttcctttcccgcagggtccacacgggtcgggccgggcgcgctcccgtgcagccggctccggccccgaccgccccatgcactcccggccccggcgcaggcgcaggcgcgggcacacgcgccgccgcccgccggtccttcccttcggcggaggtgggggaaggaggagtcatcccgtttaaccctgggctccccgaactctccttaatttgctaaatttgcagcttgctaattcctcctgctttctccttccttccttcttctggctcactccctgccccgataccaaagtctggtttatattcagtgcaaattggagcaaaccctacccttcacctctctcccgccaccccccatccttctgcattgctttccatcgaactctgcaaattttgcaatagggggagggatttttaaaattgcatttgcaaagttcggtgtctgggctggcgagtgggggagggagggaatggggagtaggccccgcccctaccgtcctttgcaaataaaaatctagcggggcggggggggggaggagcaggaagtggcggtgcgagggctgctgcacagcgagcggagccgcggtccggacggcagcgcgtgccccgagctctccgcctccccccgcccgccagccgaggcagctcgagcccagtccgcggccccagcagcagcgccgagagcagccccagtagcagcgccatggccgggtggaacgcctacatcgacaacctcatggcggacgggacctgtcaggacgcggccatcgtgg

SEQ ID NO: 17054 - DNA, 2300 bp, Homo sapien
gacagtgtcagctcaccccctctcaggctgcgcatttatccctgagccactcggtccccagccagccccgcctctctttctctccatcctccccccttcacactgggctggcagccaagtgcccactacagcctgaagcagaagcctctggccctgggcacctgcccccttaccaaaggtcaactactatcccccactttctgtctcccaataacagtccctgttctaattccaccctttgggaggagcaagggaggggctacagatgaggggtctccccccaccccaggattacattccccttttgcaaacgtcaagaggaatgagtgacctttaggaaaggccaggggtaacctgagccctgcaaggctggggagggggcctggaagaggggctgcaagattgacgtccacacatgctcagatcgctgggcgggcctctgtcctcagtgggggaaaggacgggaccccccaccccagaaggcgagagggtctcacctcttagggtcctcataacggccattctcggcgccgccccatcctaccctctccaggccagccagcgccgggatgagttaggggacaggaaacgaatttagacaggccctttcggctggcaaggcgcccgactgataacgctgggacagcacttgtcgcccggcgtggggactgtcggtcagagcccctttccccatcgactgtgggcgctcagcgcacggccccagcccatcaatgaatggggctgaatcaacagtgaacaaaaatgaatggaccgaggacgggtggccttttgtgagcttctgcacgcctggggctcttccggcgccccacttgtagcactgcggggaggtaggtctctgccctcggtagagatctccactttgccggctctggggccagtgcggggtctgccccgagctcctctgcagccataccagccgaccggcgggggacacacggcgcctcggcccgactcggaggcccttcccgtcggcgccggggcagcgcgcgcccggtgactcacccccgccgccctctccccacccctgctccccgccccgccggcccgcgcggcctcccagcccccaccccaggccacctgccccgccacccgtccagtctcccctctcgccccgccccctcatctcaggccgctcctcccgggatttttccaccctggggtaggggtgcggtgggccaggggtcaggagatggcgggcggggagcgccgccacgtgcccgggtgcggccccgcccgagcccgccagtgactcagccgcgcggctgtcgaggaacacggactcgaggggcgtcggggactgtgggattcggcgtggacgccagggatgcgcgccgcgctcgggaggagagagaaaaccaaccccctttccgcccgggccgcgctcggtgaccccttgcccctagcccaggctccggaagccgcccagccctcggcggcgggtcggaggaggcggtttcaccgcggccgccgcacggccgtcccgcccgtcccgccctccccaggtggctgtgagcgcacatctgactgcgaagaaacccaaagggcccgaagtgggactttccccttcttgaaaaagttgccactcttgcaacttgagtattcttccgcctcgaaaaatagccccgcctgttaagccccgcgggtgtccgcgctctgtgacctctgcagacacaggccaaggggcacggccggtgatccagacattgcctgcctggggcgggcggggctgggatgtggggtgaggccctgggctagagccgatccagagaagggacaatcctctagactgagaatgggccctggtgaacccaacctgcacgacccgagaagacgctggggacagaagtggccccggtgggtgccttcagctatgagagcgactagaggatttggccaaactcttctttgctttcttattacttgaataagtaaaatcaaaggtggtgaggcggcagcgcgcacggcttcgcccccgccccttccgccaggcgggagacacgtccccagcccgccttcctttcccgcagggtccacacgggtcgggccgggcgcgctcccgtgcagccggctccggccccgaccgccccatgcactcccggccccggcgcaggcgcaggcgcgggcacacgcgccgccgcccgccggtccttcccttcggcggaggtgggggaaggaggagtcatcccgtttaaccctgggctccccgaactctccttaatttgctaaatttgcagcttgctaattcctcctgctttctccttccttccttcttctggctc

SEQ ID NO: 17055 - DNA, 2300 bp, Homo sapien
tggggcggtcggggccggagccggctgcacgggagcgcgcccggcccgacccgtgtggaccctgcgggaaaggaaggcgggctggggacgtgtctcccgcctggcggaaggggcgggggcgaagccgtgcgcgctgccgcctcaccacctttgattttacttattcaagtaataagaaagcaaagaagagtttggccaaatcctctagtcgctctcatagctgaaggcacccaccggggccacttctgtccccagcgtcttctcgggtcgtgcaggttgggttcaccagggcccattctcagtctagaggattgtcccttctctggatcggctctagcccagggcctcaccccacatcccagccccgcccgccccaggcaggcaatgtctggatcaccggccgtgccccttggcctgtgtctgcagaggtcacagagcgcggacacccgcggggcttaacaggcggggctatttttcgaggcggaagaatactcaagttgcaagagtggcaactttttcaagaaggggaaagtcccacttcgggccctttgggtttcttcgcagtcagatgtgcgctcacagccacctggggagggcgggacgggcgggacggccgtgcggcggccgcggtgaaaccgcctcctccgacccgccgccgagggctgggcggcttccggagcctgggctaggggcaaggggtcaccgagcgcggcccgggcggaaagggggttggttttctctctcctcccgagcgcggcgcgcatccctggcgtccacgccgaatcccacagtccccgacgcccctcgagtccgtgttcctcgacagccgcgcggctgagtcactggcgggctcgggcggggccgcacccgggcacgtggcggcgctccccgcccgccatctcctgacccctggcccaccgcacccctaccccagggtggaaaaatcccgggaggagcggcctgagatgagggggcggggcgagaggggagactggacgggtggcggggcaggtggcctggggtgggggctgggaggccgcgcgggccggcggggcggggagcaggggtggggagagggcggcgggggtgagtcaccgggcgcgcgctgccccggcgccgacgggaagggcctccgagtcgggccgaggcgccgtgtgtcccccgccggtcggctggtatggctgcagaggagctcggggcagaccccgcactggccccagagccggcaaagtggagatctctaccgagggcagagacctacctccccgcagtgctacaagtggggcgccggaagagccccaggcgtgcagaagctcacaaaaggccacccgtcctcggtccattcatttttgttcactgttgattcagccccattcattgatgggctggggccgtgcgctgagcgcccacagtcgatggggaaaggggctctgaccgacagtccccacgccgggcgacaagtgctgtcccagcgttatcagtcgggcgccttgccagccgaaagggcctgtctaaattcgtttcctgtcccctaactcatcccggcgctggctggcctggagagggtaggatggggcggcgccgagaatggccgttatgaggaccctaagaggtgagaccctctcgccttctggggtggggggtcccgtcctttcccccactgaggacagaggcccgcccagcgatctgagcatgtgtggacgtcaatcttgcagcccctcttccaggccccctccccagccttgcagggctcaggttacccctggcctttcctaaaggtcactcattcctcttgacgtttgcaaaaggggaatgtaatcctggggtggggggagacccctcatctgtagcccctcccttgctcctcccaaagggtggaattagaacagggactgttattgggagacagaaagtgggggatagtagttgacctttggtaagggggcaggtgcccagggccagaggcttctgcttcaggctgtagtgggcacttggctgccagcccagtgtgaaggggggaggatggagagaaagagaggcggggctggctggggaccgagtggctcagggataaatgcgcagcctgagagggggtgagctgacactgtcccagctgccacctagactcggagctccatccaaacctccagcgaagacatcccaggttgggtgaatcttccagccctgggggtggaggtagtaaagggtgagcatggtattggcttggaggaagtgggggacatttctgctttttttcctcctgggactggagatgcttgaaaaagctgggggaaggggcg

SEQ ID NO: 17056 - DNA, 2300 bp, Homo sapien
gcaagttccgaagctactatgaacagaagcgatttcagcagagccgccgagcggctgtgctcatccagcagcactaccgctcctaccgccgcaggcccggccctccccaccggacttcggccaccctgcctgcccgcaacaagtagggcccagccccagccctctgtgcccacccactgcatccacgccattcccccttactcatcctcttgatcatcatgcctcactgccattccctgcctagggttcctgggggggccgaaggcatgcgatgccttctgtgaggtccatcttttgtttctttcaccagaggctcctttctcaccaagaagcaggaccaggcagcccggaagatcatgagattcctgcggcgctgccgacacaggtactcatcccttctccccctgggcttttgcgttgccacccgtcgtgatccgccagtctcctctgactcctatctttctctctgcaggatgagggaactgaagcagaaccaggagctggaagggcttccccagccgggactggccacatgacctggccaccgcctttctcaccaccctgggggcgcctcgtgcagtcttaacagggagagggctttctggggcagggggagcccctgtcggcagctttcctgttcacctttgttggagccctctgtaggcctcctccctcctccccacgccttgctcccacacccctctcctcgtccctcctggtcgtgccccgtctcttttggtcctggctccagaaaacccgcgccccacatacctgcatcttccgctgtgacctccggagccctgcctgcccctgctccccagctcctcctgcctgcacccgactcggccccctcctgacttgccttatttatttgttcgacgcgtctctgaatgtatccgcctcggttcccaccactgccttcgctgcgcacgcccctcgtgtttcagggctgaccgtgtccccacccgactccgcatgtttgcgtctgtttcctccctctctggccctgtcttaccccatcacccgactctggccactgacctcagggccgaaggggaggtggtgtacataggaacgcgttgcggagtccgccccgtcccccgaggggaggggtcttgtacatactgtaacatacagagtatagtgaagaatctatttaaggcgccgcggggagggctgcacggccgggcttgtggttctctagcgcggcgggggcctcctgccggctccacgggcactttctacttgtgcatgggcttggtttatacgaattgccattaaacatcgctgcaccagccagcctccggcctctgtctgcgggggcggggcggggcctaggccagctggaggccgccatgcaccgcgggcctgggatctgcgcccaggccaggcgggcccagggttttccgcctccgacgtgtttccggccttaaaggcattccgcccttccctttaagacgcaccgccccctctcagtcactcccaagatggcggacctactgggctccatcctgagctccatggagaagccacccagcctcggtgaccaggagactcggcgcaaggcccgaggtgaggatcccaaattcacaaccgccttccttcgcccggttctcgggaccatacttctccctctttggacgatgccgcctcctcaaccttgaaagacccctcacaggccccttccgagaccctcagagtccctaaaagggctgctgacacgcccgctgttcttagcggacagtgattggctacctgaaagatagcgccagcctcctgcctcttctcccgaccctggccttccgcagtccttgtttcccattagccggccgtcccgcctgtccgctgctgacctggtctgattggtagggtgcctccaacctgccgcattcctgccccgctcacctctagctctatttcgattggatttaggacacgccatctactgtgccttcatctctattggctatctcaacttaaagctctgcctcctcaggcctgttcgaccttccttcgaaaccaccccagcctgcgaattcccattggttgcagggtcctctgtgtgttcttgcccctcctgcttaatttaacccagtcccttctgcctccctccgacaacctttttcccatccgtagccttaaattcccgagctgcccgggcggatcgtagtgttgattggagggatgagaatacccgccgggtccgattggccactgtctccgcctgcgttctcggagtagcttccctgcgggtgggctggagttcggcggccggcgtagggcgcggccctgcagggcgg

SEQ ID NO: 17057 - DNA, 2300 bp, Homo sapien
cgaaagtacaaggtcaggggcaggggtctcaggatgaattacacaatctccagtcaggggagactgggctcccagggcttttggaggatgagtagtcgtgcagacaggccttggatggggtaaagggtcaggggaaccccaggaaagttgaagggacaagtcagatatgccattatgtgggtcatgaggtggtgagacttctctcccttcagggccggcggctgaaggagcagcaggaggtagcagcagctgtaatccagcgctgttaccggaagtacaagcaggtgagacccttctccctcaaaagtgtaaccagcaacccaccaacccacacccacgcctaaccattccagaatgttgccagagccctaactccccttctctctccacaagctgacctggattgcacttaaggtattaggcatgagctctgagtgtgaggtctgtgatgattcagtctttccttgagtgtgtgggttacagagagtcttgcatcagcctaacttgggtgagcctcagggctttgggtctccgtccctctatttcagcccctgtccctcctccccacccctgcagtttgcactctataagaagatgacccaggcggccatcctgatccagagcaagttccgaagctactatgaacagaagcgatttcagcagagccgccgagcggctgtgctcatccagcagcactaccgctcctaccgccgcaggcccggccctccccaccggacttcggccaccctgcctgcccgcaacaagtagggcccagccccagccctctgtgcccacccactgcatccacgccattcccccttactcatcctcttgatcatcatgcctcactgccattccctgcctagggttcctgggggggccgaaggcatgcgatgccttctgtgaggtccatcttttgtttctttcaccagaggctcctttctcaccaagaagcaggaccaggcagcccggaagatcatgagattcctgcggcgctgccgacacaggtactcatcccttctccccctgggcttttgcgttgccacccgtcgtgatccgccagtctcctctgactcctatctttctctctgcaggatgagggaactgaagcagaaccaggagctggaagggcttccccagccgggactggccacatgacctggccaccgcctttctcaccaccctgggggcgcctcgtgcagtcttaacagggagagggctttctggggcagggggagcccctgtcggcagctttcctgttcacctttgttggagccctctgtaggcctcctccctcctccccacgccttgctcccacacccctctcctcgtccctcctggtcgtgccccgtctcttttggtcctggctccagaaaacccgcgccccacatacctgcatcttccgctgtgacctccggagccctgcctgcccctgctccccagctcctcctgcctgcacccgactcggccccctcctgacttgccttatttatttgttcgacgcgtctctgaatgtatccgcctcggttcccaccactgccttcgctgcgcacgcccctcgtgtttcagggctgaccgtgtccccacccgactccgcatgtttgcgtctgtttcctccctctctggccctgtcttaccccatcacccgactctggccactgacctcagggccgaaggggaggtggtgtacataggaacgcgttgcggagtccgccccgtcccccgaggggaggggtcttgtacatactgtaacatacagagtatagtgaagaatctatttaaggcgccgcggggagggctgcacggccgggcttgtggttctctagcgcggcgggggcctcctgccggctccacgggcactttctacttgtgcatgggcttggtttatacgaattgccattaaacatcgctgcaccagccagcctccggcctctgtctgcgggggcggggcggggcctaggccagctggaggccgccatgcaccgcgggcctgggatctgcgcccaggccaggcgggcccagggttttccgcctccgacgtgtttccggccttaaaggcattccgcccttccctttaagacgcaccgccccctctcagtcactcccaagatggcggacctactgggctccatcctgagctccatggagaagccacccagcctcggtgaccaggagactcggcgcaaggcccgaggtgaggatcccaaattcacaaccgccttccttcgcccggttctcgggaccatacttctccctctttggacgatgccgcctcctcaaccttgaaagacccctcacag

SEQ ID NO: 17058 - DNA, 2300 bp, Homo sapien
gacttgagcgagggatggccgtggctccggctgccctcactctcttccctccccacacaggtctgagcagcgtctcctcgccctcggagctgtcggatggcaccttttccgtcacgtcagcctattctagtgccccagatggcagtcccccccctgcacctctgccagcctctgagatgactatggaggacatggccccaggccagctttcctctggtgtcccagaagcccccctactcctcatggactatgaggctaccaactccaaggggcccctctcctcccttcctgccctcccaccagcttcagatgatggggctgctccagaggacgctgacagcccacaggctgtggatgtgatcccggtactgcttatattgatggagttatgggggctagaagtggagtaggaagggtgaggccgacttccatgaagcagaatcaaagtctggcttcagtttaggaagggcctatttacttcattttgggacaggcaaggtagccttttgcttagctccttttagaccatgtgacttggaagtcatgaggcagcggaggttgaaaattctggctggtcccacaatacagatgttggaaaaaaaaaatttggccgggcttggtggcttacgcctgtaatcccagcactttgggtggccagggcgggtggatcacttcaggccaggagtttgagaccagcctgggcaacatggcgaaaccccctctctacaagaaatacaaaaattaactgggcactgtggtatgtgcctgtaatcccagctgtttgagaggctgagacacaagaatcacttgaacccaggaggcacaggctgcagtgagccgagactgcaccactgcactccagcctgggtgacagactgagactgtctcaaaaaaaaaaaaaaaaagacaaaatagtaagatttaaaatataaaaagcattaaaaaatattctggctgggtgcggtggctcacccctgtaatcccatcactttcagagaacgaggtgggaggatcacttgagaacaggggcttgagaccagtctggccaacataacaagaccccatctctacacaaaataattttttaaaaataggcatggtggcacacacctgtagttgtagctacttgggaggctgaggtaggagaaccccttgagcccaggaatatgaggttgcagtgagctgactgtgccattgcattccagcctggacaagagaccctgtctctataacaaaaattctagggaatatcttcagttagagctggtttgtaggagttaaccgttgatctatgtagggacaaggttctaggagaaccaagatgacggagggcagctgggagttgtgtggagaggtaaggctggcaagatgagggtatttggcagtgatctgatgcaggaaggaggcttgcacatgataaagctaagaaagtcttgtggaatgaaagtgaatcttcaagtatagccttgtacttctctgatagagactggggacatacctgctttagagagactaatggagtaagtgggtggcactttaagtacaaaaaacttagggaactccacaagtaggttgtgttgagtgtgtccagcaggaagtgctggagtataggcttcagggctggagcaaaggccagactggagccattcatccgggtagtagttggcaagtgttggaatggttcttggagagttgaaagggagctgggggtgggcacagccaagcctatggggagcatgtgctggtcagctggcatggggcaggcccaggtaggacagtggatggttggcctgaaagggtgtcaagtcctccatttgttcagctttgaatccccacttggagtatctcctttttatcctatattctccatagcatctcagcacagagggacccccaagtgggagccccatcagtataaatgaatgagtctggaacagtggcccagaaagacagggttagcagcacctggcagggagagaaggaacaagataggaatggactgaggttacagctggcagctggggcccctaaggactcactcagcttctcccttcttccaggtggacatgatctcactagccaagcagatcatcgaagccacaccggagcggattaaacgagaggacttcgtggggctgcccgaggctggagcctcaatgcgggagcggacaggggctgtggggctcagtgagaccatgtcctggctggccagctacctggagaatgtggaccatttccccagctcaacccctcccaggtgactagctcaggacaaagcctccagattcttcaaaggaaga

SEQ ID NO: 17059 - DNA, 2300 bp, Homo sapien
ttgttttccttgggtttctgttcatcattctctgtcctcctatcacctgtgtaccttcatccccttctatcctggcatctcagaacatctccaaccttcaccgtttgtgtctgttttcctacagctctgatcccctcctgcctccccttcttgtccttgtttgatctcaggaggggacagatatagcttggggggatatgtgtgtacgtgcgtatttgtatatggggcggggaggaggaggaggagaaatggacatggctatatggctatccatctctgtcaccttccgtcccccaccatcgtctttgtggacagctgcggggggctgggaggaaggggaggtacttttcaaatcacagtccctgagctttttggggcagtggttattaaaagggagggaccctggaatccttcaccttcaccatgggggacaaaggtagtgtctgctgcaaaaattgacagaacattttgcctaggaaaaggctggggggaagagtgtgtacgggtgggatttgggacatctggaggctggatgaccatttgggaatcctactacctctgtaccttgaaggaaacagttttggttccagatctgggttctagatcagtgggtagtattaacagccctagtttaaggactgagtcctggtgggctttatttaggtgaaggggtaaaggagctgttgttttggggaagataaaagaatatggttctgtgtcctcatccccagatcttgggacaggtctacttttggtgttcagggcatcacctagactgcccactcagcctcccatacccgttccccctcagacaaccagttccggatgtccatactagagcgactggagcagatggagaagcggatggcagagatcgcagcagctgggcaggtgccttgccagggtcctgatgctcctccagttcaggtacttctgtgaggagggaggtggtctacggtggggagcagggggaggacacagctaaagaaaacatctagtgcccatgactctcctccctctcctgtccccagcctcctcagcctgtcttccctctccctgacgtcaccctgttcccatccccaccttgtggcaagagtggctattctgggcaccctcttggcatgacgggcttcagactatttctggtctgaagaagggtggaggtgaaggagagggcgggggaggggtcaggagcactggggctcagatctctgtgggtcccaagtttctgaaagaagagggctaaggctcagagaaggctctggcttctgagggggagaagccatgtgtgaacatggcactaatctgagctgatgggaaggcacatgggcaagattgtgtgaggtctggctgctggaggaagtggctgtgggagcaagagacacaggccacagaggaacttcaactgatgggatcctagagtgggacatgtggggagggggcaaaattagaagctgggaggacagatgtgaggtggccaaggccacctcaagccaggggagtagatacctgggtctctgcctaagagtgtgtatatcgcaggatgaaggccaggggcctgggttcgaagcacgggtagtggtcttggtagaaagcatgatcccacgctccacctggaagggtcctgaacgtctggcccatggaagccccttccggggcatgagccttctgcacctggctgctgcccagggctatgcccgcctcatcgagaccctgagccagtggcggtgagcaagggcagctgggtgagggctgggcagcctctgggacagaagtgtcaggggactgaagaggaattggaggacctggggccctaccaagagggagttggggtcattgtgggaagggagggggttgggagaggacttatattttggggaactttcatatcctgacttacaacactttgacttcttgacctccttaagctagtgtccttgactgcctcttcccaccggccctgtacagcttgcctcctagtgcctttacttctgatgttcctgctttgcccactttttccctcattgggctctgctgtctctctcccaaaccctccaggagtgtggagactggaagcttggacttagagcaggaggttgacccgctcaacgtggatcatttctcttgcacccctctggtgaggatgacggattcctgagcgcatatggggcagggagcaatgggaacagcccttgaaaaggaagatcctgaggaatgcagggagtggggtgggctggggcctgaagacctgactacctggaggaagagcccctggcctcacctccacctccgtctccgcc

SEQ ID NO: 17060 - DNA, 2300 bp, Homo sapien
agagaaaggggcttggggatggagagagtcagaaattgggggcgaggttaggagggtgcccaggaagaaagtgaggattaggaagccaagcccctggacctcaggaccccatggctctgtgtgtccccttatactctcagaaccctgacatcgtccttgtgcactacctgaacgtcccagccctggaggactgtggaaagggctgcagccccatcttttgttccatcagcagcgaccgtcgagagtggctgaagtggtcccgggaggagttgttgggacagctgaagcccatgtgtaaggcagcagggtggggatagagctccaaggggagagtagaaacagggctcccagaggggccatggttctggacccaaagcctgagggctgatcatctccctccaagctgggagggtgctaggattcccggtgtgttctcaggtattagaatacggagaaaggactaaagcaacatatctgagcagtcttgaggctgctggcctctgttcacctggccagaagtcttgaagcatgtcaggtgcttggaggagccatcaaggtactctggggcctgtttcgtggggatcccacagcacttccccctaacttctctagttcatggcatcaagtggagctgcgggaatggaacagaagagttctctgtagaacacctggtgcagcagattttggacacccacccaaccaagcctgctccccgaacccacgcctgtctctgcagtggggggcttggtaagttactccctgaccttttggctgtcttcccacctagccacactgctcttacgcaagccagggggatatccatcttgatgggatttgcatgctgatttgcaagtcttttgcatgtcccagaaagatgggccagatgaacagacgttcccatctgggtgcacactggctcggaatcagccttgcactcagctgtcatggcagcctctgcccttcctgtcttctaccttcagcaattcctgtcccctcagcaccaccagtgacacccagccttagccttcctcctagttggcacccccttggttctgttcttttgtccttttcctatgcctttaacttttgcttttagctactctcccaagccctcagttctctggagcgttcctctggtcctgcttgttttgaggggaaatggagagggggagggggaataaagggtaggggtagagaacagacatttctgatgcctcccagtggctacaatcagtattacacctctggtttatagggacgtcccaggaaatacttttaagggcctcaaggtagagaaggtgcggaatgatgtgtcttatctcctctccctcctactcctctccactccaggttctgggagccttacccacaaatgcagcagcacgaaacaccgcatcatctctcccaaagtggagccccgagctttaaccctgacctctatcccccacgctcaccccccagagcctcctccactgatagccccacttcccccagagctccccaaggcacacacctccccatcttcttcctcttcttcctcctcatcaggttttgcagagcccctagaaatcagacctagccctcccacttctcgagggggttcttcaagaggaggcactgctatcctcctcctgacaggactggagcagcgggctggaggcttgacgcccaccaggcacttggctccacaggctgatcctaggccttccatgagtttggcagtggttgtaggcactgagccttctgccccaccagctcctcccagtcctgcctttgaccctgatcgttttctcaacagcccccagaggggccagacatatggaggggggcagggagtaagcccagacttccccgaggcagaggccgctcataccccctgttctgccctagagcctgctgctgccctggagccccaggcagctgctcggggtcccccaccacagtcagtagcaggtgggagaagaggaaactgcttcttcatccaagatgatgacagtggggaggagctcaagggtcacggggctgccccacccataccttcaccccctccctcacccccaccctcacctgcccccttggagccgtcaagcagggtaggaagaggagaggccttgtttggaggacctgttggggccagtgaactggagcccttcagtctttcatcattcccagaccttatgggagaactcatcagtgacgaagctccaagcatccctgctccgaccccccagctgtctcctgctcttagcaccatcacagacttctccccagagtggtcctacccagaggtgagactcagg

SEQ ID NO: 17061 - DNA, 2300 bp, Homo sapien
accacctggaggacctaagaaggcgtcagagcatcatcaacgagtaaggaagggagacatctgggttctgggagtcatgcaggatttgggggcagaacagtttgagctaaggaaggggttgacagctttgaggggaggtttgaggggagctttgaggggaggttgcttggaaggaagctgtgggctttggtgtgattgaaacagatttctgtaatatggaaagaaggagggaactgcagtaaggaggatgagccacatgagctggaaggagtggaaactagatcactgaagacaggaaagcaaaccatagaactggaggacagtggggaggttggggtcacctctgggttcctagacaatatgcttcagtctgaggggagcagaaaattgggagtggagggttaaaggtcaaatgacaactccctggagtcccagcaggaagtatttcagaacagaaaggtgaagaatggagagacaggaagcctggcctccaggcacttctctcctcagcctaaagtctccacagactgaagaaggcccagtggggcagctctggggctgcatctgagccagtggtgcttggcgaagagggctgtggattccccagcaccaatgaataccctgatctggaagaggagagagcaacctatccacaggaagaggaccgttttctcactcctggcagggcccaggtattgttggagtggaactgggtggagtgagggagtgatgtgggtctctggtcttgcatggagatgcagaagctgagagccaggctggagagctggatttgagagaaacaaaaataacgtaggtgagaaccagagacttcgaggtacctaagcttgggtactaggaaatctggaaagaagacctacttttccattttctttttcaatttctctcatcttgacagctgctttggtctccctggagccccctggatcaggaggaggcttgtgcctccaggcagctgcactctctggcctcgttcagcactgtcacagccagaaggaacccccttcacaatccctgggggatggagttggcagcgtctgaagagtaaggagaaaccaccgatgccgagaggctagtggtgccccagggacccaagactagttccgtcactagagtcaccctcattgctgacatgaaggcgtttccccttccttcgtctctccaactgcctttcccatcctctgaactaggcattaacagcccccgtgggctcccatctcaacccaccgctctcacaggagcaccccaagtcctgttttcctccaggccccgctcctggccttgtattctctctgctctgttattaaaaagcaagcaagtggagcccgagttgtctttcttcttgggatgcagcgatggagaggccaatggggaaggagggctcctttcgctttctcgaggacccagctacaatgaagtcgggctgggtccccagacaaggagtcttgtccgaggcgagaagggtcctgctcccagtccagcgttcctcgcccggcccctcgggttccagcactggtgggctgcccccgccccgttctctcgaactgggagtcagtcggccgagcttccgcctccaggaccctggaatcctgcccctcagtgctgctgcccttttggggacttcccagcagtctgtccctcggcctggctcagagccctagaagccgagtccctctgcccagcgccccacccagaactccacgtgtgctgaccccaggttcccttcctgaccctcatccccttaattgggaggccccgccccgtgcgcagtgacgttagacgccgctgtcagccggcgctggggggggtcggtgtggggtagaatggccgctgccgccgtcacccgcgggaccccgggaggtaagagccagggcctctcgcccgcctctccgcccccgcgccagagggcgcagctcctccaggtcccgacgcggagcgccgcgccagggaccaccgtccctcttcccggttcgccctcacctcccgcttccgtcctcctcccccgcgccagggggcgccgctcaccgcagggccccacggcggaccagcgcgtgccggggactgtcccggagacccccgcacccggcacctgcactgtccctcgcccaccgcgtgcccgcggactctgctcccggcttctccagaacatccctctatgcgggcgggaccctcccacctcggaggttctcctgggaccaccactccgccggggggccgcccagagtgccaagcgtccgatccggcgccgcccaagtgcagcccaaggacccgctcccgctccg

SEQ ID NO: 17062 - DNA, 2300 bp, Homo sapien
agtcatcatgttttcgagatcacaggggtcttcccaagaccccagactccctacctagttcaatccaagctcccttgagagagccagttcttctttctagctctttttccccattctctggcacagagagccactggttgctcccagcttggtctgtatcctcctgagcagctcccaccccctgaaatgctttggagaagaaagaagaggaggccatgtttggaaggaatgcagcagcagggccttgggggagtccccgcccgggtgagggctgtcacttaccacctggaggacctaagaaggcgtcagagcatcatcaacgagtaaggaagggagacatctgggttctgggagtcatgcaggatttgggggcagaacagtttgagctaaggaaggggttgacagctttgaggggaggtttgaggggagctttgaggggaggttgcttggaaggaagctgtgggctttggtgtgattgaaacagatttctgtaatatggaaagaaggagggaactgcagtaaggaggatgagccacatgagctggaaggagtggaaactagatcactgaagacaggaaagcaaaccatagaactggaggacagtggggaggttggggtcacctctgggttcctagacaatatgcttcagtctgaggggagcagaaaattgggagtggagggttaaaggtcaaatgacaactccctggagtcccagcaggaagtatttcagaacagaaaggtgaagaatggagagacaggaagcctggcctccaggcacttctctcctcagcctaaagtctccacagactgaagaaggcccagtggggcagctctggggctgcatctgagccagtggtgcttggcgaagagggctgtggattccccagcaccaatgaataccctgatctggaagaggagagagcaacctatccacaggaagaggaccgttttctcactcctggcagggcccaggtattgttggagtggaactgggtggagtgagggagtgatgtgggtctctggtcttgcatggagatgcagaagctgagagccaggctggagagctggatttgagagaaacaaaaataacgtaggtgagaaccagagacttcgaggtacctaagcttgggtactaggaaatctggaaagaagacctacttttccattttctttttcaatttctctcatcttgacagctgctttggtctccctggagccccctggatcaggaggaggcttgtgcctccaggcagctgcactctctggcctcgttcagcactgtcacagccagaaggaacccccttcacaatccctgggggatggagttggcagcgtctgaagagtaaggagaaaccaccgatgccgagaggctagtggtgccccagggacccaagactagttccgtcactagagtcaccctcattgctgacatgaaggcgtttccccttccttcgtctctccaactgcctttcccatcctctgaactaggcattaacagcccccgtgggctcccatctcaacccaccgctctcacaggagcaccccaagtcctgttttcctccaggccccgctcctggccttgtattctctctgctctgttattaaaaagcaagcaagtggagcccgagttgtctttcttcttgggatgcagcgatggagaggccaatggggaaggagggctcctttcgctttctcgaggacccagctacaatgaagtcgggctgggtccccagacaaggagtcttgtccgaggcgagaagggtcctgctcccagtccagcgttcctcgcccggcccctcgggttccagcactggtgggctgcccccgccccgttctctcgaactgggagtcagtcggccgagcttccgcctccaggaccctggaatcctgcccctcagtgctgctgcccttttggggacttcccagcagtctgtccctcggcctggctcagagccctagaagccgagtccctctgcccagcgccccacccagaactccacgtgtgctgaccccaggttcccttcctgaccctcatccccttaattgggaggccccgccccgtgcgcagtgacgttagacgccgctgtcagccggcgctggggggggtcggtgtggggtagaatggccgctgccgccgtcacccgcgggaccccgggaggtaagagccagggcctctcgcccgcctctccgcccccgcgccagagggcgcagctcctccaggtcccgacgcggagcgccgcgccagggaccaccgtccctcttcccggttcgccctcacctcccgcttccgtcctcctccc

SEQ ID NO: 17063 - DNA, 2300 bp, Homo sapien
accagggaggcagaggttgcggtgagttgagatcgcgccattgcactccagtctgtgcaacaagagtgaaactctgtctctaacaaaataaaaaaagaaattaaaaaaagttaagtgtggacataatggtcaactggtgacagggaaggagggggcagttgggaatgcctgtggatagggaggtcagttgcatatagggacagccaaagatgacctgaaggccagttggggtggggagaaagggcagttaaggctgggcacactggctcacgcctgtaatcccagcaatttgggaggcggaagtgggtggattgctcgagcccaggagtttgagaccagcctgggcaacatggcgaaaccccctctttaccaaaatacgaaaaagtttagccaggtgtggtggtgtgcgcttgtacccggaaggctgaggtgggagtgtcatctgagcccgggaggtcaaggctgcagtgaggtaagatcgcaccactgcactgcactccagcctaggcgtcagagtgagaccctgtttctaagaagaaaaaaaaaaaagccaggcgcggtggctcaagactgtaatcccagcactttgggaggctgaggtgggcggatcacttgaggtcaggagttcgagaccagcctggccaacacagcgaaacccagtctctactaaaaatacaaaaattagccgggtgtggtggcaggcatctgtaatcccagctattcgggaggctgaggcaggagaatcgcttgaacccaggaggcggaggttgccgtgagccgaggtcagcctgggcaacagagcaagactccgtctcaaaaaaaaaaaaaaaaaaaaaaaaagaatactagataagttaggagagagtgcacataggctcccgaaggacagaagcagccagctggaactgtagaggtgaactagtatttatccaagggaactagggatgggctgggaaagcaggtgaggtcaaaagcggagagaagtataccgtgcggaagcggcagatggggctagttggagttgggctgaaagggcctaaagtggggtctaaaggggatgtcctgactcggaggggggtcagcagaacgcgagggagcagcgggagctgcggggcattcgggcctcagatagttgggtccaagcgggtgacctagatccaagggcaggatggagctgaaggaagccaggaaggatcctccacagttgacttcggggtagccacggcctgcgcctgcgagggtggatgaggacccgagggtccggctggggctgaggggctgcctggagccccgctggagggaagcgccgggccggagggcgcggcctgcgcctgaaagggcgacggggaccctcgacaggtggaccgggcgtggccggaccttccgggcagccccgcccgagggcacgactgggggctgcttccctcgagaggggccctgaggtggtgggcccaggctgaagggcaggctggggcctgagggacgccccgggtctgagagggcagctccggccttaggcggcacccgggcctgaaggggttgtttgggcctcaggcggcgtccagggcggccgaacttgagggccaggcggggacagagcgcccgagtagccgcgccacggccggccgcatttggccccagcacctgaagcagctgcgcggcgaattctagaactcggcggggcggggaggagagagacggcgattcgagccgcgggaggagccggcgggcggtgctcgtctgagggcggggcctgagcggagccaccttctgggcgggcctcggcaggaggctccgccccctggacgcgcctccaacggcggcgacgggaactgggccggggcctgggtgcccccgcgggtcagcccccgacgtttccctgttcttcaggcgtctgcaaccctcctgggttgcggcgtctgctcgcccttctgcgtccgcagctcggtccccacgttcccgctcgctgggccccacaggccaggagcgttgcccctttaacaagagtagcccgggtcgctcccggctccttcccgggaccgcgcgtacccgcccctccgcgcgcgctcgcgcgtcccccgcccctcgctcccgccccagctcgcgctgcccgggcgggcgccggccgctggcgccgctactgctgccgcccccggggcgcgagtccgccgcccgccgcccgggcacccggcgaggggcgggggcagctccgaaccggccccagatccttcccgcttccgcctcacgcttcccggaaagcttgtccctctccgccgagctgctccgggagccccgccgcg

SEQ ID NO: 17064 - DNA, 2300 bp, Homo sapien
atgtgaatccaagggcagggacggtgatatttttattccttgtcactcgcaaatgtactgaacgttcagatagaggacagagagagaaagaggctggacagagggcaattcagagagaggggcacatgggcagagacgtgaggggggtgggaagagagagaggaggggcagagagtcacagacaccaagaaaattagagaaataagacaaaaggcaagcctgaggtcatgctatgaaggaaagaatgggagaggaaaggaggaagagacacagcacagcaaacacacggtgttaaagagacagggtggggaactccggcgccaaagcacaaactgggagcccagaagagagaccagagaggaaactgcaaatgcaaaacctgtcctcaaattcccccacagtgtcggcaagggagaatctagtttccacctgaggcccacaacctccatgcaccaggccagtagtgcagatgggcaaagtccaaggactgtaggtagggcccaggactgggatccacagggccagctgtgtgggctctaagccccttgcccagcccccagcacttcctcctcaggatccgggacaatgagcaggggagggtggggtcatcctgtagccatcagaccaaccctcagggctccacccttggggcgcccagaaatacctgtgtttgagggtagagggtccctggggcctccctaaaagggagaaagaaaaggaagccggctggctggtgccagccccaacctggggctagtgctatggcgtccactgccctggggaaggtgccaggctggagcccaggaatgtgggtgatcgggtgcccacaccctgggaggagaggctgagcagcccacgcccacggacaacagggaggaggaccacgaaggataagggatgcggagccccctcctgtggccccagtggaccccaaactcctgtcacgctgggcctcccctcaccagtcttcctgggcagagcatgggagggtgaggggctggtctgtcccaggacaggaagggagtagctggaatcacagaagctggctcaggaagaacagccctgaccccctagaccctgaccaggggagggaaggacactggtggggacaagcgatggtgacgccgttgctgcagctaatgggacagggatggggtggcacggctgggggccagcggggtaagggaatagaggtagggacaggggtcggccggtgcagctgtgaaggagccgtggggtacaaggaggatactgggcggctggggtggggccgaccggcccgaaagggggtcttgggccacctgcaccttgcccacccggcggttctcacacaggtccccgcccggcctctcagggcggccatgcggacccgtcctcctgtccagccagccggcggccgcccgggcctggcacctctctgcgcctccgcggaacaaacagcacatgatcccgactcttgagcctagatcgcgccgccggaccccggctccccgccccccaacccggcacattcctccgcgggcgtcccttccctcccccttccccagccctcacctcggcgcggcggggctcccggagcagctcggcggagagggacaagctttccgggaagcgtgaggcggaagcgggaaggatctggggccggttcggagctgcccccgcccctcgccgggtgcccgggcggcgggcggcggactcgcgccccgggggcggcagcagtagcggcgccagcggccggcgcccgcccgggcagcgcgagctggggcgggagcgaggggcgggggacgcgcgagcgcgcgcggaggggcgggtacgcgcggtcccgggaaggagccgggagcgacccgggctactcttgttaaaggggcaacgctcctggcctgtggggcccagcgagcgggaacgtggggaccgagctgcggacgcagaagggcgagcagacgccgcaacccaggagggttgcagacgcctgaagaacagggaaacgtcgggggctgacccgcgggggcacccaggccccggcccagttcccgtcgccgccgttggaggcgcgtccagggggcggagcctcctgccgaggcccgcccagaaggtggctccgctcaggccccgccctcagacgagcaccgcccgccggctcctcccgcggctcgaatcgccgtctctctcctccccgccccgccgagttctagaattcgccgcgcagctgcttcaggtgctggggccaaatgcggccggccgtggcgcggctactcgggcgctctgtccccgcctggccctcaagttcggccgccctggac

SEQ ID NO: 17065 - DNA, 2300 bp, Homo sapien
ctgcgggaactgctgatggctcagggactgtcagcctctgctctggaaggtcgaggttccagggaggggcagctcagggatgccccttggcccaccccatccctcctcacttgcctttgcccagtcctggagccagggagggaccacacactatgaaacctttcatgtgctcagtgacgtggacacagatgtggagagggaacgtatgtcttcagatgttacagagctgggagggactaattctctaggagaggatgaggatccagaaggacctgtcaggctcctggaagtaatgaaatgactgttacaggaaaaaatggcaatatatgcttacaggtcaaacagtaaattgttaagaggctaggctactgggtgactttcttgacagaagttcttgcaaaacgtcagagttgaagtggaccatagcctaacagatctcagtggagtgctttctggtatgtcatgctcagcctcactgatggaaatagtgtccaaatcagaggatgtgtaatccatgttgacggtcaggaatggaccctgcattcagtcttgagatcatcccattgaggatagttagggtgctgaagggcacagtgtggggagtatgagtgttcttggaaagagaaggataaggtagctagtgatgtttgccttccaacatttgagggattttcttgcagaagagaaagcagtaaggactttttatcccagagggcagaactagaaacactagcacacatgacgtgggaccagtttcagctcagcacagctaagaattctttttttttttttttgagatggagtcttgctctgtcgctaggctggagtgcagtggctccatcttggctcactgcaacctccgccttctgggttcaagagattctcctgcctcagcctcccgaataactgggattacaggcgcccaccaccacacctggctaatttttgtatttttagtagagacgggggttttagcctggcacagtggctcacgcctgtaatcccagcatttggggaggccaaggcaggcaggtcacctgagttcaggagttcgagaccagcctgaccaacatggtgaaaccccgtctctactaaaaatacaaaaattagctaggtgtggtggcacgcacctgtaatcccagctactcgggagactgaggcaggagaatcacttgaacccaggaggtggaggttgcggtgagccaagatggagccattgcactccagcctagcgacagagcaagactccgtctcagaaaaaaaagttcgacacagaggtttctagactggccaggctggtcttgaactcctgacctaaggtgatgctcccaccttggcctcccaaagtgctgggattataggtatgagccactgtgtccggcccagctaagaattttctctttttgagacagtcacgctctgtcacccaggctggagtgcaatggcgtggtctcggctcactgcaacctctacctcctgggttcaagtgattctcctgcctcagcctcccaagtagctaggattacaggtgcctgccaccacaccaggctaatttttgtattttagtagagacggggtttcaccatgttggccaggctggtctcgaactcctgacctcaggtgatccacccgcctgggcctcccaaagtgctgggattacaggtgtgagtcaccacacctagccccacctaagaattttctgatggtgcaaatcatctaatagtggaaaggactggccgcctccttcagtaatgagctctccacccctggagttcaagtagagagactgggtgcccatttaccatggctgcagtaggagggctccttgcctggtaggaggctgaccagcagtcttctgtagtccttacagactggtcctctgtgaagctcttggtctcctggatgtctctcatcagctccttctttccttagcctcattctttttcctctttctccctcccaggcctgaagacggaagaagggagtgtcagaggcgccctgccagctgtgtcatctcccccagctccagtttcaccctcatcacccaccacacataatggggagctggagccgtcattctcccccaacacggagtcccagattgggcctgaggaagccatggagaggctgcaggtgggaagctggagctggcaagggctgggggtctgggcattcctgggagtttacttctccaaagtcaagcttgagaaagaaggaattctaggagtagcatggccccagggtaggttgtccctaccctgggtctgcttgtcccagaccatcctgaaacctacccacct

SEQ ID NO: 17066 - DNA, 2300 bp, Homo sapien
tgggggggtggatggagtctcgctctgttgtctcgactggactgcagtggcacaagctcagctcactgcaacctccacctccctggttcaagcgattctcatatctcagcctcccgagtagctgggattacaggcgcccgccaccatacccagctaatttgtgtatttttagtagagacggggttcaccatgttggccaggctggtcttgaactcctgatctcaggtgatcagcccgcctcggcctcccaaagtgttgggattacaggcgtgagccaccacgcctggcctaccgaaatttaaatttcatatgcttttagttttcacgggttaggaaatacgattcttttgttttctttgttttttgttttgttttggttttagacagggtctcactgtcacccaagctggagtacattggcacaatcatggctcattgcagccttgacctcctgtgctcaagggatgctctcacctcagacgcctgagtagctgggactacagatattgatttttttttccaaccatttaaaaatgtaaaaacagctggacgtggtggcatgtgcttgtagtcccagctgctcaggaggctgaggtgggaggatccttgagcccaggtatttgaggctgcagtgagctgtgattgtgctactgcacttccttttgaggaagacactttctcaaaaatagtaataaaaataaataaataaatatgtgaaaacctgtcttagctagcaggccatacaaaaatgggtagtaggtcagggtaatccctgagatggtcagtgagtaaacaagtacaaaatatcattaaagggccagacatggtggctcacgcctgtaatcccagcactttgggaggctgaggcgggcggatcacctgaggtcaggagttcgagacgagcctggccaatatggtgaaaccccatctctacgaaaaatacaaaaattatccaggcgtggtggcaggcgtctgtaatcccagctactcgggagtctgaggcaggagaatggcgtgaacctggaaggtggagcttgcagtgagccgagatcgcgccactgcactccagcctgggcgacagagcgagactccgtctcaaaaaaaaaaaaaaaaaaaaaaaaaagcaaaaattagccaggtgtgcacaccacgtccagctaattttttttcaaccatttaaaagtgtaaaaacagctggccaggcacggtggctcacgcctgtaatccccaacactttgggaggccggggcaggtggatcacctgaggtcaggagttcaagaccagcctagctaacatggcgagaccctgtgcactaaaaagacaaaaattagcagggcatggtggtgggcgcctgtaattccagctactcgggaggctgaggcaggagaatggcttgaacccgggaggcagaggctcgtgccattgcactccagcctgggcaacaagagcaaaactccgtctcaaaaaaaaaaaaaaaaaaaaaaagtgtaaaaacagctgagcgtggcggtagctaggtgtggtgcgtctgtagtcccagctacttgggaggctgaggtaggaagattgcttgagcccaggagtgccaagccagcctgagcaacatagtgagaccttgtctctaccaaaaaaaaaaaaaaaaaaaaaaaaaattagctggacatggtgatgctcgcctgtggtcccagctacttgtgggggggtggggagaggctgagtgggaggatcccttgagcttgggaggttgaggctgtagtgagccgcgatcgcgcaccgctgcgctctagcctgggtgacagagtgagaccccgtctcaaaattaattaattaattaaaacaacaaacaacaaaaccccagctgtgtgggctctgggctgggccgcctccccggcggagggggctccctctcaggcagaccgccagccgctgggtccggggactgccggatccggaggtgcggggacccctgcgcacctggcggctcccgggatgcccccctgaggcaggcgggagggcagcacggagacgcccctccgggcagagcccgccccagccactcccctctccaactcgacctgcctcagcaagtcctgagtgtcgcaaaagcgctagggttgcaagtggcaccagagacgtgcccttgtcccggggtccatttgagggtgagcgtgttggtgccgagctgtttttttgttttgttttgttttgttttgtttttgagaccgaatctcgttctgtcgcccaggctggaatgcagtggtgtgatcttggctcactgcaacctccaccttccgggttc

SEQ ID NO: 17067 - DNA, 2300 bp, Homo sapien
aaaaaaaaaaaaaaaaaaaaaaaaattagccaggtgtggtggtgcatgcctataatcccagctacttgggaggctgaggcatgagaattgcttgaacaggaggcggaggttgcagtaagccaagatcgtgccactgcactccagcctgggcaagagggagactgtctcaaacaaaaaaaaaaaaaagaaaagaaaagtattctcaggtgccaagccgagtgtaccaaatgcaaatgctgtaagaggaaagaaatcagtgtgggctgagcaaatgggagctccagaatatctgttgaatgaacaagctgttaggacttgctggctgtaactataatcaaataaaagaagcaaggagtcaaaaaggacacggtttgagccgggatgactggaaagtcagggtactactggcaggtgagaaagttgggttgggcagggcatattaggtttcaggcatattaacataacttctgctgggcgtggtggctcacgcctgtaatcccagcactttgggaggccaaggcaggcagatcacctgaggttgggagttccagaccagcctgaccaaaaatggagaaacctcgtctctactaaaaatacaaaattagccgggcatggtggcaggcgcctgtaatcccagctactcgggaggctgaggcaggagaatcacttgaacctaggaggcagaggttgtggtgagccgagatcacgccattgcactccagcctgggcaacaagagtgaaactccatctcaaaaaacaaacaaacaaacaaacaaaaacatagcttctgtgtctctggctcttggccccactcatcagtgtagacccacaaatccagacaaagtactcaccagctatttgtgcaaacccctaaaggatgtcttacatgtcccagtgaacgagtctggtcatctgtggactgacaccagccattttctgcacttctttattctcaggactccttccgctgagtatcagtttgtcctagctcctggcaacaaataaatgtcaggtattcttcctctgttccaaacctttcaaagctgtagagaagctgttattatagagttataaaatattaatgccacaagaaacttaaaaatcagccagtccaagcccctcatttagcagttgcccaaaatgaggcacaaaaatccggagacctcctcgtggcttggtgtagtgtccaagctgagatctgaccagcactttgggaggtcatggcaggaggatcacttgagccaggagttccagatcagtctgtgcaacatggcaaaaccctgtctctacaaaaattagctggttggctgggtgcagtggctcacacctgtaatcccagcactttgggaggctgaggtgggcggatcacctgaggtcagaagtttgagatcagcctggccaacatggtgaaaccccatctctactaaaaatacaaaaactagccaggcatggtggcacatgcctatagtcccagctactcgggaggctgaggcaggagaatcccttgaacctgggaggaagaggttgcagtgagttgagatcgtaccattggattccagcctgggcaacagagtgagatccttctaaacaaaaaaatagctagatatggtaatgcaacgcctgtagtcccagctacttgggaggctgaggtgggaggattgcctgagcctgggaggtcgaggctgtgttgactaatgatcacgccaccgtactccaacctgggcaacaagagcgagactcagtctcaaaaaaaaaaaaaaaaaaaaaaaaaatctgtagtcctgttgccctttattcacttggcttataggtgttattttgtctttcattttcttttctttttttctttttttttttttttttttttgagacggagtctcgctcttgttgcccaggccagagtgcagtggcgtgatctcagctcactgcagcttctgcctccctgattcaagcgattctcctgcctcagcctcccgagtagctggggttacaggcgcccaccaccacgcccggctaatttttgtatttttagtagagacagggtttcaccatgttggccaggatggtcccgaagtcctgacctcaggtaagcgacccgcctcggcctcccaaagtgctgggattacaggcctgagccacggtgcctggcctatctttcattttcaaagcttgtttttgagtggtggcatggggcacacccctgtactgctaatgcaaaggaatattagaatcaccatttgtgaaagaaacttggcagtctgttacaagagcctcagctatgtcatacagtttcacccaat

SEQ ID NO: 17068 - DNA, 2300 bp, Homo sapien
atgcaccaccatgcctggctaatttttgtatttttagtagagacagggtttcaccatattggccaggctggtctcgaactcctgaccttgtgatcctcccgccttcgcctcccaaagtgctgggattacaggtgtgagccaccgcacctggccctaatttttgtacttttaatagagatgggtttcaccattttggccaggctggtttcgaactcctgaccttgtgatctgtctgcctcagcctcccaaagtactgggatcacatgcatgagccaccacgcccggccggaaaatagatattctgattgaatcagagttaacaaacttcccatgcagttgcagacagtagggcaagggagttaaggattttagtaccagagtggctaaagtgatggaccctagagtctagggcctaatggcaatgatgaattcaagagaaagttttctttctgctagattgtgtgtggcatacaaacacaatattcccttctaagggtggtcactcctttccctatttcataggattatggtgaggcaaacacagaagcccgccgtcatccttgcgggaaggcaggtgaccaggcttggtaaatcacacggtcctttcccccttgattggtccatggttgagcaccagacccaaacagggctaatcatagtcctttgtaactgatatttgggaaggatagtgtactctgaggcaacattatatagaatgaaagtcttcaatgtggtgatcttggaactgacacctaaaaacaaactggctggctggacgcggtagctcacgcctgtaatcccagcactttgggaggccaaggtgggcctaaggtctgacctaaggtcagaagttcgagaccagcctgaccaacatggtgaaaccccgtctctactaaaaatacaaaaattagccgggcgtggtggctggcacttgtaatcccagctactctggaggctgaggctggagaatcgcttgaacccgggaggtggaggttgcagtgagcagagatcgtgccattgcactccagccttggcgacaagagcgaaactccgcctcaaaaaacaaacaaaaacaagctggaggccgggcgcggtggctcatgtctgtaatcccagcactttgggaggccgaggcggccggatcacctgaggtcgggagttcgagaccagcctgaccaaaatggagaaaacccgtctctacctaaaatacaaaattagccgggcgtggtggcacatgcttgtaatcccagttactcggggaggctgaagtaggagaatcgcttgaatccgggaggcggaggttgcggtgagcggagatggcgccatcgcactccagcctggacaacaagagcgaaactccatctcaaaaaacaaacaaacaagaaaacaagctggctgtgcaaaattacagaggaagtaacaaggaaaggttctgaggtgagaatgggccaagcttgctcagggaacccaggaaggctagctgcagaatgctgtttccgtggcctcggcagcttaacctaggcctttactcttaaccttggtaattcccacgcaatcttgagatttcaggccaaacgtcactcctgcaagcccttccggaactcaaagcatgtctcccttcgctcccgccgaggagagacctgttcccaggatctgcagccctgtgcttatcagacccacggagtctgtggaaaggaaggatgggataagaacgatgcgggttgggagagttaaaagggtcgcgcaaacggtccccgcgggaatgcgaagcggattctcgagttcttgagcctagagcaatgcttggggagcgacacgagggcgcagagcggcagatcgcggagcggaagttcatccccggagccgttctaggaaacccggaggactcaggtcgtcaatgattccggggctgaagtgggcatcgacgggtgcactttgctgttccagggagccggctcggcaggcggcggcgacgtggaacttgggctagggctagaaccggcgaaaagcaagccggaaaaggcaagggggcgtcggtgcgctgaccacctgttcctccagcggagtgcgacgcgcgccgattggctggagtgccgcccgggtaccggaagtggccgatgcccgtcgccagtgacaccgggacaacagctgcgggctctgtgcgagcggcccagcagcgcggagcctcagcggagtgagcgagcgcggggcagtagcggcctgcggtgagacctcattccgtcgcggctgtgggggtaggcgggggctgggctcccagctccctagagagccgagcggaa

SEQ ID NO: 17069 - DNA, 2300 bp, Homo sapien
cataaccctaggaagacagtaatgataaagatgtcagtatgtacatataggaagagagaaggagagtttgtttttgtcctaactatttggaaaattgtaagcttcctaagagcaattttcatctgattcagtgtatagtacttagtctcaggtcatgtgcagatatgtccttcccaaatgcttaccacaagataaatcagaaatcttgactggaataagcttctagttcctttgctttatcatgagaggttccacaccacaggaaaatcttgtaaatggtggaagctgcataaagcaccatcatcatcacaaaatggtgtccttgtgtgtcctgtttagcagcaccgagaatctaatagctttccccttgtctgtttttccttactatgaattgtgccaggggaacagtaaaatgggtatgatatcctgaactctagggtggatgtctttctgggacagaatctaatccaaaagtctgcaaatggacttgaggttttcacattagtataaatgtcaatatgtagtttagggaatttgccttattcctccattcctagcaaaattagatacagaagcagctaattaaatcaggaaaaggaaactgacagtaagtcataggacccattgtcttctctcatgtaaaagtagaagttgtgattcaatctgttctgtaggatttaaaagtataatggcacattgaagtttgacatactgaaattcaggctctgtcaatttcatctctgtaacctttattgtttctgagtcttgagttttctcatctgtaaaatcaagataatgacattaatacaatcccttgtggagcaactgtgaagactaaataagacaatttcattaagttcctggcatagttctagacacgtagtagacattcaacaaatgataactatttttatccatagctcctacgtgcagtaattatcaatggcactttgaaggaaaaaagataatatatcccccagccatgggggtgtcaatgcgcattttcaaggatactatatcttggagaaacaaatttaataatctgagaatctgagaactgttactatggtactacacagttgaacaacaatttttcttggagagactaggattaagctattttataaaagtattgagagactggatcaatcaatatcctgcaaaattgatagtgagataaatttatttttaattaattttttttttgagacggagtctcactctgtcgcccaggctagagtgcagtggcacaatctcagcttattgcaacctctgcctcccgggttcaaacgattctcctgcctcctgagtagtggggactacaggcgcccgccaccacgcccagctaacctttttgtatttttaatagagacagggtttcaccatgttggccaccatgtctcaaaaaaaaaataaaaaataatcggccgggcgcctgtaaacccagcactttgggaggccgagacgggcggatcacgaggtcaggagatcgagaccatcctggctaatatggtgaaacgccgtgtctcctaccaaaaaaaaaaaattagccgggcgtggtggcgggcgcctctagtcccagctactcaggaggctgaggcaggagaatggcgtgaacccgggaggcggagcttgcagtgagccaagatcgcgccactgcactccagcctgggcgacagagcaagactccgtctcaaataaataaataaaataaaaaataacaacaacaaaaaaacaccaacccctatttcccccatcgcaataaaattaaccttagaattcttttttctcctcccctccccctacgccccaggaattgtacaggctagtggttggggaatattttttcgtggaagggaccgtcttccttagctgtggccctctcatcaggtctgggaagaggtaattggaaaatagaactcatggagaagtgttaccacaggccatggacaaggccagaatttccctgacatctgtccgccagcaccgcccttcaggtacaattccacaagagaccccccaaacttgatgaagtcacccgcttacaagggctcactctccacctgcgcaaggactgcaattcccaggggcctccagggcacccggccgctccagtccagtcgtgcaggcggcgcgctctttctcgctccgctcaagtccaggaaccggttcccgggctcccagcctctcggcagcgcccacgcgcctgggccaaagtccgcgaacggaagccggcggcgaggaggattctgggagttggaggccgaggctgcgacctgcgcaggcgcaaacctgcccct

SEQ ID NO: 17070 - DNA, 2300 bp, Homo sapien
ctatgaattctatgatgtcgaataaagtgtgagctctgattacaagtctttgaacattcattgcattcacaaagtttctttccactgtgaattctttgatgctgaataagttgtgagctccccttcaaatctttcccacacccaatgcatttataaggcctctctctcaccttgtatggattctctgatgttctgtaaggactgagttctggccaggcgcagtggctcacgcctgtaatcccagcactttgggaaaccgaggcgggtggatcagctgggctcaggagttcgagaccagcctggccagcatggtgaaagcccctctctactaaaaatacaaaaattagccgggtgtggtggtgggtgcctgtaatcccagctaattgggaggctggggctggagaattacttgaacctgggaggtggaggttgcagtgagccgagatcgggccactgcactccagcctggcagcagtgtgagactccgtcccaaaaaataacaaacaaacaaaaaagacaccagagggctttgggtccctctctctctgccatgtgaggaccctgtgagaaggcagccagggagctctcaccagaacctgaccatgttgggccctggtcacagccttgcagcctccaaaactgagaaaataaatttctgttgtctggcatccagtctatggtattttgttacggcagcccgagctaagacagaggaaaactgggggctgatgtgacggcggggactttaggtagaaggaccccacgtcaaaagtcaaagctaaaaattctggaacgagccaggaaggcatcaggacgtctcattttatttgctagaggcatcttttggggggtggggcggtgggtgggtggaaggagatgtggccagtgagcctctgacttttaattgagttatttcgaaacaaggaacagagggccggatgtggtgggtcgtgcctgtaattccagcactttgcgaggccgaggccagtggatcacctgaggtcaggagttcaagaccagcctggccaacatggtgaaaccctctctctactaaaaatacaaaattagcctggcgtggtggggggcgcctgtaatcccagctactcgggaggctgaggcgggacaacagctttaacccgggaggcggaggttacagtgagccgagatggcgccactgcactccggcttgggcaacagagcaagactccgtctccaaaaacacacacacacacacacacaaaacccaaaacggaacagaggcagttctgtattccagagggattgatttgtgatgcctgctcaaaactcaagaagccaccaccctgatactcatcaaaccccggagaaatttcgtttttagagtgtcagaaggccccatgaataaccttccagtcactgagggaggtccctactcagcacgccccggtctccttcactctcctgcactcgtgcctcacagatggcctcatgcgcggactggcggtccagcctcccggggacacagcccgggcgcaccccgcgccgcctttggccactgaggcggtcctcgaggcgccgggctagggaaagcctccccggccgtcaaggctgggatagcgccgggggatcggggcggggtgcgtgcgccgaaagggcctcaaagctgtagggctggacggcacaaaggggcgcaaggcacggaggccaggcagaggggacagctagcggcgcggcgggacgggcgggccccgacgcccagctccaaatgcgtggccgctgtgggagctcgtctccaggcgcccatcagtcttcccctcactcgacgctaccttggcggccgcgcccatgctgtccccgctccaactagcagtcaggaggggccgcgggcagcgctcgagacgctcattgagaggacttcccgcctgcgggctctctgctcgacgccactcccggccccgctccgggcggcccccctcaccactcccggccccgctcccggcggcccgcctcaccactcccggcttcccggggcttaggcccgcaccatcgagtcgaaccgagtcctcatgttttcctagacaagccgctgggggagaggggaaacacttctggcccatgtgagccgccgtctcgtgtggtgtctgaggggcgtctacctggagtcactgagccgacgaaagggaaaaggccagtgcctgtccgggaagagctcagcctagtggggcgggcgacaagttacagttgctgccttacgatggccgtggcccgtggaggcactagaccctcaccaggggtctgtcaggaaaggcgggcagatacgt

SEQ ID NO: 17071 - DNA, 2300 bp, Homo sapien
agacagtcacagatcatcaggcattaggttctcataaggagcacgcaatctagatccctggcatgcgcagttcacagtagggttcatgcttctgtgagaatctaacggcaccgctcatctgacaggaggcagagctcatgcggtaatgcgagggatgggaagtggctgtttctacagatgaagctttgctcactggctggctgctcacctcctgctgtgttgcctggttcctaacagttgggtatccctcatttacccagcaagataaatacattattatgtcaattgaaattattcaccttgaaccacccaaaattaccttgcatacctacacccacccaagggtcccgcagcacactttgggggctgtagatagtaagcctggagctccgtggagcattccatcccttcaccatctgtgggctaacaggctgcgttagtttcccagggctgttttacagtaccacagactgggcaccttcaacaacagaatgttactgtctcacagtactggaggtcatgagtgtcagtccaagatcaaggtgtcaccagggtgggtcccttctgaggctgtgcaggaaggctctgttccaggcctgtctcctgatgtgtgggtggacgtcttctccctgtgactcttcattaagggtgattctggtgagggctcagaagaggagacttggacaaaatgttggtagataaatgtgtcagtggaaaccagagggtagacaggaatccatccatgcccagggctttctggggacagacctgtccaagcagctgccattcccaaccgagttctgtttctggaaagccaggcaacagctggggctgggccctctgggatttgtttagtgacccgattatgtgggaagcctggactgggtggttgggtggggggtggtaccgcccaacctcattgcatcactcacttcccaggccctgtcctggttctcagccaccctgtcccagtgggtgcttcagcccactcactgaccaagtgagggactgactcgaggttacagagtgctgtgtttatgtgacctgagagtatgtgtgcacagactgtgcctgcagtgtcctcgtatagttgagcatgtccatgtcctgcccgtgggtaggcagcctgtccacacatgcctaggagtgtgactccgtgtcctggtagggtcccctgattacttctatgggtgcgtgtttgtgcgtcttgttaggggtccttgttaggggtatggaagattctgccctgggtgcccttgatcacgtgtgtgtgtgtgtgtgtgcgtgtgtgtgtgtgcgcacgtgcgtgcttgcgcgcgagcatgcattagggggtgtacggtgttaacagcatcctcaaccaactctgtatgtgtgcatgtttgtgtgtgtgtgtgtgtcctacaggtgtgagccagtggatgcttccactacgtgtctgcacacgtgtgcgtgcacttgcattgtccttgcacacctgcgtgtgtcccgtgagagcgaacgaagcccagcatgtgctggcacctgcaggaacgtgtgagtatgcgttctgcgggtccctgtcctgctggctccccgcttgtccccagggagtgcgcacacggggtcccaggccggcgtgcccccccggtgtgagtgcgagtgagtgtggccccacgcagctctctccgctctgcactgcctgggcagcccgcacactcaccctgcgtgtttgctgccgggtgacgcgggctgggccggccccctgcctgcccgcccctggcactcactggcgctggccttcacggaggccccgccgcgccacgccacgccacgccgggcctgctgagccgcccccgggccggggtcactccgggccaggccgtgcccgggcggggaggcgctgcctctaccacccccccaccggcggtgcggggaaaaggcgaccatttgtatccaggagcatgtggccaccgacgtgtgccccagccccacccgccccatccagtagatctctggctacttcccccacttcccgcgggacctgccccatgacgcccccgcgcgcccagccactgccagcgccggccgctgccgccgcccctctgacggcgcccgcgacgacgacaaggatggggcccatctcttcggagcctaaggatccagcccaggtccagccctgcgcagccgcccaccaagctgccagaagacgagccggacgcccaaggctacgagaggacgattgcagtaagtttccaactcgccgacttcgccccctccactggctccggcttggcggtccccggcttcggggtgctctc

SEQ ID NO: 17072 - DNA, 2300 bp, Homo sapien
gatcctccccaaaagaggcgtcggttttttatggatccttgagcccaggaaggcaatagacaagacatcacggttcaccagaagagacaacaaaaatgtagtgaggaagggctgtagtcaaaggttttatgctccatgagaagggattctcagggctctaagcagcaggcagaagactttattgtatgtgtggttaggtgacggtgacctacagttttcactgggaactgggatcaagagtaactcgacctcctactcatgcacgtctctctctgtctctttgcgttttgtgtctctctccccatctctcgccctccttatcctctcagcctcctctgtctctctcccaatttctcttcctctctctcattcccttctcctcatctctctttctctctccttttccagttctctctctctcctcatctcgcttcatgccactgttcaggctcctggggctccacgtggacggctggacacaggactcctaggctaattttcacggcacaagcacagggctgcaggaccttggtcccccacctcccagcaccctcaaagtgagaggtgtggggtgtgcccatgctctcctgggtgggcgccccacgctccaggaagcagaaactgcaggacaaagctggcgcaagtgacatgcccacgtggctgccagcttccatcttgggatctgctaaggccaaagcagaggacacctgcccacgactgaccccgcaccagggtggggggaggggtgggtttggggtgggaatggggatgggagccgccactgcaaagcagtccctggctggcttcctgccctgcacccagtcatgcaaggcctcccgtcccacccctgcccctcatcacctccacccctaggctgtccagatccaggctccagaagtctcccaggatccaagaactaagggcaaccactgggctccgccgcccctagtccatgagtcagccacccctctgcaggctgacaaaccttggctgtcacttatcttccgccccaaaccagccccagccccatcctgctgcaggtctgtgtggctgctggagaggctgggctcctttcctcaccccgaggctgcctaatatgctttctggatcctggagaaaactgacccactattctcatactggtgcaacttcttccaagacctcaaaactggacaacgtgaacttgtcttgtttcttgtctcttcttgctagggctgtcattgggacagtctgagatggggagtcgggggagacaatggatgaatggatggatgaatggacagcagtccagggagatgtccctgtgtgtcctgaactgggcccttcctccagtgagaagccttcctgagtgagtttatatagtcatcccttggtatccatggaggattagttctagggtccccggggatgccaaaatccatggatgctcaagtcgctgacataacatgacctagtatttacatataagctatgcacattctcccgtatacattagaccatctctagattattcattatgtgtaatacaatgcagatgctatataaatggttgtgatactgtatttagggaatgatgacaagaacaacgtctgcacatgttcagtagagacaaccatccgatttgttttctgaatattttccatctgctgttggctgaatccacagttgcagagctcccagatacgagggccaagtgctttgagagtagggtgggtgaggttgctaatgagtacaggggagcaggtgttgatcagggggaccctgcactgggcatctggacgccctgtctcaggacttgagactccgtttggatggcacaggcagactaagcccaggtcaaagccctccccttggatgttcattttatcccaagctctttctggaccctggaatttggcatcccctaggccctgggtgggacagctgagccaggttttagataacatgtctagaaaagtgggcccctactgtgtgcctggcactttccgcacatgatcctctagctagaatatccaagggtcatggagagaaatacccagttaaaatatcagaaatgaaaaagtgataccattagagacactaaaaagacgattagagatactaaaaataccattaagtaatagtattagcttttgtattctgagattcaacagcagcagtcacttccctccactcctatgtgtatcccaggaccaccctgggcggggagggctgaggtcagggaggtctgaagctggtcctgggctccgggggtgacagtgatgaggaactgggtgcacacatgagtggggcagccgggc

SEQ ID NO: 17073 - DNA, 2300 bp, Homo sapien
atacaaatgtgattacagagaaaaccagtaactaaagaaagataatcaaatacatataattagtgttcctaaagaaaagagcaaacacaggccgggcgcagtggctcacacctgtaattccagcactttgggaggctgaggcaggcagagtaccagaggttgggagttcgagaccagcctgaccaacatggagagaaatcctgtgtctactaaaaatacaaaattagctgggcgtggtggcacatgcctgtagtcccagctactcggaaggctgaggcaggagaatcgcttgaacctgggaggcggaggttgcagtgagccgagatcgcaccactgcactctagtctgttgacagagcgagactctgtcttaagaaaaaaaaggaagttggccattaattcaaataaaaacaaacagcatgagccaagaaaatgtgtctacactcaaagctggcctaggggccactattttttaacttaagaaatgccactatttcatgcccagttcttagtatcttttaactatgtcaatcctttttaattcacattcatgggcacgcattaggtgaagctaaacaaagaatctatgcctagaggaagactcacacatgaaacaaggtagtaagagcctatgaattagatgctaaaagcgctgcggtggcaatccgggaaggcttcccaaaagaaatgacttttgaagtgtgataccctactttgttttaacctgagtgactctctcctagcagagagagagccggacagactccattttagtttctccactggcagccccctttcacctccctcccttaaggcatagctagtgtaaactgactcaaagcacgtccaggaatgcacctactgataagatattgaggcaagctgcaccagcagctcctggggacgcgctcggtggatggcaagcaaaacccctgcatttatctctttgtgatagtttaagcccgtgcaattggaactgtttatattttgtaactgcatttgtaaccaattaatttttcaactttttgccagttctgcttctgtaaaaattgcttcagctaaaatcccccctcccctatttagaccacggtataaaaacaaaactagccccttcctcagggccgagaaaattttgggcgctagctgcctctcggttgccggctaataaggactctttaatttgtctcaaagtgtggcgtttctctgtaactcgcttggtcacaatagaagctgctcctaaaagcaatgtagacccttacaaagagaccagcccacctaaatccctcccttgtttgaactctaacagtcctaatattttagactgagtagtagaacatatatgaacaatacagttcattcctgtggcttagtctagcctccccagcggggtcactcgtgggatgcaaaaaccagatttggttacatatacaaatatacctggcacagatgtgggcgaggaataatcaatttatgcctgacggtggattctgggcctcgggaagatgccgttagcggtacccacaggagggaactggaacaggcaagagtagcgggacagggccgggaatggggcacgccgagaccaagaagccgaccgagagcaagaaggcccagtcatgcgcacccggcgcctacatcctcctgcggtcccccaggcctctccccataggcatatgagctctgctccactcctcgcttgccggtggacgcaggcgccgcggccgccagctctgtgaacgcagcggggtctcacctccaggctacccccaacctcccgctcggtcgggggcccctccacggccgctatcactgggtcgcggctcctagcgccaccatcttggaccccgcgcctgggccaggcgagaacttccggtgcgctccccgggactgcggtcccccagtccgcgccccgcccagccgtcccccgtcggctccagccaatccgcgcgcgctcccctggccgtctcccaccggatcaggtgtctcctctgcgcagactcctccacgacgccagtcggcgctggcgtagctcggctcagcccggcggagtctgacttccggagggccagcggcgcgctggctggttaccaaggttaccgccgagaggccgcgtcctcagctggtcctagacatgcgtggcgtcggggctgtggcacggtcgggtccggggtgagtgaccccttcaagtaactacgtttttgttctgcccttttgttttgtttttgagatggagtctcgctctttcgcccaggccggagtgcaatggcgcgatctcggctcactgcagcctccatctcccag

SEQ ID NO: 17074 - DNA, 2300 bp, Homo sapien
tacagacggagtttcaccatgttggccaggctggtcttgaactcctaacctcaagtgatccactcgcctcagcctcccaaagtgctaggattacaggcatgaaccacctcgcccagcctgtacgattttttttaaacccatttattttattttatttatttgttatactttaagttatagggtacatgtgcacaacgtgcaggtttgttacataggtatacatgtgccatgttggtttgctgcacccatcaactcgtcatttacattaggtatttctcctaatgctatccctcccccagccccccaccccccaccagccctggtatgtgatgttccccaccctctatccatgtgttctcattgttcaactcccacttatgagttctaactcatttttgcctcccagaggatcccggtgtcttagctgtggatctctcaatacttgcaggtcacagggccacagaggctgggcctctaggagcagaggacacggaacagtctatttttttttttatttttttgagacagtgtcttgctctgttgcccaggctggagtgaagtggttccatctcggctcactgcaacctccacctcccgggttcaagctattttcctgcctcagcctcccgagtagctggaactacaggcgcctgccatcatgccagttaattgttttgcatttttagtagagacgggggtttcaccatgctggccaggctggtcttgaactcctgagctcaagtgatgcggcctcctaggcctcccaaagtgctgggattacaggtgtgagccaccgtgccctgccttaaaaacccatttctaaattccaaagagtaacttctattagtgcactcttattaagagaggtaaagcaaaaggaactataaaagcaactataattgaagtctatttgagacatggctcagtatttcaatgaaaatgtaacacagtcaatgaaatactatctcaaatgtagttgtgcaaattaaggaatagttggtagtagctgcatttacaaattcaagagtgaaacgtgcataattcgtgcaacccaaagtttgggacagagagatatgagaagccaaagtgactagtgcactgacagttttgcttcggaaaggcttggggttggacatcttacatctttacatacatatataacccttaccacgatcctacgctacgcgaaccaacatcatctccatagtaataactaatatgtatctggccttcgccacatgcaaacttcacatacatatgtcagtgaggtcggtcctattatttacctcactttacaaatgaagcaacggaggcgcgaagaagctattaataggtaacttgttcaaagtcacatagcccctaagtggtggggcaaggattctgagtgtctgactttctcacttcggaacttacacttttaaacattaagctgtccttgttgggatctgtatcgcctagcctttgaccgggcattgcaaatagaagtcatcaatgaatgagaccacaaatgcatgcagggaacaataacaaaagatgaaaacagaacaggcagaacaggagttcgagactagcctggccaacatggcgaaaccccgtctctactaaaaatacaaaaattagcagggcgtggtggtgggcgcctgtaatcccaactactggggaggccgaggcaggagaatcgcttgaacctgggagatggaggctgcagtgagccgagatcgcgccattgcactccggcctgggcgaaagagcgagactccatctcaaaaacaaaacaaaagggcagaacaaaaacgtagttacttgaaggggtcactcaccccggacccgaccgtgccacagccccgacgccacgcatgtctaggaccagctgaggacgcggcctctcggcggtaaccttggtaaccagccagcgcgccgctggccctccggaagtcagactccgccgggctgagccgagctacgccagcgccgactggcgtcgtggaggagtctgcgcagaggagacacctgatccggtgggagacggccaggggagcgcgcgcggattggctggagccgacgggggacggctgggcggggcgcggactgggggaccgcagtcccggggagcgcaccggaagttctcgcctggcccaggcgcggggtccaagatggtggcgctaggagccgcgacccagtgatagcggccgtggaggggcccccgaccgagcgggaggttgggggtagcctggaggtgagaccccgctgcgttcacagagctggcggccgcggcgcctgcgtccaccggcaagcgagga

SEQ ID NO: 17075 - DNA, 2300 bp, Homo sapien
tgttgccaaattgctctccaaagtggctgaagctaatttattattttttttaaatttattttgagatggtgtcttgctctgttgccaggctggagtgcagtgtcgcgatcttggctcactgcaacctccgcctcctggattcaagtgattcccctgcctcagcttcccgagaagctgggattataggcgcgcactcccacgcccagctaattttttgtattttagtagagacagggtttcaccatgttggccaggctggtttcaaactcctgacctcgtgatccacccacctcaacctcccaaagtgctgggattataggtgtgagccactgcgcctggcctttttttttttttttttttttttttttttcttaagaaggagtctcagtccatctcccaggctggagtgcagtggtgcaatcttggctcactgcaccttccacctgccaggttcaagcaattctcctgtctcagcctcctgagtagctgggattataggcacgcaccaccacacctgactattttttttatatatttagtagagatggggtttcatcatgttggccaggctggtctcaaactcctgacctcaagccatccggcctctcaaagtgctgggattacaggcgtgaaccacctcaactggtcaaaagctaatcttaaaaaacaaaaaacaaacaaaaaaaaccccaaaaataccaggccgggtacggtggctcacgcctgtaatcccagcactttgggaggcctcagtgggtggatcacaaggtcaggagttcaagaccagactaaccaatatggtgaaaccccatctctactaaaaatacaaaaattagctgggcatggtggtgcacgcctgtagtcccagctactcaggaggctgaggcaggagactcacttgaacccaggaggcagaggttgcagtgagccaagatcgcgccactgcactccagcctgagcgacagagcaagactctgtctcaaaaaaaaaaaaagaaagaaaaaaaccaaccaaacaaacaaacaaaaaaactggctgaggaggacaaatcacttgagcccaggaatttgaggccagcctgggcaacatggcaaaaccccatctctacagaaaataattttaaaagttagttagaagcctttactaacttaggggaaaaaaaaattagccaggcatggtggtgcatgcctgtggtcccagttacttgggaagctgaggtgggaggatggcttcagcctgggaggcagaggttgcagttagctgagattgtgccgctgcactccagcctgggtgacagagtaagaccttgtctcaaaaaaaaaaaaaaaaaagtacatatccttgatgtttttgtcgttgtttttcccaaatctcaaattgtaaagaattgtgaaattattagactagtaaaagaaaaaaaaataaagtagactagtgatacaatacaacagtgagttgctgtatgaaatgttcattttcttttctaaacaatactgtgaaaagcagggtcacatttatcttaaatgttctcagaggaagtttttcttggtcactgagaatggctttgtacagtatcaacattacatgtatcggaaaatttatttttgtttgggggctcattggggataaaagtgtacaagttatgcaaataaaccttttttaacatcaggggaatttcgttattcttaaatactaccttctgcaatttttgttaaaaccatgttccactaacacctaatttgtaaaaaaaaaaaaaaaaatacagagggatctagtgttaaaacaacttaaaggctgttagtttatagttcactttgtaaatgagagtttatttttaccagtttagggctttttaaaattattcatagaatatttaattgttcaagtgtagctgatctaaaactttaatggcattaaattttggcaatggaatatgttgatcaggctgggcgcagtggctcatgcctgtaatcctaacactttgtgaggccgagacaggtggatcacctgaggtcaggagttcgagaccagcctgaccaatatggcgaaacccgatctctactaaaaatacaaaaattagccggacgtggtggtgggagcctataatcccagctagaaaaaaagaaatacgttggtcaatatgagaggttgagttttacagttgaaggggaagggtgcagcgatattaattggctgtttctgacagtagtttggcacatagttgtatgtacactctgctccagtaaaatgaaatgcgaccacagtcaacggttacctatttatgctggagggtgtttggc

SEQ ID NO: 17076 - DNA, 2300 bp, Homo sapien
caggcttgaacttgctgtgcaaaaggcattgttagaaatagtagggctacagagtttactatatcacagctgaactgaggtccttaaaggttagcaaaataatttattgagtaatttattgaatgaatgaatgaaacacaaaccaagaagtcacagctttgttagcctaggatgagctctatccacagaagcatttattcacccctcagaagagaattttttttttttttttttttgagacggagtgttgctctgtcaccccggctggagtgcagtggctcgatctcggctcactgcaacctccgcctcccaggttcaagcgattcttctgcctcagcctcccaagtagctgggactacaggcacctgccaccatgcctggctaatttttgtatttttagtagagacgggatttcaccatgttggccaggctggtctcaaacgcctgacctcatgatccgcctgccttggcctcccaaagtgctgggatttcaggcgtgagccactgtgcccggcctagaagaaaattttaaattggcttttaggaaggttttttagcagctaaactttggatgagcctaagaagaaagagttcaggccttggccaggtgcagtggctcaactctgtaatcccagcactttgggaggccgaggcaggtggatcacttgaggtcaggagttcgagaccagcctggccaacatggtgaaaccctgtctctactaaaaatacaaagattagccggatgcggtggcacacacctgtagtcccagctacttgggaggctgaggcaggagaattgcttgaacctgggagtcggaggttgcagtgtgctgagattgagccactgcactccagcctggcgacagagtgagactgcatctcaaaaaaaaaaaaaaaaaagaaagaaagaaagaaaaagaaaaaagaaattagtaaacactgcaaatcaggaatcttctgagccagatgttttgttttgtttgtttgagatagagtcttgctctgttgcccaggctggagcgcaatggtgtgatcttggctcactgcaacctccacctcgcgggtccaagcaattctcccgcctcagcctcctgagtagctgggactaccggttcacaccaaaatgcccagctaatttttgtatttttagtagagatggggtttcaccatgttggccaggctggtctcgaactactgacttcaggtgatccacccgccttggcctcccaaagtgctgggattacaggtgtgagccaccgcacccagccagagcccggtgtttgttaaatttaccagacatatatcagacattatcagatatttatcagacatatctggttatcattattactgaaatggataacaactcattcgctctgggcaaatacaatgcacatccgtttgcctatttttactaatgtgactgctcatttgagtcagaaccagccaattcaacaaaatggctaattggtttccccactccaacccccatggtcagaggccgtgggcctcgctgggagttctgtctcacagtattgcacgaggggacccaactcagtcaaaatgctccactggccacatttctcaaggtcgccactcacacgcctttagaaacaggaagcctgtcccttgcctcctccaagcagaagatgtctcagcagttccaaggtgcacaggagctttcaagagtcaccttcatggtgagatggtgagtttgtcacacatgagctggtttcttacctggatctgtctctgcatgggagctggcgtcctgtcgctcttcttgagactgaggttgccacatccaggaatgctcacggcaaactcgtctgtggggacaccaaacccacccccactgccaagtctccaccctggcccctggcccctgccaggaccccctaccacaccatgagggtcctctggtaggccttgcgggagcgacacggggcagtgagaagattctggcttctggacagccgtgggtcatgagcttccctggaaaagggatggttgcctagagatgacgccagggtctctgccccgtgggctgactagaaaggggaagtggtcaggatggggctcactgtctctagcagtgggtgaaggcctgtgagtgaggaatgcctctcaccagctgtgcctgagctgcagcactccagccactgctgtctccttagctgctcacatatggatactttcacagttcaggtaagcatctcagctttccaagggacagtttcctgctctcttcacagcagacatctgccagcgctggcatcagggcgtgtccctgggagcca

SEQ ID NO: 17077 - DNA, 2300 bp, Homo sapien
aaataaaacaaagctgccctttagcctccctttttttcagtgagaaataatcattttaataaaagtataccttatttaaaacaaatgatttaaagaaagtagaaactgattctaattagtggattttctgattattattattattatttgagatggagtctcgatctgtcgcccaggctggcagtggtgcgatcttggctcactgcaacctccgccttctgggttcaagcaattctctgcctcagcctcccgagtagctgggagtacaggcgcctgccaccacacccgactaattttttgtatttttagtagagatggggtttcaccatcttggagaggctgatcttgaactcctgacctcgtgatccacctgcctcagtctcccaaagtgctgggattacaggcgtgagccactgtgcccggcctattattatttttttattatactttaaattcttggatacatgtgctaaacgtgcaggtttgttacataggtatacatgtgccatggtggtttgctgcatctatcaacccgtcatctaggttttaagccccgcatgcattaggtatttgtcctaatgctctccctccccttccccccaccccccacaggccccggtgtgtgatgttcccctccctgtgtccatgtgttctcattattcaattcccacttatgagtgagaacatgaggtgtttggttttcttttcctgtgttagtttgctgagaatgatggtttccagcttcatgcatgtccctgcaaaggacatgaactcattctttatgctttcactttagcttcttttagggatgtctagactctgccatagagagaatggatctgggaaagagaccacagcttcagccatctggaaagggaattctggggccacaagtattcagaacttggtcctgaagtgccaaaccctgtggactccctcatcctggggtgggattgctgggtcttaaaatgtacataattcctgatgctcctctctgatttcaaaatagctttttaggccgggcgcggtggctcacgcctgtaatcccagcactttgggaggctgaggcaggcggatcacgaggtcaagggtttgagaccagcctgaccaacatagtgaaaccccgtctctactaaaaatacaaaaattagccgggtgtggtggcgtgcgcctgttgtcccagctagtcgggaggctgaggcaggagaattgcttgaacccgggaggcagaggttgcagtgagccgagatcgcaccatggcactccagcctgggtgtcagagtgagactctatctccaaaaaaaaaaaaaaagctttttaaactacctccttggcatggggcactccaggtgtcgaaatcagacggggagtggtgattagaggggagttcctaaagtatagggcccaggggcccaagtataagggccacactttgtgtatatgatttctcctttcctgccatgagtgcagggtctgtacctggctgtatctccagcatctatcacgactgaaaacccaaacgtatttgctgaatggatagtatactggcctctgcaccagaagacctggggtccaggcccagtactgtcggaaacagttcttcatactttattacctcgtttaaacttttcttagccattatattgataaaaattccaagaggtgaagtgactctcccaaggtcgcaaagctagaagaggtagaggctggaactgcaccccgccatcggtcctcctctcttactcatttttttttttcccctcactgtgctggggtggagaaccgggaccggcaccttcgagaggccaggcctctgctgcagcccctcttctccagctccgctcggcactcagcctccccgcgccgctgggtcaggcgcccagctccgccgaaaccctcccctcccgccgcgctccctccgcgctccctccgcgctccctccgcgctccctccgcgctccctccgcgctccctccgcgctccctccgcgctccctccgcgctccctccgcgctcccgaggccccgcccctcccctcgggccaacgtcacgtgccgccccatccccctgcgcctgcgcactgcttatttcccgctgtcaggatgaggaggcggaggtcggcggtcgggtccgtctctgcccgcggctgtggcggcgccggcggatccagccttagcggtttctctctgggcggcggcggcggcggctcggttgacgcctcctccgccagctgagcccgcgggagcccaggacgccgcttccccgcccatccccgctccccgaggccggccgcctggtcatg

SEQ ID NO: 17078 - DNA, 2300 bp, Homo sapien
gagcttctgaaaaggacatagcccctcctcctgaagaatgccttcagctcctcagcagagccacccaggtgttcagagagcagtacattctcaaacaggacttggcaaaggaggagattcagcggaggtatgatgtcctgtgttcacaaaccatcgatccctggctggtagctgatgctgtatggtagcctagacctggcttctgaataaactctatttctttttgtttttaaagggtcaaattattatgtgaccaaaaaaagaaacaactagaagatctcagttattgtcgagaagagaggtaagtgtcaaaaataagaagaatacaataggtcagtaagactggaaccatattctcaccctaagatgctgagccacattaggtggtttcagcatcaaggggtggacctcaagagtctcttgtgtcttacatcattaggaaaagtctgcgggaaatggctgagcgtttagctgacaaatatgaggaagctaaagaaaaacaagaggatatcatgaacaggtcagtgggctgtataacatttagttacctagtcaggtactaacaacgatatttaagaaaatgggcattggcaggtgcttacatacctacggaactgaactgatccccctgcctctcctctgaagtatatgttggggaaaacatgaggctctcccctaacccttcctatggggcctacttcagaaacaccagattcatgaattatgagcttgtgattatgtttctcctaattagtagagaccttaaattgagatgtttgcttgccttttctaaaggatgaaaaaactacttcacagttttcactctgagctcccagttctctctgatagtgagcgagacatgaagaaagaattacagctgatacctgatcaacttcgacatttgggcaatgccatcaaacaggtaggaatagatccaaactagctaaatttggtaatttttcttaaagcacttattctacagaaaattttacaaaaatgtaaaaagaacagattcaaatagatactgtgaaaatgtgtggcaaaccactgccaaaatatctattattttaatacttaaggttactatgaaaaaggattatcaacagcaaaagatggagaaggtgttgagtcttccaaaacccaccattattctcagtgcctaccagcgaaagtgcattcagtccatcctgaaagaggagtaagtaaatacttccaatcagctattatcgtgagatagtttttcctttacagtatgccagaatcaacctgtcttaatagaaacctgaatcttggtatttgcatgtcaagtaattactgggatgagagccacatgatacatagggacttaagaaatgactatggtgggaggattgaaagggatgaccttctagtaacatgattttgttgtgtggccaaaggtattttacagtaattatgttcaaaaatatttccagtacttgcaccgtttgccaccttaaatgaatagtgaacactattgctatccacctgaaaccttcagctgttaattttagcaaagcagttcttagatgtttcaacattaccagtttaaattcttaagaatccatataaatggtttattataattccaaaagtgagtgactttacaattttacaggggtgaacatataagggaaatggtgaagcaaatcaatgatatccgcaatcatgtaaacttctgacaccaccaggagctgactcacacctgaactgaacaccattgaaggcttaaacccatattgtaaaacaggtagaattatctaatttataaaaaggtgttttgatgacctttggtgtggttcatctttttaaatatgttgttttataataattgagtaaatgcttttatttaaaatttggaatgtgctttataactcaagcctacagttgtgttcagcaaggactcaggattatttcacactgcacactgccagaacctccctgaaccctattgagttttctccatatttgagcaagttagttattcttgtgagctgtgttttaaagtagcagcaccagaaacatgactctgaagagggatagaaccctaggattcaaaggagaagaccacacagtgtacttggcagcagcttttttaatttgaacactttcttcttgaggacacaccttcagtacagttaacaaatggttacacctgaaatctgctgagagcagagctcaagatccacaattgcaaaggccactgctggctcacttcctcacaagctgtattacctttcagagctgagtgaggctgtgctctacgtcccaatacttgttac

SEQ ID NO: 17079 - DNA, 2300 bp, Homo sapien
atcctagcactttgggaggctgaggtgggtggatcatttgagcccacgagtttgagaccagcctgggcaacacggtaaaaccccatctctacaaaaaacacaaaaattagctgggcatggtggctcactcctgtagtcccagatactttgggggctgaggcaggagcactgcttgagcccaggagttcgagactgcagcaaccaatgactgcaccactgcactcccacccagacaacagagtgagaccctctgtctcttaaaagaattttttttttttaaatagggacattaccttggattatccgggcagacttaatgttaccacaagtttctttaaaagtgaaacagagtgatacaacatgaggactcaacccagcccactgttgctggctgcctttgaagatagaggaagagactacaagccaaggaatgtggcaggagctgaaaaagggtaggaaatgcattctaccctagagctttcagaaaggaaaactgctgtgccaacttaagcccagtgagaaccatgcaggacttctaacctacaaaactataagataacaaatttgtcatgttttaagccactaagtctgtgatgatttacaacagtagcagtagaaagccaataacggattcagtctttttaccattaagcattgtgttggttccaagttttttgtagatgaaaagtttcctcactagtttgaggaagttcctttctattaagtttgttgagtatttttaacatgaaaggctgctagattttttttaactgctctcactctgtgaataattggtattaattcttttttttaatttattttttattttcatttttgagatggagtcttgctctgtcacccaggctggagtgcagtggtgtgatctcgactcgaatacagcagtctctacctcccaggttcaagcgattctcctgtctcagcctcccgagtagctgggattacaggcatccgccactatgcctggctaatttttgtatttttttttttagtagagacagggtttcaccattttgaccaggttggtcttgaagtcctaacctcaagtgcctcggcctccaaagtgctgggattataggcgtaggccactgcacctgaccggtattaattctttaaatgtgaatccatgtggtcctcagcttttctttttggatagttttgattactaatcaatctctttgtgtcagtttttgtttgtttgttttgagacggagtcttgctctgtcacccaggctggagtgctgtggcacgatatcggctcactgcaactccgcctcctgggttcaagcgattctcctgcctcagcctccagagtagcagggattataggcgcacaccaccatgcctggctaatttttgtatttttagtagagacggggtttcgccatgttgactagactgttcgcaaactcccctgacctcgggtgatccacaagccttggcctcccaaagtgctgggattacaggcgtgagccactgtgcctggcctaacttttttttttttttgagacagagtctcgctctgtcgcctgggctggagtgcagtggcatgacctcggctcactgcaacctccatccctggttcaagcgactctcctacctcagccttccgagtagctgggactacaggtgtgtgccaccacacccagctaatttttgtattttaagtagagacagggtttcaccatgttggttggccaggatggtctcaatctcttgacctcatgatccgcccgccttggcctcccaaagtgctgggattaaaggcatgagccactgcacccagccttttttttttttttttgagacggagtctcgctctgttgcccaggctggagtgcagtggcgtgatcttggctcactgcaagctccgcctcccaggttcacaccattctcctgcctcagtctcccgagtagctgggactacaggcgcccgccaccacgcccggagaatttatttttgtatttttagtagagatggggtttcaccatgttagccaggatggtctcaatctcctgattttgtgatccacccacctcggcctcccaaagtgctgcgactacaggcgtgagccaccgcacccggccttttttttttttttttttttaaagcaaattatcccagaccctgattgagtcagttttggtagtttttttttttcttggaatttgtccattccatctagattatgtaaatggcatacatttgttcataatattcctttataatcttttatttctgtaaggtcaatagtaatatccctgcttttattcttgattat

SEQ ID NO: 17080 - DNA, 2300 bp, Homo sapien
gaaggtggaggttgcggtgagccgagatggcgccattgcactccagcctgggcaacaagagcgaaactccatctcaaaaaaaaaaaaaagacacaaaataattataaataattaagttatgattatgtcaaatgctacacagcagtatagaatgttattagaatactgcgtgctgcacatttggtaattattattattttttgagacacagtcttgctctgttgcccaggctgtagtgcaggggcgtgatctcagctcactgcaacctcctcctcccaggttcaagcgattctcctgcctcaggcacctgagtagctgggattacaagggcgcgccactacacctggctaatttttgtatttttagtagagacggggtttcaccatgttggccaggctggtctcgaattcctgacttcaggtgatccacctgcctctgcctcccagtgttgggactgcaggcgtgagccaccgcgcccggccttcataattctttttaactgaaattgggtaaataagtagactgtagactcctgccctattttcaaaactgcagaagcattgctagcgtcttattaaaattaaatcacttctcggtaacaagaattggaccgggcacacaacagatgtcataccttagaatgagtaccaagctctttttcatctttaagagaatctgtgtattacaaataaacatttccataaaccaatatttgaccacggcaagtgtgtaatactttctggatcacacccattttcacatgctgtcggctaatcaaaaacaaaaatccccattttgggtatggctttattttctaaagcgggcgttacgggggtaagaattaacagagacttcctcctccatgtcaagcatgaagcgtggtgctttgaaacctgcaacctgacttgctgtgcacaacgcaagagaaagttacgatctaacctattataagcgtcacatcaggaaacaggtttctctcgacgaaactaaaaatagcaactccgcccactcgttctcaacccctttagcccgctttgtttttctccagagcactcatccgtcactagtatttttattgaatattcaatgaccctttccttcctcccaggcctccaggccgtaagcatcgagagagcctgagtccccgcgaccgcgtatggcagcgtcggagtcaatccgctggaacgcctgccacaagatgaaaaacagccaagaggagcaaggaacaaaaaagactggttccgatcccggtgagggtcacttccaagatcggcctggcattacctggtactgggacagggcgggctcttcgccgccgccgctggggccccgaaggcgaacgactaagaaggagctgtcttctccgtcccacaggaaaagctctccgccgaggccaaagaccacgtttctcgtcagcaactgcggcggcggcgacgaaggcaacgacgaagaagctggtttctcagcttcggttggactctggtttttcagtccctcccggagccgcaagaacacgacgtggttaggaagccaggtctgccacagctcgccgtcgcccaccggtccctcggcggccgccatcttggcccaactgctcccctcactccagttgctcagcccgccgctgagcacagccaatccgcggccgtccactcactgtttcggccaatcaccgagcagacggcccggaagctcgagaggctcgtgccaggtcggggggcgaaggcgaggccagcccaccaagcaggggcgtcaccaagggaaagccaatcaccattatttctgaagcccaagggggcgggacgagaagtcaacataatggtggtgctgctggaaatctagcacctggggagagcctgagacttgtgtatctaattgcctattggacacctccatctgggtaaacccaggcatccagaactttccctcaagacttacctccctcagtgcaggtcgggctggcctcacgcatttcgcttggatgcctaaatctgtctccacgtggggccggtcgataaaacaacacttcccagaatacgctgcgatccattcgcggtctgcacccggaaagtacacctcccaggggtctgtgcgcgcctccagggaacgggtcttgtggctttgtctcccgcgaagaggagatggcggagtcgttgaggtctccgcgccgctccctgtacaaactggtgggctcgccgccttggaaagaggctttccggcaggtgggtatggggtttgtgcagtggtctaccctagatcgtcccggtgaccgccgtcttccctgccttcgccttagccct

SEQ ID NO: 17081 - DNA, 2300 bp, Homo sapien
gagattcctagcctatgcctactgaatcataatttccaagggtggaggcaagaaatgaaatttctttctttttagtttcataaatgatgatgttgcagtgatgagcaggtctacggtctggtatttcagaccatttcatctagacaagtctaacattaagtgtagaaaagcctgggttaaaggctgttgaattctaaatggggttaggggaatggtgggtttagaggactcaagtaaacaaataaaagaggacacgagccgttcttggtggtgcagtccccctccctgaaaacacatagcccagcctgacctgagccaagtcttctggacaattctccactgactgcaaagcattccactcttcttccatcacctcttgaactagaaagctgttctgagaattccctggcccactgcttccagcctggcggtacctgtttaggagcctgtcccggctgtttctcattctctccaggcatctctgggaaaaaagagcaagattgggggggaaaaaaaaagcatttctatttttaaaaaacactcttacattagttgagaaaacattaaagaaagtttatagacacaaaatttcaatgataatactaactagtgttacttttgcatattcctctgtagagatacataaaattacaatgctttgtacacgtatttacaaagaaccatattttttattctagcttgccagtttccttaatggttgtgtgcataatatctcagcatccaatgtcctattacagaacatttatattccttccaaattcttgctactctagatatggctgggtaacggccttcctgcacagcagcgtttctgaactcagggaggttttgtcccccaaggaacatttggcaatgcttggagacatttctggttgtcacaattctagttataggactattagcatctagtgggtggaggcccgagacgtggcttaaacaaccctccacaacatataaatatctccctcaaaatgtccattgtcaaggctgagaaactctgctgtatctgctatctttcttgcgtcgggttactttcttggacattacttactaataaccacactgtgttcagaagaggccagaactgaggtggagccctcttctaagcctcattttactactctctagaatagaaatcatctctatctcacaagacgaacgtagacaaagtgcctctctcggtggccacctccgcagcaacagtaggtagtgttattgcagaggtgcaaacggtgatgtcctgaccacaatttaaattcaaaacaaaatcgaatccaaaaacaaggctttctaggacttgaccgacccgggctaatcccacactctacagtcagcaggcctgggtttgaccagaccaggcgcgctgcggcacctgctccacggagcagggctaaggcgaaggcagggaagacggcggtcaccgggacgatctagggtagaccactgcacaaaccccatacccacctgccggaaagcctctttccaaggcggcgagcccaccagtttgtacagggagcggcgcggagacctcaacgactccgccatctcctcttcgcgggagacaaagccacaagacccgttccctggaggcgcgcacagacccctgggaggtgtactttccgggtgcagaccgcgaatggatcgcagcgtattctgggaagtgttgttttatcgaccggccccacgtggagacagatttaggcatccaagcgaaatgcgtgaggccagcccgacctgcactgagggaggtaagtcttgagggaaagttctggatgcctgggtttacccagatggaggtgtccaataggcaattagatacacaagtctcaggctctccccaggtgctagatttccagcagcaccaccattatgttgacttctcgtcccgcccccttgggcttcagaaataatggtgattggctttcccttggtgacgcccctgcttggtgggctggcctcgccttcgccccccgacctggcacgagcctctcgagcttccgggccgtctgctcggtgattggccgaaacagtgagtggacggccgcggattggctgtgctcagcggcgggctgagcaactggagtgaggggagcagttgggccaagatggcggccgccgagggaccggtgggcgacggcgagctgtggcagacctggcttcctaaccacgtcgtgttcttgcggctccgggagggactgaaaaaccagagtccaaccgaagctgagaaaccagcttcttcgtcgttgccttcgtcgccgccgccgcagttgctgacgaga

SEQ ID NO: 17082 - DNA, 2300 bp, Homo sapien
catttaatgatgctgttttctccatgtgactgccctgtaagatagtagtattagaacagaaggtggttggtgttctcgtgcaggtcatacagctagtaagtggaggagatgggaagcaaaatcagttgtatgaatccagttcccatgtttcttctaccatcctgcctctctattaatgggttaatagttcactgagggtggtggcttatgcctgtaatcccagcattttgagaggctgaggcaggagtattgcttgaggccagttcaagaccagcatgggcaacataacaagatcctgtctctacagaagtaaaaaaaaaaaaaaaaaaattatctgggtgtggtagcaaatacttgtagcctccctcagccagaaggcttaggcaggaggatcacttgaacccaagagtttaaggttacagtgagctataattttaccacctcactccagcctggctgacagagggagaccctgtcactttaaaaaataaaataaaaaaaagtaaacctgccattttacaggatacagtgatagtgcatggtctgatcccttgccctattcattttaagtgccacattctctattaactccccagggcctgtgagcatccactccttgagggaggtgtccatagcatggtgtagagagcataattttgtaccttatatagttaagtcatttattccatgtagccctgatttgattaggccttgtttggtttttgtttttgttttttttgagacagggtctctgcccaggctggaatgcagtggcgtgatcacggcccactgcagccttgacctcctgggcttaagcgatcttcccacctcagccttctgaatagctgggatcataggcgtgtgccaccacccctggctaatttttttttattaattttttttttttagctaaagatgataaaaacaagacaaaaaattattttatttatgtattttttttttttttgagataggttcttgctctgttgcccaggctggagtgcagtgatgtaatcatggctcactgtggcttcatcctcctaggctcaaccaatcctctcatctcagcctcccgagtagctgggaccgcaagtgtgcaccaccataccgagctaatttttttatttttttgtagagacagggtctcactgtgttgcccaggctggtctcgaactcctccctggtctcaagtgatccccccacctcagcctcctaaagttttgagattacaggcatgagccaaaatgcctagcctaattttttaaatttttttgtagaggcagggtctcactatgttgcctaggctggtctcaaacagctggactcaaaccatcctcctacttcagcctcccaaagtgttgggattacagacatgaggcatggcccccagccttaggcttcatttttatgacctataaaatggagagaataccctataaatttgttgtaaggcttaaataacgtgtgtagaagacttagtgcattgtctggcatatagagagctttcaataatcaacagctattattatggtgaggcaagagcacaagctcttgagtcatacctctaacattcacttggctttactactttaatttgtgtggcaccgaccaaagcacttaatttccccgtgcctcagtttcttcacctttgaaataaggataataatagtgaagaagttaatatatgtaaggaatttaaaatagcatttgacacataagtgccatgcaagtgttagttgttaatgactgttgctgtcgactctggttagactgtaaattccttaagttatcatctttttttattgattttcccttcccccacctacaaaacctatcttagtggtgaaacataagcctgaccaaatgttttattttggggcatacttaactaataagtctgaagtgacaaggatttactgtgttgtgctgtactcagccataaggaacattctaaagcagaagttggcagactttttgtgaagagccagatagcaaatactttagacttcacagaccatgtggtctctggcacaatttctcagctctgcagttctagtggaaaagcagttatagacactacataaacaaataagcgtgactgtagttttttgaccccttccctaatgtctagactgtgagctcaacaatgacagtctttttcatctttgtgcccctgtgactagcagatactaggtactgttgtatgtttgctgaatgaatgagcacacagattctgaacaacacagattccaagtatgtggaatcagcagggtcgtcctggcatcagaaatcagttctct

SEQ ID NO: 17083 - DNA, 2300 bp, Homo sapien
tttatgtattttttttttttttgagataggttcttgctctgttgcccaggctggagtgcagtgatgtaatcatggctcactgtggcttcatcctcctaggctcaaccaatcctctcatctcagcctcccgagtagctgggaccgcaagtgtgcaccaccataccgagctaatttttttatttttttgtagagacagggtctcactgtgttgcccaggctggtctcgaactcctccctggtctcaagtgatccccccacctcagcctcctaaagttttgagattacaggcatgagccaaaatgcctagcctaattttttaaatttttttgtagaggcagggtctcactatgttgcctaggctggtctcaaacagctggactcaaaccatcctcctacttcagcctcccaaagtgttgggattacagacatgaggcatggcccccagccttaggcttcatttttatgacctataaaatggagagaataccctataaatttgttgtaaggcttaaataacgtgtgtagaagacttagtgcattgtctggcatatagagagctttcaataatcaacagctattattatggtgaggcaagagcacaagctcttgagtcatacctctaacattcacttggctttactactttaatttgtgtggcaccgaccaaagcacttaatttccccgtgcctcagtttcttcacctttgaaataaggataataatagtgaagaagttaatatatgtaaggaatttaaaatagcatttgacacataagtgccatgcaagtgttagttgttaatgactgttgctgtcgactctggttagactgtaaattccttaagttatcatctttttttattgattttcccttcccccacctacaaaacctatcttagtggtgaaacataagcctgaccaaatgttttattttggggcatacttaactaataagtctgaagtgacaaggatttactgtgttgtgctgtactcagccataaggaacattctaaagcagaagttggcagactttttgtgaagagccagatagcaaatactttagacttcacagaccatgtggtctctggcacaatttctcagctctgcagttctagtggaaaagcagttatagacactacataaacaaataagcgtgactgtagttttttgaccccttccctaatgtctagactgtgagctcaacaatgacagtctttttcatctttgtgcccctgtgactagcagatactaggtactgttgtatgtttgctgaatgaatgagcacacagattctgaacaacacagattccaagtatgtggaatcagcagggtcgtcctggcatcagaaatcagttctctcttttttttttttttgacacagagtctcgctctgtcactcaggctggagtgcagtggcgcaatctcggatcactgcaacctccgcctcctgggttcaagtgattcttctgcctcagcctcccgagtagctgggattatagacgtgcgccacatgcctggctaattttttgtgtttgttagtagagatgggtttcaccatgttggccaggctggtttcgaactcctgacctcgagtgatctgcctgcctcagcctcccaaagtgttgggattacaggtgtgagtcaccgtgcccggccagcaatcagttctctttgtcaactttatttagttgcctgtgggaccctgacattctgtatctgtgctcctatggcctctggagatgtgtgtgaaaattgtctcctcggcccttagcctacttcacctcttgtgctcacaaaaaggggacagagaggagggagaggaatccagcaagatgaagccagcctgagagagcataaaaaccagtcattggtattgtggtcttgcccaaatctttccctcgtgtgaaggaagcctttgacagtgaagtttagaattaaatacagggccagctgaagcatggtgaagccctccaactgcctttgccttgcagagcagtccatcatcagcgagtatgagaagagcttgcagtttgatgaaaagtgtctcagcatcatgctggctgagtgggaggcaaacccactcatctgtcctgtatgtacaaagtaagagtttttaaaaccttttcagcattattcgttcccattccccactccaaggtgagtggaatctccccccagatttgttgcctgaaattcaaggtttggagatccaggtctggtggccatgatgctctgggatcctaattctgcttctaggtacaacctgagaatcacaagcggtgtggtggtgtgtcagtgtggcct

SEQ ID NO: 17084 - DNA, 2300 bp, Homo sapien
gagatgcctgaatggaggcaagttctgccctgtgggtgaaactgatgatgtactgtactgtcatatataaatccactaaatccagctaccaggaactgcctggaactgtggccatgcatttttttttttctttaaagaccagtgtgatagtaggccatgcatctgagatacgatattccttggtaactagagggagaaaaaaaaatcaagtaggttcaggcttatgttgtattttgagagtctggttttatttgaacagaaataactctacagaaagctcttgtaaataatgctcaaatttgcacccgacgatcaaatccattaaaaatgaatcttgtatatgatgtgtgtggcttgtttcttgcatctcttttccattattcatagaaaattatttagaaaatattaagtgttagtcttaccatgagttagtaagacataccttcttagtagcttatatgtcctgtatatcctgggaaggtaggattgttgatttttaataaatctgaaccctgtctttgggttatattaatttactggagaaactcacagaactcagggaaacacatttaccggtttcatacaaaagatatgaccaaggatacagataaggagatgagcagggtggggaatggggaagaagctcccagcctccatgccgtccctggaccaccaccctccaggaacctccatgtatttagctatcagaggctctccaaaccctgtcctcgggtttttatggaagcctctggacttatctaaatgatataagctggcttcttgtccccagaaaaatgatgttccattagaacttggatgcaaggttggaggtgcagagagggaaggtcacaaaaattaatcatggatcctgcccttgaggatgtcacagtctggttgggtttaacctggttaaagcagcaacgctaggaggttcctgttgaaaagagaatgaagcatatgggctgggtgcgcacaagcatgagttccgagccggtggaaaaaaaggttctagaaggcctctttcaggaaaaccctcagactttcctttgctctcacaacacaacaatcaacacagaagacttatgtggccaaaggtttgggtttttcccctccacactaagcagcagacaccagctgggtgtcctccaattcaatcccaacagtatctacctggagatagtgtcagatcccataggttgagggctcagtccccaagaccgcccccaccttcagacagcaatggcaagtctgggcctctgaaacttccgaccaacccgcttcaagttggggttcccacgacccccctctttggattatgttaactcactggagcagttcacagaactcagggaaacacattcaccggtttcatataaaggatatgaccaaggatacagatgagatgagcagggtggggaatggggaagaagctccgaggttccttgcctaccctgggccaccaccctccaggaacctctacgtattcagctgtcagaggctctgcaaaccctctcctcttgggtttttatggaagcttctggacatcagcatcccttcccccagggtatatggtgggaccttctctgggaagggacttaagacccataatcagaaatgtggaaggagattagagtcctgctttggggcaggtaaaaggagggcaggagaaggggagagtctgtttcctgaggcctaacacacccaacattatcacagaacattgtaacaagggctataggagttacgacccaggaactgtggatgaaaaccaatacatatatatatcataacaccacagcctcctagaggaaagtgaccgtggaagggtctggtgagagctggcgggagacaagagtgcattccacgcagcccaaaagccttgcgtgctttgagaacagcaggtggaaagtgggtaagcggccactagagggaattaaacagcttcggacagcggactcggcagcgcagcaagaaagctccggaatccggattcgaggcttcccgggctgcaccggagtctccagcagagggcgcgattccgcccgctggccttaggtcgtcagagcgccggcgcgggaagcgcttccgggcaggggcggggcttccggcggcgcctcaggtcgcggggcgcctaggcctgggttgtcctttgcatctgcacgtgttcgcagtcgtttccgcgatgctgcctctgctgcgctgcgtgccccgtgtgctgggctcctccgtcgccggcctccgcgctgccgcgcccgcctcgcctttccggcagctcctgcagccggcaccccggctgtgca

SEQ ID NO: 17085 - DNA, 2300 bp, Homo sapien
ccaccagcgaggtctgtacctgttaccaggctccagataaggtgtatgggatgggatacccaggtgccagatcagcgcactgaggaggtgcaggaataaaatgcgcggtgacacacgcagcgctcctgtgacaggagcagggagacagttgttgggatgagggagagtataaaccaaagctgcaaggtaaacgagtgacttctaaggaccagcataaattgcatttgtccatagtgccatttcttgtgtgcctttgccgtgccaggcactgtgctagcatttatatccactgtctgtcatcctcgtgggaaccggcaaggcaggttatgatcccatggggatcctgaggccccaagaagggaagtaacaattgctcaagggggcgcatagtaagtcactggcagggccacgattccaacccacatctacttgcttctgattcctgtgcttgttccactgcatctcattgcctcaaattgacctttaagactgcagcgtccccttcccctgcccggtttaatgaccaaccattaatattaatgactgccattaataatggagtcatcttctgttggtcaagagtgaattgtggaagttaatggtgagaatatgtttgaagacttctgaatcatccgtgtgtcaatgcggctttttggttttcttcctccttttagggctatcgcaaagtgatcatttcaaccaacatcgctgaaacctccataaccattacaggaataaaatatgtagttgacacgggcatggttaaagcaaagaagtataaccctggtgagaatttgtagttcatgaatgtctctcctgtgtctagtgagcagccactgaaactgtagtcccacagttttcccctgagtgtttcatgtttgtaactaacaaattcaggtggcaggcgccatgagtgagatcacctacactccaggtccgcgaaggagtcctgaggcgggtatgtgagacaggaagtagaggcaggaaagaagagcccaggttgagcaaacttgggcacacagggtcagggacctgggcagagggtctggtaccccatcagaagtcggctctaaggccagggacagctgggtgtcaatcaaagggtgtcatcagaaactatatatatatggctggtttgagctcccaggtttctcaggaaggaaccagatctcctggctgaggtgaggcatggaaggagcactggcttctcctaagaaggtgcagtgagaagctaacttaaggtcatcttgactcatgtctgttttatactttgctttattccacagaggatttgagaccactgaaattattgctcccaattattgaactgaaatgctctagtaaacatttgagggtcctggcttccacaggtgtatctttttgtgatgacgtaggtgaaagagcttgggtctccagtgccaggctaatgatacacctttatcaagaaaatgaacctcatttactgctagaaaacagacatcacattatttctgtcttacagcagaactgggagggaggataaagcacacaagtgatttgaggcatttaatttcgtagtcattgattgatagtatgacccccatcctagtttgctgaaactcccagttttagcacccaaaatccgacatcccaggaaaccctctgtcccaagcaaactggaggggttggccatcctaccatctaaggcaagacctcggaaactactcttctcgccccttgctgcatgcgtgaggtttttctgatgtttttgtaacagatttcacagtgggcttatggcaaagccttgtttcactagggccaaaccgctgcggagcagtctggttttgtgctgtccattgtgctagccttgaggctttctggacccccgtgttgctgaaagaaccactggtgtgcttctttttatcgacactgtagaaagagtttgttcatgtgatgaagcactaatggggctcactctccatccagacagtggtcttgaggtgttagcagtgcagcgggtatcgaagacgcaggcttggcagcgcacagggagggctggcagagaggacagtggcatctgctaccggctctacacggaggacgagtttgagaagtttgataagatgaccgtgccagagatccagaggtaggcaccagttgctcctgcactgctgctgtttgtcaccatgtctctcctgcttgcccagagctgcagtttttactcacactccaccatgaggggttctgactcaatggcagagggatcaggtcatgaccctggtctcatgctcttcacaggtgtaacctggccagtgtgatgc

SEQ ID NO: 17086 - DNA, 2300 bp, Homo sapien
cttttatttttctaaacaagactccttttacatagtgagctgctttcttgcctattcttccgagagttctttaccagctcctgagagatcaggggctctattggtcccatgtgctttgctttcaaaatctgtcgtcaggttggataaattagttgctttccttgaacatcttaagccttcagtaacctctcttaactctcttatctatatatcattctagaaaaattgtaagcattatgccagtgtatatgtgagtattgagaatgagtctcagaactgtatataagacagatttatttgtgtgtgtgtgtactcatttcacttaaaaataccttagacgtcttttcatatctgtacatagcttcacatgaaacttttttttttttggagatagtctcgctcggtcgcccaggctgaggtgcagtggcgcaatcttggctcactgcaacttccgcctccaaccaagcaattctcctgcctcagcctcccgagtagctgggattacagacacgtgccaccacacccagtggctaatttttgtattttttagtagagacgggatttcagcatgttggtcaggctggtctcaaactcctgacctcgtgatctgcctgccccaacctcccaaagtgctgggattacaggtgtgagccaccacacccggcccacatgaaactattaaatagcttgaggtagaaggttaattttaaatattccttgtaatagttacattaattgcggttaaagtaaacttgaccattgtctctctcagcagctagactgcatgcttcccaagggagtgggaagcgttggtgttggtcttgttcactgtggtagtgcaagtgcccaacttagtgccggacacagtgggcgctcaagaaatgtttggtgactgaataaattgtttccctgcacaggttggctatacagtgcgctttgatgatgtcacctcagaagacaccaggatcaagtttctgacagatggcatgcttctgcgtgaagcaatttcagactctttgcttcggaaatacagctgtgtcattttggatgaagctcacgaacggactatccacacagatgtgctctttggagtggtgaaagctgcacagaagaggagaaaggaactcgggaaacttcctctgaaagtatgagggaaacttcccctgaaagtatgagggaaacttcccctgaaagtatgcgtaacacacagaaggaaacaggcctggctgggcgcggtggctcacgcctgtaatcccagcactttgggaggccaaggccggtggatcacctgaggtcaggagttcgagaccagcctggccaacgtggtgaaaccccgtctctactaaaaatataaaaattagctgggtgtggtggcacacatctgtaatcccagctacttgggtggctgaggcatgagaatcgcctgaacccaggaggcggaggttgcggtgagctgagatcacaccactgcactccagcctgggtgacagagcgagactctgtctcaaaaaaaaaaaaaaaaaaaaagtgaaagttcattaaatagcataactttatagacaacttgtatttcagggagttggcagaaatatgatctgaaagtatccagataattggcccggcacggtggctcacgcctgtaatcccagcactttgggaggccgaggccggtggatcacctgaggtcaggagatcgagaccagcctggccaacgtggtgaaaccccgtctctactaaaaatacaaaaaatgatccaggcatggtggcacatgcctgtcgttccagctactagggaggctgaggcaggagagtcacttgaacaagactgaaattccgtcttgatttttttttttttttgcactctgttacccaggctgcagcgtggtgacgcgatctcagctcactgcaagctccgcctcccaggttcacgccattgcttacctcagcctcccaagtagctgggactacaggcgcccaccaccgcacctggctaattttttgtatttttagtagagacggggtttcaccgtgttagccaggatggcctcgatctcctgacctcgtgatccgcctgcctcggcctcccaaagtgctggggctgggattacagacgtgagccaccgtgcccggtgaaactccatctcaaaaaaaaaaaaagaaggaaaggaaaggaaacagacctgtgtgctctagcagggtgttttcctctgcctgttctgctcagagccttggaagaaagtaaactgtgatgggggtggcacaggcctcaatcatctgcttttggggctcgagagggacac

SEQ ID NO: 17087 - DNA, 2300 bp, Homo sapien
ttcgtcgtttgaaggaagaaccaggatattctctgaatagttattagcttgtcagtatctacatatgaaagctggtgaaccccaagagacttcttcaggagaaacagcagatttcagtctaccaatgggagaaatgtgagcagcatggcttgatgcatatataggacttaatttttccactctttggtcctcttagctttgaggctatagaatagctggatcattaggccagagattatggatgagttacctacagatttgttacctacctatgtgctttgttttgacagtactttttttttttttaagtttaaacctgtatttaacattgacagataaaaatcttcacttttggcttttcttgagaaaattggaagatctggcaataataggtctacatgacagccattgcctagaaatgattaggggctgcatgtagaggtggaatgtgctccatcaagaaataagtccacccatttacattacctaaattattgtaatcatttggaacatcggactcctaccttaagttactctggaaagcacactgggaaaaaggactgggatgtctttactcaaagtccataatttgagagttaacatttattatcccttgtagttttgggttgcctttctaaatatttcagggtaggaagtgaaaatttgtcagtttattcttaaacacaaatctgctgctggttcaacgtgcacattttcagtaatgcctggtcaccaaactgtcagcaactagaggaaaattatctccgacctggagcaaaggggaggttttttgtttttagactagctctctcacgaatcacgggaagggagatatttaacagggcgagtttcatggaaacgagcttcagaagatacccttcacatgagctgaagcttacggtgtattctctggaaatcacatttcctgtaagagcaaacagctacttggcattctccgtggtaaattagcaaatcatctaagaacttttaggagggtaaggaagaactagttataatcctacttttttctgctgcagttctgaatcttcactgaagtgtctgtgatggggttgcacagccatgtagagaacttgagagtctggctggaatggttgggggaaaggaaagataaaagacaattttaatttcattgaactccctcctttctctgcttgtattactggaggcgaccacatccgttggaggagtcattttctgagttaaattcatgtatatcagaattggttttcctttctgtaacacaagatgatcacaaaattatgatttggggacatctgaatgactaagatgactcaatttcttaatctgtaaattagagataatctaataaccagtatataccacataacttataagttgtttagaggattagacaatgcacgtttgcgcttctcattgattttacagaattaagtactttccttgaagagtgactgttatttggacagagaaggggaaaacgcgggtttactgaaaagaagtaatgctactagaacaaaacaatgggcggggcgcggtggctcacgcctataatcccagcactttgggaggccgaggcaggcggatcacctgaggtcgggagttcaagaccagcctgaccaacatggagaaaccctgtctctactaaaaatacaaaattagacgggccccggtggcgcacgcctgtaaccccagctacttgggaggctgaggcaggagaatcgcttgaacccaggaggcggaggttgcagtgtgagccgagatcgcgccattgcactccagcctgggcaacaagagcgaaactccatctcaaaaaaaaaaaataaaacaatgagaaaaacctcgttaaccaagactacagtcccacggaaccttacatcctgtgtttcccggttgtagctccgggccttttcctggttgtacctcaggccctgcttttcccacccccaggaagtgaaagccttcccaagcccccaaggcatgctgggagatgcagtccctttttctaaagactggggcggccgtgaggtcatcggtggtcgccgggagccgccagcacgtggcggcgaggaaggggcggtgtgctcctgttgtctgcacctgagagggggcaggagctctcggcgcttgcgcctcccgccgcggtgccctcccgacatgccggaggaggcgggcttcccgccggccaagagattccggccaggctctggacctccgagccgcgctgggtccttccctcccgggaggcaagtggtgatgctgctgactgcgggcagcggcggcagaggaggaggaggagg

SEQ ID NO: 17088 - DNA, 2300 bp, Homo sapien
ccaggagtttgagtcagcctggacaacatagtgagaacctatctctttttttttttttttaagttttagtttaaaaaaaaagaattttcctttcttttagatgtttctgactgcctaatgtaaacatttctcagcaatttatattagaccctgaagtttttctctgatatgtcagttctatttattatatgatgatactacatatgaaagcactgttttctgttctgccgattaacctagtctttccagcaaactttctccatacgacgatcacaatttaaaattttctttcctattattataaatgtcacagtcccaatgatgtctttcagactttgaactaaaagcagcaaaaaaaatctaacatcagattatatgcccccgtttttgtttcagaacagagtatcactctgtccaaggcttctcaaccaccgcagtcataggatgtttcttttgtattaatatggaactgtttcctggtaatttattttacttaatacatctttctcttgatttttttttaacagatatggagattaatcaccaacttcttattttttgggccagttggattcaattttttatttaacatgatttttctgtatcctttattaaatggggtcagcatcaaaactttttcttaggaagtaaaaaattaagttgaaacttttcatcctgttacttgtttttggtaccatcttagctatgatttctgggtcagtggtacataaagtagttgcttaggtagtaatgttttgaaaatgtctgtaggtcactttgttcaaatgggaggttttaaccataaaaagatagcacttctgctcttttgttacttacaaatctgatcaagggaggggagaattgatttaactgaggcatacctccacagtaaccaacaggttcgaagccgtaaaacaacctgaatgcaatggtaattcagcagaatttgggcataagttttggaatgggttcatgaggagtgggaacctgagatctccttgggtcctggttgctggaactactggctgaaagacagtggttgtgtctgctgggcttgtcaagttccggtttgttgaaaggaaaaccccagctctgatccaatggtaattggggccacagagcagggcattcctcttccacccctgccctctgtattaagagggagttacagttcaactcatctgcagctgcattccttcctgaggatggcaggaatccattttatatcctatgtaggatatcattctgataagtttccattaaagttttttctcatcgtaattcatctttattgactgaggtgctcaacctgccaggctggaaaagtagttgagcacacaaggcttcttgctgcggatttcttccaagttaggatgtgggaaagcaaagatggtgcatattaaggtgtggctgagcacaggaaagacaatacaaatttttaaaggtttaataggggactggagggccgggtgtggtggctcacacctgtaatcccagcacttggggaggccaaggcagtggatcacgaggtcaggagtttgagaccagcctggccaacatggtgaaacctgctctctactaaaaatacaaaaaatagcctggcatggtggcacacaactgtaatcccagctactcaggagaatgaggcaggagaatcgcttgaatctgagaggcggagcttgcagtgagccgatatggcaccattgcactccatcctaggtgacagagcgagactctgtctcaaaagaaaaaaaaaaaagaataggggactgaaagcatgtctgtgtgtcatctggattagttcccagccagggacagtttgtaaaaaatgatgctggtcttgaccttttctcaaatgcttggtaaaaaagtaatcacattaccactcaaacattcttatacaaatgaagacttgactaattacaaataatatggaatccaagtgtacttacaagataacattaaatttttactttgttcatattcgtgtgcttaatattttcttaacttggaacttaagatatcgttactgtcgaatgctagaagaaggctctttccgaggtcggacagcagactttgtatttatgttcctttttggtggattcttaatgaccgtatccttcaacaaacaacacgggaaaatgttgaagaacaccctggctcttcctaaagcttgtcatctgtctcccacagttctctagatcttagcttcagggcactatcatttattttacagcacattttctgtgacaagtttccaaacctagcagtcggacaggatgagcaagtcaaaggaactt

SEQ ID NO: 17089 - DNA, 2300 bp, Homo sapien
gagtgcaatggcacaatctcggctcactgcaacctccgcctcccgggttcaagtgattctcctgcctcagcctcgccagtagctaggattacaggcatgtgccatcacgcctggctaatttttgtatttttagtaagagacagggctttaccatgttggccaggctggtcttgaactcctgacctcaggtgatctgcctgcctcagcctcccaaagtgctgggattacaggcgtgagccactgtgcccagcctcttttggcattttaatcactggaaaggaccatctcccattgtaatctaataaaccaccatatagctttagatgtttggaatttggttagtatgatctgatccctggaagacagatcacaatttaaaagcactaacagaattgagtttctggaccatggtgataacaccaaggtggtgggtgtgcctaggtgctgaatggacaaaataaggccatccctgtgagacaacccctaagcagctagctagtcagcctcctctcataggacaacgttaagtctaaaccagtgatttccaaatacaggaactggacacatcaaaacgatgcagggaactttaaaaataaaacacagattttaattcctacccttgcaaattctgatttggtacttgttgaggagcttgagaatctcttcaaagttccctaagggattctcaagtccaaccaggctgcagaatcactgctttatatcctgacaaggcaacttataatcaaaggtccccactgggttcttttttaggatagtgtataacaggatttgctactaaacagtaagaaaaagaagaaactgaagcattaatcactattgtgatgaaccacttacttgaaagtgtttaaagattaattcaggattgaagtacaactgaaaaggtgtgatcaattccaactgctgaaatagaaaaagagcttcttaaagcaaatcaagaaacaaaatttcatcatttacaacaaagaattagtaggtctagcaatttccaactctcggtcacttagacgtgatttcctttaagcctttcttcttaggccagaggaagaggttggtaaagaattctctaggattggtagaattctttgtatcctcaatacctaacacaaaaaagtctgttttatgttgcaatagttgaggctgacatgaagaaatgaggcagacaggtggtgatattttagacacaggacaaataaaaacagctgctatgaatctacccaccacatgggcaccacctgaaacagctgtatgaaacaacaaaactcacttgaaataacggagactggagaccctgccaccgttagggctgggtacctccagctagccccttatttagatccagagaccctttttattataagccattcccctctcgacagtttccagcttgctttccccattcctgtttcttcactaaacggaccttcctctcactagtcaccatggtaccacctggccattggcagagctctcggacacatttcttgggtgggaggctcccgcaaccctaacccgctataggtccggcgctcatctcttagaaactgacctgaccccccatgaagcagcactcccttctcgcgtcactggataagcattcttggcgccaactcgaaccccagagtaatccctgtacgcctccacccatccccgggaccagcccctctgggcctccccgaggcccaaaccccagtttcctgaagacccagtcatatccagcccagataatgagaaggtggcactgcagctgctcaccacggcggcggtggtgaggacgcaggcagtggtgtaggcgcggctgaccggtgggatctgcaggtactccagccgcaagctctggtacgccatcttccccaccgtcgcctgccccaccccccacccaccccatttccccttccgccagcaggccccggcggcggggcgggcccaaaggccccccgcccactttagttttcccgcgactgcccaatcaacgccaagcaaccgcaatccgtagagacctaaggaacgcacatccgccaatcacgagttgcgtcgccaccgcccccccccagcgccccatctccccaccctctcttctccaccagccaacgtccgggaaaaacgagtaagtacaggttccttctgccaatccccgccggccacagctaactttcccgcccggcccctttctgtcataattgaggtgtccacaaccagccaatcaggaacgcgagagtatcccgcgtttgctttcgctcgccgaggcgcgtatcagtcggaattttggggagccaaccgcg

SEQ ID NO: 17090 - DNA, 2300 bp, Homo sapien
aaaccagtgatttccaaatacaggaactggacacatcaaaacgatgcagggaactttaaaaataaaacacagattttaattcctacccttgcaaattctgatttggtacttgttgaggagcttgagaatctcttcaaagttccctaagggattctcaagtccaaccaggctgcagaatcactgctttatatcctgacaaggcaacttataatcaaaggtccccactgggttcttttttaggatagtgtataacaggatttgctactaaacagtaagaaaaagaagaaactgaagcattaatcactattgtgatgaaccacttacttgaaagtgtttaaagattaattcaggattgaagtacaactgaaaaggtgtgatcaattccaactgctgaaatagaaaaagagcttcttaaagcaaatcaagaaacaaaatttcatcatttacaacaaagaattagtaggtctagcaatttccaactctcggtcacttagacgtgatttcctttaagcctttcttcttaggccagaggaagaggttggtaaagaattctctaggattggtagaattctttgtatcctcaatacctaacacaaaaaagtctgttttatgttgcaatagttgaggctgacatgaagaaatgaggcagacaggtggtgatattttagacacaggacaaataaaaacagctgctatgaatctacccaccacatgggcaccacctgaaacagctgtatgaaacaacaaaactcacttgaaataacggagactggagaccctgccaccgttagggctgggtacctccagctagccccttatttagatccagagaccctttttattataagccattcccctctcgacagtttccagcttgctttccccattcctgtttcttcactaaacggaccttcctctcactagtcaccatggtaccacctggccattggcagagctctcggacacatttcttgggtgggaggctcccgcaaccctaacccgctataggtccggcgctcatctcttagaaactgacctgaccccccatgaagcagcactcccttctcgcgtcactggataagcattcttggcgccaactcgaaccccagagtaatccctgtacgcctccacccatccccgggaccagcccctctgggcctccccgaggcccaaaccccagtttcctgaagacccagtcatatccagcccagataatgagaaggtggcactgcagctgctcaccacggcggcggtggtgaggacgcaggcagtggtgtaggcgcggctgaccggtgggatctgcaggtactccagccgcaagctctggtacgccatcttccccaccgtcgcctgccccaccccccacccaccccatttccccttccgccagcaggccccggcggcggggcgggcccaaaggccccccgcccactttagttttcccgcgactgcccaatcaacgccaagcaaccgcaatccgtagagacctaaggaacgcacatccgccaatcacgagttgcgtcgccaccgcccccccccagcgccccatctccccaccctctcttctccaccagccaacgtccgggaaaaacgagtaagtacaggttccttctgccaatccccgccggccacagctaactttcccgcccggcccctttctgtcataattgaggtgtccacaaccagccaatcaggaacgcgagagtatcccgcgtttgctttcgctcgccgaggcgcgtatcagtcggaattttggggagccaaccgcgccgtctgtccctggcaagccagcggcggtttaaaggaggtggcgggaagcctgtgtgtgcttcaaatcgtcaccctcatggtcgctccggtaagtgctgcggggcagcattttctctgaggaggagcggggacgggcgagactggcataagcgtcttcgcgagggagcaaggcggcctgtgggtcggcctcaccccggcctccgacctgaagatcccagcatgcagcgcgggcgcggggcccgacggaagccgggagccggccggaagcagttcctgcgctctggcttctgggtcctgtcctgcgcgatcgcggggtcttagacagctcaactcgccgagatgacctgggcacctctgcgttgaatcggcaaatactgatcaagccgcatttattctgctctcaggaactctaagtctagcagagaagatgaggcggtagaagttcatcagtcagtgcccgaagagaggtcctaatgggaattcgaagaaaggagttaatcaaggaagtgtatttttttgttgttgtttga

SEQ ID NO: 17091 - DNA, 2300 bp, Homo sapien
cattttaggcctcatgatctatcattttgatcactccgttgccaatgtcctcaatttgcttgtcctccagccaagccatctgaaaaaaacccaattagaagatgagtaagtcccttgtcagctttataaccctgacatgttttttcaagggtctgcgagtaattcctctcaaatataaacatctaggaaaataaaacccctatctccttgtcattgtgggaattcaacctaggcatctttttctgagatgaaatgatattgcttgtcatagaaataagagaaattttattattccttcagataaaggcaattagctaaaacaaactgctacttcaattatcaggtgaatttaggacgcactttatgaaataatttgcaataagcagtacagtcaaatcttatgggaagataagatgcagccaatcttaagaatttatgtttgtaggctgagcacgatagctcatgcctgtaatctcagcactttaggaggccggatggacgaatcacctgaggtcaggagttcgagaccagcctggccaacatggcgaaaccctatctctcctagaaatacaaaaattacccaggcgtgatggtggatacttgcaatcccagctactcgggaggctgaggcaggagaatcactggaacccgagaggcgaaggttgcggtgagccgagattgtgccactgcaccccagcctgggcaacagagcgagactctgtctcaaaaaataaaataaaataaaaatttacgtttgtaatggttaaatatggagtggttataactgtttggctgtatatgtaaggtaggatttctttctgtttttctttttttcttttgagacatgttgtcgctctgtcgcccaggctggaatgcagtggcacgatcacagatcactgcagcctcaacctcccgcgcccaagcaatcctcccacctcagtctcccaagtagccgggacaacaggtgcaggccaccatgcctggctaattttcttgttgttgttgttgtttgagacaaagtgtcactctttcgcccaggctggagtacagtggtatgatctcggctcgctacaacctctgcctcctaagttcaagtgatcctcttagctcagcctcccaagtagctgggattacaggtgggcgccatctcaaacaacaacaaaaaaatacacttccttgattaactcctttcttcgaattcccattaggacctctcttcgggcactgactgatgaacttctaccgcctcatcttctctgctagacttagagttcctgagagcagaataaatgcggcttgatcagtatttgccgattcaacgcagaggtgcccaggtcatctcggcgagttgagctgtctaagaccccgcgatcgcgcaggacaggacccagaagccagagcgcaggaactgcttccggccggctcccggcttccgtcgggccccgcgcccgcgctgcatgctgggatcttcaggtcggaggccggggtgaggccgacccacaggccgccttgctccctcgcgaagacgcttatgccagtctcgcccgtccccgctcctcctcagagaaaatgctgccccgcagcacttaccggagcgaccatgagggtgacgatttgaagcacacacaggcttcccgccacctcctttaaaccgccgctggcttgccagggacagacggcgcggttggctccccaaaattccgactgatacgcgcctcggcgagcgaaagcaaacgcgggatactctcgcgttcctgattggctggttgtggacacctcaattatgacagaaaggggccgggcgggaaagttagctgtggccggcggggattggcagaaggaacctgtacttactcgtttttcccggacgttggctggtggagaagagagggtggggagatggggcgctgggggggggcggtggcgacgcaactcgtgattggcggatgtgcgttccttaggtctctacggattgcggttgcttggcgttgattgggcagtcgcgggaaaactaaagtgggcggggggcctttgggcccgccccgccgccggggcctgctggcggaaggggaaatggggtgggtggggggtggggcaggcgacggtggggaagatggcgtaccagagcttgcggctggagtacctgcagatcccaccggtcagccgcgcctacaccactgcctgcgtcctcaccaccgccgccgtggtgagcagctgcagtgccaccttctcattatctgggctggatatgactgggtcttcaggaaactggggtttgggcctcggggaggcccagaggg

SEQ ID NO: 17092 - DNA, 2300 bp, Homo sapien
gcagtttgggaggccgaggcaggtggatcacttgaggtcaggaagttcaaaaccagcctggcccatgtggtgaaaccctgtctctactgcaaatacaaaaaattagctgggcatgatggtgtgggcctgtaatcccaggtactcagaggctgaggcaggagaatcgcttgaacctgggaggcagaggttgcagtgagccgagaccgctccactgcactccagcctggacaacagagcaagaccccgtctcaaaaaaaaaaaaaaaaggaactgcaccattttacattctcaacatcacggatgagggttccatcttctcctcatccagccaactggaagcccttttagctgaggtggttaagctgtgagaaccagagtttgctgctgccgttattcactgcatcattcattcagcaaaaacctgagtacctaccactacctagtaggctctggccatgcaagaagtccctggcaacgctgtaggatagagaggaacagcaccctggttacagcgtttcagcatcctggccttggttcaccccggggcctttcacttgcaggaggcagggagttctctgatggcagtttgagttggatttgctgcaactaacaaagccggccagtggacctctccaatctactgggactcaaataaatccaagtgattgttctccctccattccaggaaggaacaccagccagccgtggaacctcaggtgcaacagagacgccaggagatactagtgcccagcagcctgcggcagtaccaatgaagccagagagggcttggtggatgacaaggaggcctgagtagaccgcaggtgggtctgagaaatgggcttaggtgaggcaggtctttgaaggatttgttcttaatcatatgcgagatgctcaaaaggctggatgcctgcttttgtgggtgaagagcaagaagagaaaacaggttgtacacatacagatgcagatggagagacagagaaaaaaaaggaagaaggcagagaaatgcaccaattcttgagctgtattatctctggaccttgggattgtgggaggctttattttactactgattttgcctacactgttttctcaatttctagttttctacaaagatgatgtgttagctttttcacgcattaagattaaaatttaaaacagaccacacaataaatatttcttttaaaaggagaaatatgccctggggaagctccccacgcagctgagagcctggctggttgcatttcggcttcttaggtgccaagcctactagtgccccggggtcccagccagcggctcgcgtttcctcccccttgcgccgccagtctggttgccatggagacaaaccttgctgcgcagagactgccgagccgcaggcagcggagctggaacccggcgagccagcctctgcaacaggctgggggcggaaggaggagccaggcgaagcggcgcctcagctgagaggaccggcggaccctgcagaggccccctgcccctctggctccgcccccacccgggtcgctagaaatacagccgtagccccgcccaccgcccactgcgctctgacccagacccggctgacccacctacccgcgatcctgcccatggctgacgggctctttcggcgcagaccctggggtctcgagcagattcgcccggaccccgagtccgaaggcctgtttgacaagcctcccccggaagaccctcccgctgcccgcgggcccaggtcggcgtcggccgcgggcaagaaggctggtcggcgcgcgggcgggagggcgcaggggggccgcgccgggcagcccccgaaggccgcatcgcgccccccgcccaagaaggaggcgcctccactggacgagggctgctatctcgaccattttccgcacctctccatcttcatctacgcagccatcgccttctccatcacctcctgcatctttacctatatccatttacagcttgcctgagtggccagcgcgggacggggtgggcgcaggaccgagcggggagggaaagggaaaacggggctcggcattttgtgttttagaacagcgctgcacccccttcatgtagctttcgatgcttgtttctttccgtctttgttgtcactatctttgtctatcagtacgaaagtacaaagtagctgccggcaatgaaataggggtgctgtttgcacctgcaggttaggggtggaggcgtttagaattttggggtgtgattgagccccgtttataattagaatgcccctggacccctaccactctgtgacgtgggggcacgcgcagggatcccatcattttgtgttt

SEQ ID NO: 17093 - DNA, 2300 bp, Homo sapien
agaagttggcaggagaggaattcggcagccatggtttccaggataacaaatagctatagcccaggcagcagagattcccagaaggtccttctctcccacccacccactgacacatacaccccaccaccaccaccaccaccaaagcctgtttcctcagctgggcatgaacacttcgagctaaaagtggcctttgtgaattttgcctcttgctctgtgtacacattctaaagggaacaagtctgttttgctgcagggtgaggcccagaatgcggcctgggaaaggctaacagggcacagtctttgatggtgagcaagcctggggtgggtagctgaggggattgggaggtatacctcttacccttgggtcagagagatgtgggttagaaccccagcagtcagtgttttattctattctattctattctattctattctaatttttttgagacagagtctcagtctatcacccaggctggtgtgcagtggtgtgatctcagctcactgcaacctccgcctcctgggttcaagcgattctcgtgcctcagcctcccaagtagctgggattacaggcatgtgccactatgcccggctaatttttgtattcttagtagagagggggttttgccatgttggccagactggtctcgaactcctgacctcaggtgatccacctacctcagcctcccaaagtgctgggattacagatgtgagccaccacacccggcccccagcagtcagtattagtggcagattttagattccttcacctctcagcctcagtttcctcattggaacattggagaaaatactggtgcctaatttagggggtcatgaaaattaagtgagaccatctctgcagaaatgttgagcacagttcccagcacacagtcggtggccagtgattggctgctgctgctgctgctgctatcatccatgtgtgtcctaggattcctcatagagggggtcaccaacatgatcaactggccattgtccagatccaggctttggcctggcagactcaaatctctgattcctattgactcagacagtgtatctttcttccagaggcaaatacccctaaatggatgaaggaaacctatcaaagtatagcaccggagaaaagatccccctagaagaggcctctctcacctctgagaggggtatgtactctgggcaggtcccagaagcaggagctaaaggtagcctttgtccattcagggtttttttttggtggattctggctccaggccctggactcatgaggtttttcctggaacgctctggtgtcgagcagagtgtgaagttgtagcttgggatcttccagtatctgtcctgtcagggatgtctagtggtcctgaagtccctgggctgggacgaagttagctcttgttgctgggcataggcatagcttgcaccaggatgaggccatggagtcagccaagctctctcaattcctgacagacagagcccccaggggtcacctgggctgggaccagcactgttttgtgatatattcatttctgtacaggtagaccaggtaaaaaataataaggtgtcctagagacacctgggcctctgctgtctgagctccggatttagcctcacatcttctcaatatgcaaaggaccctgcagttactaaagcatttttaacacctgcactcctcactgacacccagctcctccccaataagcctttgcatggttctgcccgagaccctcttggttactgagacttccccactacctactcccacttaagctgcataggtaggtttgggtgactttctcaatgccacagccttacataaagctcttccatcccactctacacacccttccattccaccttgaaaaccctctcattgcaccctacacaccctttcattctagcctcacatccttccaatcatccatcacacaattccatttcacccttcacacccttccattccaccttgaaaaccctcccattgcaccctacacaccctttcattctagcctcacatccttccattcatgcatcacacaattccatttcacccttcacacccttccagtccattattcattcacaccatttcattccattcttcacgccattccattacaaccttcatattcttccactccaccttacacaccttatattccacccttgacactcttccagtccactacatgtccttccgtttctctcttcacatcttccatttcaccctaagcaacctcccatttcacccttcacacccttcaattccacccttcacacccctccatgacatccttcaagctcttccg

SEQ ID NO: 17094 - DNA, 2300 bp, Homo sapien
ctggactggagaactatcctccagtatttctggcccacccggcttacaggcagagaaagagccctcagacagatgaccacagctgttgccgagggacaccattggcaggtactgcaatagcaggtgcttgggatgctgtcagcatctgctacacactccagtgtctcctccagtcctccatgacctacaacccccagcttacagatgagaaaactgaggctcataggggctaatggccagcatcataagcttagtgaggactgagagttgtgtctgttttgttcactctttatccccaacccctatagcagcacctggcacagagtaagcccttgataaatattcagtgaaggaaagtcattcagggagtgtgacttagttgagtcaagacttgaactgggatattctaccccaaagcacatgtccttccgccgcatggcaagaacataccagtgtctgcagacagcgcagtgtgtggcttggagtaggtgcctaaaacagttgtttaattaattaattaattcttctattctctacctttatgttccttctttccctcccttacttagaaatcagagaaagagagagagagaaatcagagaaaggcaggcccccatgggcagcggtggtaggaacgcccccacaggcgcacaccagcctacagccccaccaccacccatgggagccttctgtgagagagagcctctgttccacatggccctggaaaaatgaggattttaaccaaaaattcacacagctgctacttctacaaagacctcaccccagaagccaagatcccctggtcaagagaagctggcctgattatgtggaggagaatcgaggacatttaattgagatcagagacttatttggcccaggcctggatacccaagaacctcgcatagtcatactgcagggggctgctggaattgggaagtcaacactggccaggcaggtgaaggaagcctgggggagaggccagctgtatggggaccgcttccagcatgtcttctacttcagctgcagagagctggcccagtccaaggtggtgagtctcgctgagctcatcggaaaagatgggacagccactccggctcccattagacagatcctgtctaggccagagcggctgctcttcatcctcgatggtgtagatgagccaggatgggtcttgcaggagccgagttctgagctctgtctgcactggagccagccacagccggcggatgcactgctgggcagtttgctggggaaaactatacttcccgaggcatccttcctgatcacggctcggaccacagctctgcagaacctcattccttctttggagcaggcacgttgggtagaggtcctggggttctctgagtccagcaggaaggaatatttctacagatatttcacagatgaaaggcaagcaattagagcctttaggttggtcaaatcaaacaaagagctctgggccctgtgtcttgtgccctgggtgtcctggctggcctgcacttgcctgatgcagcagatgaagcggaaggaaaaactcacactgacttccaagaccaccacaaccctctgtctacattaccttgcccaggctctccaagctcagccattgggaccccagctcagagacctctgctctctggctgctgagggcatctggcaaaaaaagacccttttcagtccagatgacctcaggaagcatgggttagatggggccatcatctccaccttcttgaagatgggtattcttcaagagcaccccatccctctgagctacagcttcattcacctctgtttccaagagttctttgcagcaatgtcctatgtcttggaggatgagaaggggagaggtaaacattctaattgcatcatagatttggaaaagacgctagaagcatatggaatacatggcctgtttggggcatcaaccacacgtttcctattgggcctgttaagtgatgagggggagagagagatggagaacatctttcactgccggctgtctcaggggaggaacctgatgcagtgggtcccgtccctgcagctgctgctgcagccacactctctggagtccctccactgcttgtacgagactcggaacaaaacgttcctgacacaagtgatggcccatttcgaagaaatgggcatgtgtgtagaaacagacatggagctcttagtgtgcactttctgcattaaattcagccgccacgtgaagaagcttcagctgattgagggcaggcagcacagatcaacatggagccccaccatggtagtcctgtgagtacccaaaccacccatgtctg

SEQ ID NO: 17095 - DNA, 2300 bp, Homo sapien
tgagaccagcatggccaacatggtgaaaccccatctctacaaaaatacaaaaattagctggcgtgatggcgggtacttataatcccagctactctgggggctgaggcaggagaatcgcttgaccctgggaggcggaggttgcggtgagccgagatcgtgccactgcactccagcctgggtgacaagagagaaactctgcctcaaaaaaataaataaaataaaatgaaattcacctaaggagagaagggagaggcactgaacatattgtgaagaaaagaacagaagaggttgtaactgttgttctatttggaatctgactaagataggagcctgaggtccctccctgggaaacaatggtgtatataacctcagcttctcacaggtcatgaggtatcttccatcagtctcaggtcgggctcgcccggaagcctgagaccggatttggttgcaggtggcttactggggaggtgatttcttggactcatcaacaagagagaatggtgaggcggggaaacccaggaaaggtagattatggaacaggttaccttgtgagcaactgaggctccatgctgctgcggttgtctgggagacggtgagaacatgcctgagtgttatctgtcctgggggcaagggaccccacctgtcatccactaagggcacctcctggactggagaactatcctccagtatttctggcccacccggcttacaggcagagaaagagccctcagacagatgaccacagctgttgccgagggacaccattggcaggtactgcaatagcaggtgcttgggatgctgtcagcatctgctacacactccagtgtctcctccagtcctccatgacctacaacccccagcttacagatgagaaaactgaggctcataggggctaatggccagcatcataagcttagtgaggactgagagttgtgtctgttttgttcactctttatccccaacccctatagcagcacctggcacagagtaagcccttgataaatattcagtgaaggaaagtcattcagggagtgtgacttagttgagtcaagacttgaactgggatattctaccccaaagcacatgtccttccgccgcatggcaagaacataccagtgtctgcagacagcgcagtgtgtggcttggagtaggtgcctaaaacagttgtttaattaattaattaattcttctattctctacctttatgttccttctttccctcccttacttagaaatcagagaaagagagagagagaaatcagagaaaggcaggcccccatgggcagcggtggtaggaacgcccccacaggcgcacaccagcctacagccccaccaccacccatgggagccttctgtgagagagagcctctgttccacatggccctggaaaaatgaggattttaaccaaaaattcacacagctgctacttctacaaagacctcaccccagaagccaagatcccctggtcaagagaagctggcctgattatgtggaggagaatcgaggacatttaattgagatcagagacttatttggcccaggcctggatacccaagaacctcgcatagtcatactgcagggggctgctggaattgggaagtcaacactggccaggcaggtgaaggaagcctgggggagaggccagctgtatggggaccgcttccagcatgtcttctacttcagctgcagagagctggcccagtccaaggtggtgagtctcgctgagctcatcggaaaagatgggacagccactccggctcccattagacagatcctgtctaggccagagcggctgctcttcatcctcgatggtgtagatgagccaggatgggtcttgcaggagccgagttctgagctctgtctgcactggagccagccacagccggcggatgcactgctgggcagtttgctggggaaaactatacttcccgaggcatccttcctgatcacggctcggaccacagctctgcagaacctcattccttctttggagcaggcacgttgggtagaggtcctggggttctctgagtccagcaggaaggaatatttctacagatatttcacagatgaaaggcaagcaattagagcctttaggttggtcaaatcaaacaaagagctctgggccctgtgtcttgtgccctgggtgtcctggctggcctgcacttgcctgatgcagcagatgaagcggaaggaaaaactcacactgacttccaagaccaccacaaccctctgtctacattaccttgcccaggctctccaagctcagccattgggaccccagctcagagacctctgctctc

SEQ ID NO: 17096 - DNA, 2300 bp, Homo sapien
tactcagagtgagatggagtatgggaaagttttgagctgagaagtgacctgacctaatttatgctttaagtggataattctggcttctagactgagagtagacagtaaaggggaagcatcagcatgggtggagaacatgtggaaggctagcacagtgatcccagtaagagacgactgaaggctggaccagcagccccagtgggcgtggtgggaagggtcaggtttctgatctatttaacaggttgagtggatctccagcggccagtgatttaatgaattatgcctgtgaagtgaaacctccgagaaaaccccacagtcttgtttgtttggggtttggagagcttccaggttagtgaagcagggaggggcagggagagtagggtgcccgggagggcaaggaagcgctgtgcccctcccccacccacaccttgacctcggcatctcttccgttgggctattcctgagtcgtatcctccatcatgaaccgataataataaataaagtgcttttctcagtcctgtgagtcatttcagcaaattattgaacctgccggggactgtgggaacccttgaatttgtcaccaagtcagacagagatgccagtggtctgggcaccccatttgcaactggcatctgatatgaggccagctcttcactgaaaccctaaacctgtgaggtttgatgccaactccaggcagtcagtgtcagaattgcactgtaggacaccagttggtgtctagagagttggtgccagaactggctggtgtgaggaggaaaaaaagcccacacagccctcctccaggccattcctcccgctacatggagtctcacggtccttcacggagtgctcagagcctcccgatcatcccacttttagcacagcacttttccacttctggtcaatctgatattagaatgtcctacaatgtgcttattagccattttttaaaactaacatttataaaatttatttaggccaggcacggaggctcacacctgtaatcccaacatttcgggaggccgaagtgggcggatcacctcggatcagactggctaacatggtgaaaccccatctctactaaaaatacaaaacaattagccaggcgtggtggtgagtgactgtaatcccaactgcccaggaagctgggctgatgcaggagaatcgctggaacccaggaggtggagggagcttgcagtgagccgagatcttgccactgcactccagcctgggaaagagagagagactctaagaccttttgctgaattgaagcctcttggtaaacctatgatgtcccatttaatagatgggcaaactgaggctcaaagaaataaatcaggcacataaggagtccttgtccaagcaagccgtgggttgaagcctgggctctgccagtccaagtgaaaccaaagcatctccagaaattcctggtggtgtgttacatcagcaaatgagtaggcaatgtcattcctcaacctgaagtcattggcatcttgcagattccacgaaagaggaagtctgcccctggctccccgaggcctgcttgcaggaatgaggaaggggctgttctgctttcaggtggaaatgttcaccagctaagtgctgggctgcccagaaggcaaacagccccctgggcctgggacacatgctttagtgcccctggtagcatggcaggacatgcagtgcaactcaagaagctcccaaaaccatgagaggctgggaaaaatgctccctggcccagttctaatgtttcccaataaggagctgcccgggcagacacagggggccccacccatcctgagaggctgggcctgggctgcagacacaactgctcggagagtctgcatcctggctctgcagacaggctctagatgatgggctggcggagtgcccatgtggaggtgcacacaccgtgtttagtatgggcctgtacctgctgcagcgtcagctggtctgggcctgtgctcctggtccgcctatagatgccatgtggcccatctgaatctgtgactctgagtctggcctacccaggcctggtttgatcctaccccctggccacgccccttgtgggtttcctctgggtgacgtttccttcctgctcttgttgactaggcgctgttcttgctggctggtgccccagggcctggagaggtctgaagaaacctgggagccagcagcccggggctccactctgggttctgaaagcccattccctgctctgcggctcctcccaccccacctcttctcagccttgcagctcaagggttgatctcaggagtccaggacccaggagagggaagaat

SEQ ID NO: 17097 - DNA, 2300 bp, Homo sapien
tgtcttctgtttcatatacatttccccattttttttcctttggcaaataatcagcacccaattaattctgaatttcccattgtttgctccagctgtcgagctccttgcacgagcaaagaatgattgttcaatgttttccttgtaatgaactgtgagagtcggctgggtcacttctggttttgaggagaagagcgggtgagagacagaggcacatggagagcttgagaaacagagacaaagaaagaaagagagggacagagagatacagagggaggaaagaaaagaaaaatagagatggagagaaagagagggctgggtgaagacacagaaacaagcacaaagagacaagaatatttggaaatagatacacactcagaagtggacagtcccacagatgcacagagggaaatgcacttacaaagacacacggagagagagagacagagatcctttaacacacacagaccaacagggaaaacacagtgggatacatagagacacacaaagagataaggagagacacaggacagtgatagaggggccaagggagacagagagaggaagaaacagaccccggatgattgaatgatgcctgtgtgagtctgtgtagcagcagactctggtgtcagcataacagtgatcagattggacattactgagtgcccaccacatatctgacgctgtaacaggatccactcacaatctctctggaatgcaggcactggcatccctattctccaggtgaggaaactgaagctcagaactcaataaacatacacacggccacacagctagcaaaaggcaagaggaaatttgaaacaagcgtgtctgcctctaaagcccaagttcttaacgctcataccctgttgcttcccagaagacctgctcttgggtctcagttctgctactgaatagccagctgtgcagctgagaggtgacagcctgctggcagtcctcacagccctcgctcgctctcggcgcctcctctgcctgggctctcactttggtggcacttgaggagcccttcatcccgctgctgcactgtgggagttcctttccgggctggccaaggccggagccggctccctcagcttgtggggaggtgtagagggagaggcgcgggcgggaactggggctgcgcgcggcgcttgcgggccagcgcgaattccgggtgggcgtgggctcggcgggccccgcacgctgagcggccggcccacgccgccagcccccggcagtgaggggcttagcacctgggccagcagctgctgtgctcaatttctcgccgggccttagggccttcccacggggcagggctcgggacctgcagcccgccgtgcctgagcttccccctccccccgcccgccccgacctccgtgggctcctgcgctgccggagcctccccgacgagcgccgccccctgctccaaggcgcccagtcccatcgaccacccaggggctgaggagtgcgggcgcatggcgcgggactggcaggcagctccacgtgcggccccggtgcgggatccactgggtgaagccagctgggctcctgagtctggtggggacttggaggacctttatgtctagctaagggatggtaaatacaccaatcagcactctgtatctagctcaaggtttgtaaacacaccaatcagcaccctgtgtctagctcagggtttgtgaatgcaccaatccacactctgtatctagctactctggtggggccttggagaacctttatgtctagctcagggattgtgaatacaccaatcagcactctgtatctagctcaagatttgtaaacacaccaatcagcaccctgtgtctagctcagggtttgtgaatgcaccaatccacactctgtatctagctactctggtggggacttggagaacctttgtgtccacactctgtatctagctaatctagtggggacgtggagaacctttgagtctagctcagggattgtaaacgcaccaatcagcgccctgtcaaaacagaccactgggctctctgtaaaatgaccaatcagtggatgtgggtggggccagataagaataaaagcaggctgcccaagctagcaatagcaacccgttggagtccctttccacactgtggaaggtttgttcttttgctctttgcaataactcttgctgctgctcactgtttgggtccacattgcttttatgagctgtaacactcgccgcgaaggtctacagcttcagtcctgaagccggcgagaccaccaacccaccaggaggaacaaacaacttcagacgcgctgccttaagagctgtaacactc

SEQ ID NO: 17098 - DNA, 2300 bp, Homo sapien
gaaaggctctgaattctgtgctcagaagggacccgtactggtttaatatcctccttttatctctcgaaattcttgatagtgttttaaaagggggctccatttttattttaggcccttcaaattatgtagctggtcatggagagggctttgcaaaccaaacagcattgcgagactgcacagtgggttgctgttataaatcgtaacgacacacacattcacattctgtaaaggatatatatgtgaagggggcttttctgcaaggttgggactctgaggcagcacagaattcgtctctcacttactgtatcctcttcctgggcttaaggatattaaatccaggtgccccaagaccttcagagcattctgccttcatgcggatggtgcagactctgttctaattctgcacttggccagacatagctatgcaaactgcagcgagtctcttcccgctctgggcgccacctgactgacccgcgtaaggagggactgtgactggtccccaggcaaacgctttccctgccacctgcacctgttgcaagccagctcctcggagccaggccaagcagctctgcccctagcgggagtcggaggcatgaaactcccttttaggaagacggagtaagaggcaccaccacctgctcctgctgcctctgctgtcctcagcttctgggagcatcttagcagccagctccgggtgaggacagggtccaccggtgcacatggcagagcagggcagatgctgtgacttggcggctttgggggaacagggtggggctcctccctgggaaaaatctttaggtttggatccagcctttatttaaagagggggattgtgtatagacttgtgtgactgttcagcctctttccacctcggtgcgtgtgtgtgtgtgtgtgtgtgtgtgtgtgtgtgtgtgtgagagagagagagagagagagagcctgtgggtcaatgcccagtatgcccctctgagagtgtgtctgttagtagacaccagtgtgtgacattgcttctgtgggcaactatgtcaaggcgtgggtttgtcactgtgtgcggtgtggagcagtatgataagccggcggccgacccccgagtgtgtagacgcgggagctggtgtcagggtatttgtagggctgcaattctgtgtaggtctgtctcagattgtgtgagagtgtctgtgttccagcaggtgcttgtttctgagtgtgaatgtgtgtgaagctgtgaccgtctgtctctagctctgcatgggacggtgatccggtgtgtgtgtgtgtgtgtgtgtgtgtgcgtgcgtgtgtggtgtgtgtgtgtattagagtgcactctaaactgtgtggctgtgtgtgtacgtgtgcgtgcctgtcacagtggcccagtctgcttctgggtgagtggggcagagcccagagagtgtgtgtgtgagtgtgggtgtcggtgtctctgggaagcagtgattcgggatgtgtgtgtcaggcagtgtgcggctgtcgctgtgagtctgcatgggagagtggcggcgtgctctcctctgcgcggcagtgccccgtgtgtttgtgggtctgtgtctgggtgtgagcgtcatggtgcgtgtgttagagcccgtggggccccggtgaaaggctgtggctctgggtgactggtgtgtgtgtgtgtgtgtgtgtgtatcagagtgggtggcggcgtctctgctcggcagtggcgcgtgtggcccgccccgcgcgcgtgttctcgcgggccggggcagggcgtgggccccctccggcggagccgcgacccctcccccgggcggcgggaggtgcgcaccggcgcctctaggacccggcggcggccggccgctgtccccgggccgcgcgagtgagcatgtgcagagcccggcgcccgctcgcccgcccgctgcccgccccggctccgcgcccgcccgcccgccccgccgttcagcccggacgccagcagccccggggagccaggcggcggcgccctgtgcccgggcgcgtgggtccgcttgccgcgggcggccggagacgtgcgggcgccggggcttctgggctccgggcactgcggggggctgcgggctcggcgcccggggaaggcgggccatgggcgcgggtgcgggcgccccagccggccgcgatcgcggggtgagtcctgtctctcggcgctccagccggacccccgcgcgggctgcgagcagggtgttccccttgccgcgggcaaacaagtttgtgcagacgcggttgggagcgcggcggggctgcacctgctccggctgcagggcgggcttgccgggggcaccttcccg

SEQ ID NO: 17099 - DNA, 2300 bp, Homo sapien
ggtccccaggcaaacgctttccctgccacctgcacctgttgcaagccagctcctcggagccaggccaagcagctctgcccctagcgggagtcggaggcatgaaactcccttttaggaagacggagtaagaggcaccaccacctgctcctgctgcctctgctgtcctcagcttctgggagcatcttagcagccagctccgggtgaggacagggtccaccggtgcacatggcagagcagggcagatgctgtgacttggcggctttgggggaacagggtggggctcctccctgggaaaaatctttaggtttggatccagcctttatttaaagagggggattgtgtatagacttgtgtgactgttcagcctctttccacctcggtgcgtgtgtgtgtgtgtgtgtgtgtgtgtgtgtgtgtgtgtgagagagagagagagagagagagcctgtgggtcaatgcccagtatgcccctctgagagtgtgtctgttagtagacaccagtgtgtgacattgcttctgtgggcaactatgtcaaggcgtgggtttgtcactgtgtgcggtgtggagcagtatgataagccggcggccgacccccgagtgtgtagacgcgggagctggtgtcagggtatttgtagggctgcaattctgtgtaggtctgtctcagattgtgtgagagtgtctgtgttccagcaggtgcttgtttctgagtgtgaatgtgtgtgaagctgtgaccgtctgtctctagctctgcatgggacggtgatccggtgtgtgtgtgtgtgtgtgtgtgtgtgcgtgcgtgtgtggtgtgtgtgtgtattagagtgcactctaaactgtgtggctgtgtgtgtacgtgtgcgtgcctgtcacagtggcccagtctgcttctgggtgagtggggcagagcccagagagtgtgtgtgtgagtgtgggtgtcggtgtctctgggaagcagtgattcgggatgtgtgtgtcaggcagtgtgcggctgtcgctgtgagtctgcatgggagagtggcggcgtgctctcctctgcgcggcagtgccccgtgtgtttgtgggtctgtgtctgggtgtgagcgtcatggtgcgtgtgttagagcccgtggggccccggtgaaaggctgtggctctgggtgactggtgtgtgtgtgtgtgtgtgtgtgtatcagagtgggtggcggcgtctctgctcggcagtggcgcgtgtggcccgccccgcgcgcgtgttctcgcgggccggggcagggcgtgggccccctccggcggagccgcgacccctcccccgggcggcgggaggtgcgcaccggcgcctctaggacccggcggcggccggccgctgtccccgggccgcgcgagtgagcatgtgcagagcccggcgcccgctcgcccgcccgctgcccgccccggctccgcgcccgcccgcccgccccgccgttcagcccggacgccagcagccccggggagccaggcggcggcgccctgtgcccgggcgcgtgggtccgcttgccgcgggcggccggagacgtgcgggcgccggggcttctgggctccgggcactgcggggggctgcgggctcggcgcccggggaaggcgggccatgggcgcgggtgcgggcgccccagccggccgcgatcgcggggtgagtcctgtctctcggcgctccagccggacccccgcgcgggctgcgagcagggtgttccccttgccgcgggcaaacaagtttgtgcagacgcggttgggagcgcggcggggctgcacctgctccggctgcagggcgggcttgccgggggcaccttcccgggggcccggggcggctcggccggggcaggggagagtgagcgggtgcgtgcaggggttgtgggggggcgggggcggcgctcggcgcggccgggatggggtgggggtgcgcgaggcgccgcacgagccgcgtccccctccggagtcctgagagcccgtccgtcacccgggagggcgctgcggttggtcccggggagggggcgagggcagggtgtggggtgcgcacagcttccctcctaggcggcgacgtttacccagaagcagctccctctcgttccgctaccaagagaggcttccggtcagcggagggtttgctccgtctcttggtgaacttgaacagaggcagaggcaaaagcaaaacgtatgtattttgtccagaaaattacctagtgtagagctttgcgtcttcgtaggtgtggacggagactcacgactgaaggttgctaaattgcgtttttcttggctactcaggagcgtacgtacctggctgggtcccc

SEQ ID NO: 17100 - DNA, 2300 bp, Homo sapien
caagagatgaggctggatgggctggatcatgaaggggcccttgtgtgtcatgctaaggagcttagagtttatccagtaaccacagggggctattgaacggggttttaagcagggacgcgccatgatcagatgtgcatgttaggaggatcaccctggcagccttgtggaagatggattggagggtccaaagctggaggcagagagatcagtcaggatttcttgggattttctctgtggttttacaaatctgatgaggttgtctggggtgggcctggcagacatatcagcctagaaaatagaagctctggagaaccgtctgcaatttcccagcccagagtttaattccaccttcatttgctgattactgagtctgctacctccgccccagcctaaaggaccagccgacccagatttccagatctctgctctccccgagggcctcggaacctggcggccctcgccatttactcagagagggtcatgcctatctggggtctttgtccgaagcctccaagctttctgggggcctggaatgccagcccaaacattgtccttcctctcacacccgctgtctgtccctggtgcacagagtagccattgagtggctgcacaggcctggcggggggcccggaccaagttagttacgggcagtggcttagtcacgcttctaggggcctttttttctgggataagcctgtccttgtgctaagggctttgctcacgcaacagcccaggtcgtggcagctgcaaaaccctctcccaaccccaacagcacacttcagaggtgccgccaatgagaaccgaaacccagagtgacagctgagtcctggggagtggagagacccatggaaggcagatcagagagccttctgccttctcttctctgggtgctcagcctctgtttgcaggtgcacggctcaggcgctaccctggtcctttgattctggcctctggagtccaggaggcctgggaaggctacacaagcccctccctcccctgggccccatcctgtgtgaaagccaacgaccagcctgtgcagaagctccttccaacccaggctcacagttccagtgcacccctgggagtcagctgattgcatgcatatatcaagcatctgcaacatagtcctgcctgggctaggtacatttatatgtggtagtgtctcattgcaggctgggccatgcagtcattgagagtccaggctccgaacacagactcttcaaaaccttggctctcctgtttaccagctgtgtggcttgggaaaaactagctaatatgccttcttttgccagtttcctcatctgtgtaacagggatatgatatctctaggttgttggattggtttcagggttaagtgagataatatgtaaagtgtttagctgagtgcttgacacacaggaagggctgaggaagagcccctgctgctgttcctcctcccccttattgatattgctgtcatcactgactcctcattattcctcaaggggagagctgttgtccccattttacagatggggaagctgaggcccagcaaggttaagcaacctacccagtgtcacacagctggccagtaacaaagctgggatttaaacctggctttgtccagtgctcctgcaacacagctggtccttggataaagcaagcacagggtgaggggtgtcccagcctgggagtgccaggtagtggacccgcctattacatctcggtgctctttctccaccttccagatttctgcgccaggagatgaggggcggtagagccctggaatggagatgtccttgacgcctgggcagaggctgcagctgcaggaccctgtggccactggagataagtaatggtgccatttgaacacctactggaaacggggcaggaacagtgagtgaccccaggcgagcacaggcaggtgccaggagccaggatgcaaggatgacgcctccggaggccctggcctcactcccacctgggcgctaggagccatcccggggctccagccaggagccctgctgcccaggggcatggccaaacctttcttccgactccagaagtttctccgccgaacacagttcctgctgttcttcctcacggctgcctacctgatgaccggcagcctgctgctgctgcagcgggtccgcgtggctctcccacagggcccccgggcacccggccccctgcagaccttgccagtggccgccgtggcgctgggcgtgggcttgctggacagcagagccctgcacgaccctcgagtcagcccagagctgctgctgggtgtggacatgctgcagagccccctgacccggccc

SEQ ID NO: 17101 - DNA, 2300 bp, Homo sapien
tcaatactctgatcctcaactactgccagtgcctgctgaagaaggaggagtactatgaggtgctggagcacaccagtgatattctccggcaccacccaggtgcgcggggctgcaggggcggacagtgagggggcgcccagcccagggccacggagacacctgccatagccttcctggacttttctttccaccccaccagggcaccaaaccttgtctccacccagccgggtttccccgagtgtgtaactgaattgtgggtgatggatgggcagtgcttggcgcggggcggccctttattttaatgtgtgtttgaacacttacccaggaagctcgccaagcttgtgatttcagcggaacggtaaacaggcgtttaaaaaagaggggcaatcaatatagggaaaaatattatgatgtcggtactagtactggtgttgcgaggatatggcaccgtcagtactagtattgacttaatgctcgaatcgtgctcacagtaaaaacatccagcccctggctcatgcatcaggcacacgtcgtctgcgtttattatctcatttaatcctcataatcctcataatcaccatatgagggaggtgcagggaaagggcctgaaggttatctaatttaggtagcgtctataagaaaaataaaacaaagttatgaatataaaattactcacagggccttaaaaaggagaggaggaggtactgctattatgatcatcatctccatcttacagttgaggaaaccgagggatgggggatacagagaggttaaggatcatggcggggctgagggtcttggaggctggtgagtcccagctgggctggggctgcctctgaggctgggaagggagctgtagctggatgctccctgctccccacaggcatcgtgaaggcctactacgtgcgtgcccgggctcacgcagaggtgtggaatgaggccgaggccaaggcggacctccagaaagtgctggagctggagccgtccatgcagaaggcggtgcgcagggagctgaggctgctggagaaccgcatggcggagaagcaggaggaggagcggctgcgctgccggaacatgctgagccagggtgccacgcagcctcccgcagagccacccacagagccacccgcacagtcatccacagagccacctgcagagccacccacagcaccatctgcagagctgtccgcagggccccctgcagagccagccacagagccacccccgtccccagggcactcgctgcagcactgagccccctgaggcccacagccacccaggcagggagcaagtggcctggtcacttctggttcgattgaccaggatcgtggtgtcactttttaaaatttaaaattaatttttgaaatcaaagtcagacacacccatggtaaaaaaaaaaaaaaaaacaatcccaagggtacagaagagcttatgaataaaagtagttttctcctctacccctctcattccttccgtgccatggttttaattgaccctgtttttaattcttctggtagttttctctatttccaagtaatctgtttaaatcagtttctagattttaccccatgtcaatgacaaatgaggatttgatgctctgatcctttctcatgcctgatacccctccctgtctccccattttggatagttacatttgggggtcatctcggtgatttttgtaactttacgcaggacacttagagctctctagaatcccactgactttagtgggtcttgatgtagggtgggcaagccccgacactggagcttagcctgagagggttcttggcctcccccaggaaagatttcaaaggcaagcgccagtggtagggtagaagaaaacagctgtggtcgggcacggtggctcacgcctataatcccagcactttgggaggccgaggcgggtggatcacctgaggtcaggagttccagaccagcctggccaacatggtgaaacctcatctctactaaaaatacaaaaaaactagctgggcgtggtggcgggcgcctataatcccagctacttgggaggctgaggcaggagaattgattgaacctgggaggcggaggttgcagtgagccaagatcacgtcattgcactccagcctggtcaacaagagtaaaacttcatctcaaaaaacaaaacaaaacaaaaacaacaacaaaaaacaaaagaaaaacaaacaaaaccaaaaccaaaacagctgtattgaagctgcagtgttgcagctctgtgactgccctgcagagcagggctaccccataggcagcgagcagcagctcagggcagttctgcagtc

SEQ ID NO: 17102 - DNA, 2300 bp, Homo sapien
agagagaaggggaaggttttcagcagccttctgccttccagggatggagactggacccttggggatctggccaggattccctgggcctgaccagttggcccaggtttggtctcctctatgccaatgactcctcacgggaagcaagactttcatgagtgccggatttcagggtgccattcactgctgcagccctcccaacttcccctgagaaggagcaggagaggtcaattttctcatttcagttgggaaaatgcagttagagaaaacgagagacatccaaggcaacaaggtcagtaaataggaaaggatcagccctttgaacttagctgtatctggctcagtccagtcttcttcttcttcttccttcttcttccctcttccctcttccctcttccctcctcctcctcctcctcctcttccttctccttcttcttcttcttctgacacagtctcactctgtgccccaggctggagtgcagcagcatgatcttggtgcacagcaaccttcatctcctggattcaagcgattctcctgcctcaacctcctgagtagctgggattacaggtgcccaccaccacatccgactaagttttgtaattttagtagagatggggattcatcatgttggccaggctggtctctaactcctgatctgaggtgatccacctgccttggctcccaaagtcctaggattacagccatgagccactgcacccagcctagtctagcattttttgttttgttttgtttttttgagacagagtctcgctgtgttgctcaggctggagtgcagtggcacgatctcagctcactgcaacctccgcctcccgggttcaagcgaggctcctgcctcagcctcctgagtagctgggattacaggtgcgcaccaccatgcctgggtaatttttgtatttttagtacagactactaaaaatacaaaactcctgacctcaggtgatccacctacttcagcctccttagtcccgtgtttttatctctccctgtagcagagtcctgcaccccttccctctgcaaccggtgagcctggtgtcaggaagagaatggtttcgtggagctgagtccagtgccctcagggtgcggaggtgtaggagcttgaactggccacacggtggtgccaaacaccaggtcttcgcatttatgtttcccagcccttctgggcgtccctgatgccctcaataaactctgcctggttcccagggcacagggctaagggcctccaaaggggaggggaggggaggggaggggaggggatacccacccttcccccagccagaccttgcaggggaggcaggagcggggctgcggagggcgcctcaactttacccaaacccaccccgcctttcgttctccgtcttccttctctcccaagccagaaacctgtcccctcttgccttgggccaccatcgcagggcctcctgaaggcagattctggggaggggagggggaacagggaaagcagaaaggtggctggatggcaaagggcagctgtcaccccggctggcctggggtcctcggggacttagagtctgggcccagcccatgcctcccctccttttccccttcagtggcctccaggcctctctccacatcgccaggctggagtgcagtggcgctatcttggctcactgcaacctccgcctcccgggttcaagcgattctcctgcttcagcctcccgagtagctggaactacaggcgcccgccaccacccccggctaatttttgtatttttagtagagatggggtttcaccatattagccaggatggtctcgatctcttgaccttgtgatctgcccgcctcggcctcccaaagtgctgggattacaggcgtgagtcaccgcgcctggtcccctgtcttctttaagaaagctcagcggacctttttccttcttggggtggaacaaaaagccaaatctagcacaaccctgggcaggggcccagaatcactggaagcaaaggtggatgggataggaggcgaggctgcctgtggaccacaggcccggcccgagtggctctgatgagaagccggggcgcctaggtcaccgcccccaccgtctgcccttccccccactcctcctggctgggtaaatcccagagtctcagccgcctaagtgtcttccccggaggtgagattatctccgcctgtgctggacacctccctttctcctgcagccatggatgccgctctgctcctgaacgtggaaggggtcaagaaaaccattctgcacgggggcacgggcgagctcccaaacttcatcaccggatcccgagtgagtggg

SEQ ID NO: 17103 - DNA, 2300 bp, Homo sapien
aattttaaagaaaattacaaagtagctcatacttagaaaataatatatgtacaggtatgtgtatacacacgcatttataaagtgatacgtataaaattacttacatatatggtttaaagaataataaagactaggcaaggtggctcacgcttgtaatcccagcactctgggaggtcaaggcaggaggactgcttgagcccaggaggttgagactgcagtgagctatgattgtaccactgcacctcagcctggacaacagagcaagatcctgtctaaaagaaaaaaaataaaaaagaagaaagtaaacatccatgtggccaccacccagcctacaaaatggaacattatctttgaagtcctttgagccctttcctcattacatcctcttctcctgccacccttccaaaaacgacgacttattttattttggtgtttcaattcctttgctttccataatagctttgtccacaaatgtatgtgcatattcctaaaccatattgttgagcttttttgcgtttgaatttatacagtgtcatactttatgtttgtctgcatattgcttttttttaatctaacatatttctgagattgacttaagttacaccatctggctacaatttgcttatttttcagtgctgtataatattctataatttgaataaataacaatttatatgtcttaaaaaatgccaccgatagccaggaacggtggctcacgtctgtaatcccagcagtttgggaggctgaggcgggtggattgcctaaggtcaggagttcgagaccagcctggccaacatagtgaaaccccatctctactaaaaatacaaaaaattagctaggcgtggtggcaggcacctgtaatcccagctactagggaggctgaggcaggagaatcgcttgaacctgggaggcggaggttgcagtgagccgagatcatgccattgcactccagcctgggcaacaagagtgaaattccgtctcaaaaacaaacaaaaaatgccaccgatatatgaatttgggcattacatttccaacatgtgaaatttgagggacacattcaaaccatagcagaggatcaagtaagttaataaactgcaacaccggtacctgtgcatactaagtgccatatacacgttaatcattatcatcatcctttccttggaaatcactgaggccaaaggagtgggtgagaccacccagaaacggagagggctgaagacagagtctcaagaagccatcatctcaggctcttgtgcggagaagtaacaaagaaaccagccgggggagtgggcagcactgctctgaggtcaccgaaaggagaaagatgagctggagagagctttataatggctgcatttgtttggatgctaaggagaagagaggcaggcattccgctggagagagggagggatgcgtggggcaaggcgggggcggggagccggtgtagacgggtggagggcagaccggtactctggtctatccccgcttccgggacgcgttttctagggagggcggagcgtggatggcgagtatggggaactcagagagggacagtgtcttgtcacaggaagggagggtcaggagggaaatttgaaagaaaacgtctctgggaacccagggctctgcactgccagtccctggctccttctgacaaaaccactgagcaagaaggaaaagccagaccccttggcaggatgagaggggtctctgcccgctgccgggcctggggcctggggcctgagccaggaggcctaggtcccaggacctccgcctccaccccatgggtcagagcagcctgaaccctgtgcgcgctccagggaggggacccggtgtgcgatgcgcgggggctgggctagcaagggcagtggcgcgagcgggacgcaggatacaaagcccggagccacgaggctggcggcggggcgggggccggagcgatgaatgggcacggccgggccaatccaagcgcagcatttgcagccgcgagagagggagccaatcggatccccggggcggtggcggtggcgggggcggggacggaaccaatcagctgtgaggacggggccgggggcggagccgcgcagagtttcaaatcggctgcggtgggcgaggagcagctgtgctgcggctgtgctcggccttagtggtgtcgggtgagtgcgggctgggcacaagtttcgcccttgttgcccaggctggagtgcaatggcgcgatctggactcaaaacaatttttttgttcggaggggagggcatcaggttctgttcacaggggagggcatcaggttcggacacgcacggcct

SEQ ID NO: 17104 - DNA, 2300 bp, Homo sapien
acttggattcttcccgggacagtgggcacctgggttggaaatggttggaattctgtgtgtctcacatttttctccttaagctctgcttcatctgtgggctggggctgggggtggggagaccaagctgtttgcatctgtgtctgcgggttgcctggaacaggaattacgatgaaagccctgatcccagcagaacagaactgacgttagccagctgagtgttgggcaggctgggcttgtctggtacacagtgcaggaatcctcagtgtggccaacacaaagccagcatgacgaggcaggcctgccagtgtgtaggatgctcaggcgccccaggtgctcagcctgtttttgtaagtaacatttgattggatcccagccatgcatatttaatcactgtccatgggcgcttttatgctgcaatggcagagttaactagatgcaatggagaccacacggtccatgtcgtctgaaatattgactctctggccctttgcagaaaaagtttgttgattccttttctagccaaatatcagccaggccttggtggccagtgctgactgtaggtggtgtgcagccggtggactctcagccccgccccagagatggagggttgggcacttcacgctcagaattcaggctgcgctgctgtgtgaacactcccgcattctcggtccttccctgacctgccctgccctgcgtcctcctccctccgcagcatccactccagcgtgctaaaggatgagtctgagaccccggcggctggggggccgcagctccctgaggtcagcctgggccgctttgacttcgatgtgtccgacttcttcctcttcggctcgccactgggcctggtcctggccatgcggaggacggtgctgcctgggctggacggtagggatggtgtgggctggggcctgaggtgcctgtgcgtcactagggccaccgtgtcagggcctcagaatgaggagagtgaagtcggggacaggggcagggagggtcacagagttgggataggtggaaagagaggagagagggtggggaagaggagggagagaggagcagcttccctcctgacacagggcgaaggtgaggcagcttcagatggatttcactctccatgtcaagtgcccctggctgctttgtggcctcattgtccggtggtcacgccctatggggaagagaagacagaatattcaacctcttgcctcccaccctctccttctcctgtactgaggcagatacgactgccaggttggtctcaccacccacccccgcatatccccaagcccacctcaggtgcctttgctcatgcaatacctgcaacctttttttttttttttttttttgagatggagtctcactctgtcacccaggctggagtgcagtggcgcgatctcagctcactgcaacctctgcctcccgggttaaaccaattttcctgcctcagcctcccgagtagcttgaagtacaggcacccaccatgacgcccagctaatttttgtatttttggtagagatggagtttcaccatgttggccaggctggtctcgaactcctgacctcaagtgatccacccgccttggcctcccaaattgctgggattacaggcgtgaaccaccgtgcccggctaatacctgcaacctcgaatgccttttcctgctcctctaaaatgtacacaccaggcgattggcaccagcaggcatgaggggtggggagggtatctgtgactcttaaggacagaagtacagaccgtctgaggctgcagggcaccttgggtatccacagatccatgcttttggccaaagcttactgacaagctacagtatggaacagataaagtgggtggtagaaatggaggcgaggaggcagaaccccatggctgccctcagtgtcgctaatgaaccctagggctccctggatgctggacggtccagtccctgttctaggaggacagggaggcccgccgatgaggtggatgcctcagtggagacacctgctggtcagcgagagaagtgttccaccagctctggcaaacctggaactctagcagcaggcctgggaactgagtgtttatagccttgaggcctgtggaaggggcagctgacctgcctgaaggaacctgggttggcttcctaggtcaggtggtaactgagtgaaaactggaagaatctaaaggagttgccccgtggaaatgggggagggagggcccacaaggagaagggatgttttgagcaaaggctcagagaaaggaaagctgcaagcctgattggggaagggcagctgtgcagcacggctgcagtgctgggt

SEQ ID NO: 17105 - DNA, 2300 bp, Homo sapien
tgcatccctaagcacacacaagcacacacacatacaccccatgcacacatacccaggcacacacacaaacacaacgtgaagctgtgcccagaagcaggagggcccttgatgccctctggtcactgctgctactgtgagccagggctggggaggagctcaggcccaggcgtgtcccctctgtggcaggcgcattgcttcttctgcagccagcgttctgtctcctgcgtgaccactcacacctacagaccaggtggccaagcctggacattgtccaggctatcaggcctctgaaacacctcagggaagggtgaggccagtgaggcccagtagacaaagcacaggggcctgaaattgatcctccatgaccacaagcaccgaactttcttagcccccacttcgttatgtgtatgctgaggataacgcaatgtagctgagagagtacatgagggtaaataccgcctgttcaatcaatagtccttgttattctcatccccagtcccattctcatagtggggaaaggctgcagggtccattcctgctctcccagctggtgaccaatggcaggtgctggtgaacagcgttggattcaggagcccagagcttctgaaattctacatctgttggagttggtgctgtcatctggctctgggatccagagctcttgggactcatgggtttcctgggaggtgagctctggcaaacgtggatggttgttctccctgggtgaatccatactagggagtttgggtagaaggccttgggaagccctggttttgttgggtgaggtgtcggaaggcagagcagaactcatggatgggacatgcgggttgtagatttcagctcaaacgagtaagaacattcttaaggccagcactagccaaaaaaaaaaaaaaaaaattaataaaaggaagaactctcacttaagatactgagcttcctgtccttggaggtaaccaaccaggagctggaggactgcttagcaggaatcttgtgaatggagtcaaagccccagagaaggcactggactgagagcccccatctaaccccatgtgtgccctgtttccatagaggagcttgcaggaccctggagcctggaccatggatggaattctccagttgaccttttccctgttaagtggagtgggacagggtgggttgggtgcctggctctacagatggtaactgggcttcagccttaccaattcctgggggaggcagggcaccctctcagtggagggttgttacctctcaggcaccgccaaatacaattggccatctcctgctctcttttggggctggactgtggatccctgctgcccctaaacagaagtcataacccatatctccccggaccacaaggcctgtccactagaatctctgcatcccgatttaggaagtggaaggcgggtactgctcaccaccaggccgctggggtccacaaagcctgctccagcctagaaccccaggtggatgtgcaagtgttttacttatcccttgagggttaaaatcacgggaatcctttctcttttgaggttaggtcagacgccataaatgatccagaacccctggagcgggggctgatggagggggtccctctcttgtctctgatcccagagcgactttcctcttgacttcgtgggggcctcccttggatccctgtcctccttcctctctccgctccctctgtccgtctctcccggagccggagccgggctctgggtctctggtctcctctgaatttctctctctctccctccacctcggcgttctggccctaggagcgtctctctccagcgctgtctaatagtctgtgcgcccctctcccagtccagggccccgtctctggcccgcagtgtctcgggctgtctccgcgtctctgagcccctgggctgccgcccctcgcgcgctgcggtggccgcgcgggccggagcggagcgggctggagcgcggcggccacggcccggggcgggggtgcgggcccgcgggggcggcgttgggcgccttccttcgtcagtccctccccggcggcgcggggggtggggtggggggggggcgcggccgccgctcggcgcctttaagggagcgggagggagcggcgaggcggcggcggctgcggtggcggcagccgaggcgagcggggcgggggcgcgggcgcggcgctcggagtccgttcggggccggaggcggtcggggccgggcccgggaagcgcgaggagcgcgcgtagcgccgccggagcccgccgcccgggacatggccaaggcgggccgtgcaggtgagggcgggcgcggggagggcaggg

SEQ ID NO: 17106 - DNA, 2300 bp, Homo sapien
acctgctgcctgctccccaggacatgatgactctgcagtctgcgcagctccccgtgaccctggatcacccccagagcctgtctccacccacacaggctgtcccctttccctgaaccctgggtcacctccacatctagtttcctcttcagcagcacagggcaccccaacagagtatcctgtgccccacgggccgggcatacccacagagtctgtctcctccacagcctgtctcctgtaacacacacctgcggcacccacagaagtaggctcctcctccacagcatcggacacccccacagcctgtcccctcccccatacgccaggggtggccccacagactgcttcatgtgtcagagccccaggaatctgcggggactgtcctctcccccacagacctgcagcaccgccacagccgagctctccctccatggctctgggcgctcccacagccccagtccaccccacggtcccaggctcgcccatagtctgttctttttcacaagggcctgagacaaacccatagcctatctcctccccagtctcaggaacccccacagcttctcccctccacaggtgcggggccatttcagaacttgacgccaaagccccaggcacactcgcaggaggcaccctcccagcctgtccctgtccacagaagcctaaggctctctcgtaagctgcccctaagcccagagctgtgggccctgagggggcccgagggatcccccttgcctgttccttcacccagggccctgtaagaccgccgcggcttgtctctacccaggaagctcggccaggaacacccctttcgacaggtccctctcctgcaggcacgggatggagctcgactctacttccttccccacatcccgaggcggccctcatagcctgcaccttcagccacaggtgcagaatgctctcatggcccagagatcccgggcgaccttttctctcgcagccccggggacttctatcttcggtctcctcctccccagacccggtcacccacacagccccggcaagccccaccacctcgggctcccccacagccccgttcacccacacagccccagggtcccttgcagcctcgatggagcctggggtcccaggagctcccaaagcctcattcgccccggcggcgtcggctgtctccgccgcttgtctcgtcccccatggccgctgacggccctgtggcctttctgcactcacacagcgcgtctcccactccgagggcttcgcccggcgccttgctccacggcctcgggacgtccctgcgccccgtctcttcccccacggccgccgaaccccccgccccgacctgctgggccccacgcagcgacccggcatcttagccgcctgctctccccggcgcagcctgggcaaggccccacggcgagtctcccggctcatagctccagggcagttcccttcctccctaccgcggccctgggggatgtcttagcacctcgctccctaagctgctccacacacgcactcacacactccgctccggccttgcagcctttctccctccgagcccctcacccatcccacccccgcccagtctcgggaacccgcccccagtcccaggcccccgtaaagcctagacggcagaaaaggtaactggggggacaaagcaacaaaggctttccgagtcagatctcctctcccccaagtccatgactctatgcggcttcccagaatcccccccagccccggcccgagcccacctggcctagggtgaggcgcggctactgggaggcgggcaacgggggcccccaacaaggccgcgcttccggccgcctgcccagtcgccatagcaacaggcgcagggcggcttgggagcctttgaggccctgaactatttaaggatccaggtgttgcaaggcggtaagttttgcagccagtgtccatgaggtcggggctgggactagattagggtagatctaagcctgggcttgggagtgcagctagcgcagaaagatctgaggaactagagcaaaaagccatgcggatggattgtggtcgtcagaggctcccgtagtctttagcggcgctggcttccgcaggctccgccctctcttgcccacccggaaacagcctcgccccgcctacgcgggacccaaccgcggcgaccggacgtgcactcctccagtagcggctgcacgtcgtgccaatggcccgctatgaggaggtgagcgtgtccggcttcgaggagttccaccgggccgtggaacagcacaatggcaagaccattttcgcctactttacgggttctaaggacgccggggggaaaagct

SEQ ID NO: 17107 - DNA, 2300 bp, Homo sapien
gtaagatgaatcactaacatacttggctcaagagacttaaaccccaaataccaggaagctccacagactaaaacaggagacagcaagcccagtgccctcttcttcccctcaactctttaatttaggatcccaggggcatgactgaactagaagagatgcccttactttttaaccagaattatgaattaaacagaaaacaactgttgatgcaaatgttttaaggaattatgagtcaacctactttctggttttttaagagtgacttaacatgaaaaagacctaatagctagatatttacattatcagtttattgggattggccataggaatggactttcagcagcactctgaacaacaatggaattgagatgaaatgtcaagatcttttcaaatctggatccacagcaagttaaaagagttctgacagtgaattacaggcccagcatatttaaagatacttactgttccatacttaagtagtgtaggcactgctgttactttcaagttttttctgaagtcattatttggatctttccaactattcgaaaagaaaaagtgatcatgaaaaaaatttacttggtttattacagtttgcttaatatttgacatagtcctacatttaattttttagtaatcactgttcttgcaaacacttaaaaaaccttgcggactatggcttaatctactaattaccctgtgcaaagtttcaaagtgtgactaagatataaaagtaaagccagctaagttctgggcttacaccagaccaaattcgttgaattacccttacttaattcaggtgggcattttaaatttgtatttaatagcttctaattgtttaacttgtcagacattaccttgtaagacaaactgggtaagtaagtccctgaggcccttcccgcctaagtatgcaatttgtgcacgtctgcgaggtagattatacattgccacttactaaggcttttctcctacttggcagtagatgaacacacatccttcactaatgtgcttcagcccctctcgtacgactggttcagctttaaaaaaagttgagataaaataatcgcacgtcaactctacaatcaggcacgtataaactgtgttctttcccccttcccccagtcttggtaagcactcagactttaacctgcagctaactgaagaggtcaacacaagtcaggtgttcccttctggtcttagagccacgttaagggtaaggaccaaatcccagtcccgatttgcccctgcaccaccgcgcccgtaacaatggaaagcacatgtatttgctgaccaactcacgtatcctgtaagacactaatggtactgggggagtgagaagttttaaggaactagattccaagatcatccgggtaaggtggtaaaaggaagagcgctcttggcagggcggggtaggatttaatagaaggagacttggggacagctcagattgctccgcggatgtctggaaccaagactctgcctccgctaagccccccttctggccgtaggctcgaccttcctgccatttccattggacagcagcccccgaatcccggcctcaccctgcacgcagtcggggcaccagcttttccccccggcgtccttagaacccgtaaagtaggcgaaaatggtcttgccattgtgctgttccacggcccggtggaactcctcgaagccggacacgctcacctcctcatagcgggccattggcacgacgtgcagccgctactggaggagtgcacgtccggtcgccgcggttgggtcccgcgtaggcggggcgaggctgtttccgggtgggcaagagagggcggagcctgcggaagccagcgccgctaaagactacgggagcctctgacgaccacaatccatccgcatggctttttgctctagttcctcagatctttctgcgctagctgcactcccaagcccaggcttagatctaccctaatctagtcccagccccgacctcatggacactggctgcaaaacttaccgccttgcaacacctggatccttaaatagttcagggcctcaaaggctcccaagccgccctgcgcctgttgctatggcgactgggcaggcggccggaagcgcggccttgttgggggcccccgttgcccgcctcccagtagccgcgcctcaccctaggccaggtgggctcgggccggggctgggggggattctgggaagccgcatagagtcatggacttgggggagaggagatctgactcggaaagcctttgttgctttgtccccccagttaccttttctgccgtctaggctttacgggggcctgggactgg

SEQ ID NO: 17108 - DNA, 2300 bp, Homo sapien
tggtgagatgggaagggtggtaaaagacaaggtcagaaaaggcagggccagatcgtataaggctttagtccaagaaaaaagactggattttattctgcatggaatggaaagccattgaaaggttctaagcaagaaagtaaagtgttctgatttatatttttaaaagattaagctggtttctgtgtagaaagctgttttgcttggtttgggttggggtggagatgggggcaggaaggtaaaagtggaagcacagataaccagggagtagattactgcagtgttacaagttagagatgagggtgtcttgtattaagacggtgataacaaaaagaagtggagagattccaaatacatttttgccaatgtgaaactaagaaatctattatataataaagtatacacatgcttaggattataaaaattaaacttactttagatacttggcatattctgggtctttccagtaaagcaagtatttaagataattaacaaaagctttgtctttgaagtaacctctttgggcaagaactgaaaagcattaaaaaaaaaaatctgtaggtcaaaccaatccttaaactgtgatttgttacccctaatataaaggatctatttacataacacccccaccaccaacacacattggattcaaaacacaagtcccagtacgcaattatatctatataccagcataagtgtaatgtcattcaactgagaatgtgtaaaagtagatactattttgaactgcaactcttctgtcagaaatcattaatagctactcaatttaatgaggtgcttaacaacttacaattaaggtaatttgggttggctaaacattgcacaaattccaactccaactgaaaccgaagtcgatttccagcatcatctaggagacaagacagcaaaaatcatggaaaacaaaggtcactgtatataatactgatttgtagtaaggaaagagcaataaagaaacctgactaatgttgagatggtcttcctaaactaggagtgggaggagataaaccttccttcgaaatctaagaaaagcggagccctgattaaaaggagtaagttagaagtttctctaaagttaaagagaaatcatcaaagaaaacagcaacacaaacggagaattcctaccactcgtgggccactatgtaggaattttaacagtgatcactaaggtaggctgtaataactgtggcttcccctattttaataatgcgttgtaacaactgttaacagtgattaagtttcgcaaacgctaggggctgaatcagtaaagaaaaacttaggatgcaagagactgcggagagcctaaaagatcatgcagcgcatgcatataagaagcaccagggtcaggagatcgagaccatcctggctaacacagtgaaaccccgtctctactaaaaatacaaaaaaaattagccgggagcggtggcgggctcctgtagtcccagctacttgagaggctgaggcaggagaatggcgtgaacccaggaggcggagcttgcagtgagccgagatcgcgccactgcaccccagcctgggcgacagagccagacgctgtctcaaaaaaaaaaaaaaaaagaagcaccagtagcagaatgatacacaagtctggcgacgatatttcaaacttaggcaagctcatgtgagaagcagaaaaccaatcaaggaggacacggtttaacacacaagtcctctcccttagtctcacccacgccagggagctggtggggtggtgtctgaatagcaaagatgtgcgaacaaaccaaatcaggaaaactgcaaagagtaccttagtctttctagacgctacaagagccttctctcctctctgtccaaatattaaccctgccaagagtaaggcctggaaggaggccacggggaagaggtctgggtcaaggagagttccatctgcgaagactccaagatcagagagctactcacctgtctccatagcgacagcagcggccataacaaacgaagacaccaaaacgccaccagcctgacagagcaaaagcccagagacgcgggcgaagttccggaaaccacggctccctcttccggtcccggggcactgtgggatatggggcggggcggctccgcccatccccgaccagccctgggatggctccacccgcgctggctccaaaatagcgagggggcggggcccgggccgtgggagcgcctgaggggcaggagtccagtgttttagccttcgaaggaccatggtgcttccacgtcatcgtgttgtggcgctcccggctatggcagtaccgtagttttcctctcttctg

SEQ ID NO: 17109 - DNA, 2300 bp, Homo sapien
ctgcttgcttttaactcctctcttccgttctgcttccatgtctatataattgcttctctctcactccagccacactggccttctttctgttccttgaacattcaaagctggttcccatccaccctttgtatttgctgttcttctgcctagaatgcacctgttccagatcactgttcattcacacatatctcagattacatgttaactaatcagcaaggccttccctgaccattttatcaaaagaagccacttacttccattctctatcacattacccatgtatttccttcatagtgctaatcacaatagaaaattgtcttgtttcatcattgcttgtctgccttttcaccagagtgtaagctccactagagctgggactttgccttttttactgctatagcccaagttcccagaatacagacagttcccaacttaagatggtttgacttatgatttttcgactttacaatggtacaaaagtgacattcagtagaaatagtactttaagtactcttacaaccattctttttcacttttagtacagtatgcaataaattacatgagatattcaacattttattataaaacaggctttctgttagatgattttgctcaactttaggtgttctgagcatgtttaaggtaggctaggctaagccatgatgtttagtaggttaggggtattaagtgcattttcaaattaccatattttcaacttacaatagtttcaacgggaggtaaccccatcgtaagtggaggaacatctagtgcctggcacagagccggttctcaataaatataactcttctccatcttcttcaaacctcaggccaggtttcagtgacctcctctcactttctaagattatttttgcttgctggtgggtttactgtcatttttaaccacatctaacctaccttaaaaaagtgtatggatgggggtgccaggtacaaagacttagcataaagaaaacgaccatttactttgaaacataaacaaaggccaattaataatttatgagtctgttccttgtccctcgagtttttagcaggcatggaatcattccacaggtcattatttcagtttggtctctgttcctaaggggtgaaggttttctgagggctgtggatcccaaactcacctggctcagaggctcaaacagcctctctttgtccatcaacccgatttagacagcatcctgggcctgaaaaccttctgtgctggcttcaagtgaaaatagttcactgggtcaaaagtaggctggtccaagacgcaggacggtcagtaaacgttggctgtgttcagaaactgcggcttggctgtttcttacattgatttatggtttgtttccatgaaaccgaaaatgattggtccacctggcagctggctggctggctggcaactggaggcctttctgtcctggctgagggccctggccccttggtggcctttgggaagcagcatctcatcgggccgttttttcgttctggcgggcggccggcttggccgcggggtcgggctctccgcgcagtgcagagacgtctccaccctcagggacgaggctctgacgtggcgggaggtcgtttccgtgcgctgcgaggaggattccacgtgccgggaggacgcctcgaggatgcgagggagccgcttccccgagggggagagggagggcccctcgctgcggcgctgggaggtctccacccgccgggacgacgtctccacgcggtgggacgaggtctccacgcggaccgtggacgtctctgtgtagcgggtggtccccacccggggcgaagactgcttggcccctcgggctgaggccattctgccggcgtgagggggccagggaggcctcggggcaccctacagcccaatggtcaccgcaggcagaagagaggaaaactacggtactgccatagccgggagcgccacaacacgatgacgtggaagcaccatggtccttcgaaggctaaaacactggactcctgcccctcaggcgctcccacggcccgggccccgccccctcgctattttggagccagcgcgggtggagccatcccagggctggtcggggatgggcggagccgccccgccccatatcccacagtgccccgggaccggaagagggagccgtggtttccggaacttcgcccgcgtctctgggcttttgctctgtcaggctggtggcgttttggtgtcttcgtttgttatggccgctgctgtcgctatggagacaggtgagtagctctctgatcttggagtcttcgcagatggaactctccttgacccagacctcttccccg

SEQ ID NO: 17110 - DNA, 2300 bp, Homo sapien
gaaggaggaagacttgggaagcatgtgagggagccctgttcccaccttgcgcaggctccgaagctccttatggccttcccccaggtgaccctggagcagccagtctccaggtgtctgggcacctgccgagaccctctagcctctctacagagacttttccctagtacattctgggatggaagaacaggagagggaaagaggcaggaagggcctttctccaggccccatagcaggcgaggacagcattatgtgtctttttgctacattctgctgtagaacatttaggctccatctgaccagcacctgagccaaccagtctgccctgcccttctctcatctttgcattctccagttttaaaaagtcctggggctgcgggctagagagcaagaaaaacgagaaggctgccctcaaggtgctgcaggaggagtaccggaagctggggcccttgtccttcgcggagatcaacgtgctgatctgcttcttcctgctggtcatcctgtggttctcccgagaccccggcttcatgcccggctggctgactgttgcctgggtggagggtgagacaaagtaagtcttggattcaatagaaatcgctggcttagggccaggcgcgttggctcacacatgtaatcccagcactttgggaggctgaggtgggtgggtcacttgaggtcaggagatcgagaccatcctggccaacatggtgaaaccctgtctctactaaaaatacagaaaattagcgaggcatggtggcacatgcctgtagtcccagctacttgggagactgaggcaggagaatcacttgaacccaggaggcagaggttgcagtgagcccagatcgtgccactgcactccagcctgggcaacagagagagactccgtctcaaaaaaagagaaagaaagacaccactggcttagtgcactagtgcctaaatgctgctggtctcggctacaggtggcaagaggaatgtgggccaggcactcatgcttggtcaagacttttcctcttttgggagctgggtttcagagagcactctgttggtttcatgactcatttttgttttctgaccaagctccacaataagaccctaatgtgttcctgtggtatcctctcctccctgagtaggctgagcagaaaatccttggccaggcagggtggccagagctgtgatgagagagatttcttgggctaggagtagggttcccagagctctagtttccaaatctctgctctgccatcttccctttctcatcttcacatctggtcaaatccctccaaaggcacacatctagggagcttcatagacagagacttggcaaagggggtacatgtagtttctctcctggctaagacgttgtcagaatggaagaaaggatgagaaacatgtacatcctagaaaaggcagaagatgtgggcagggagatgctggtatgatggccatttcgttttgaaggtcggcttaggtcagcaccaaagtcttcatggtcaccctggtgaacccagacagaattctagagaacctggtcaagaagaggtcctgaaatacacttatggagaatgcacgctgagagggggaagtaaactgcttaggatcacccaaagttggtggtcaagagtgtgggcatcttgatttctagccaggattcagtctcccataccactcttatttttttatttttttgagacagagtctcacactgtcacccaggctggagtgcaatggcatgatctcaactcactgcaacctccacctcccagcaattctcctgcctcagcctgccgagtagctgggattacaggcgcccgccagcatgtctggctaattttttgtatttttagtagagacggggtttcactatgttggccaggctggtcttgaactcctgacctcgtgatccgcccgcctcagcctcccaaagtgctgggattacaagtgtgagccactgcacctggccaccactcttgaccttgacttttaaggctgtgagcctgtttctttgcatagaagcatttggacacagaactgccggagttgtgatgggtttgttgagtgactgtctctgtcgcagatgagctgtgcttttccccacctaggtatgtctccgatgccactgtggccatctttgtggccaccctgctattcattgtgccttcacagaagcccaagtttaacttccgcagccagactgaggaaggtaagtctcctgttctgatcgcccagtcatcaggactggagccctggaaccaaagggtcactatgggatgccttgggccctagagggagaaaatcccatcata

SEQ ID NO: 17111 - DNA, 2300 bp, Homo sapien
gagcgacactccatctcaaaaataaaataataataaaaccaaaaaaaccaggtattttattcttcttctccttctcctcttcctcctttcttttcttccttctccatcccccttcctctctttcttctatcccctcctcctccttctcctccttctccttctttctccttttcttccttgtcctattcttgatcttttcttttgagaggcagctaatccaaggtttgagaagatgaaagaacgtgcctagaaccacacagctgggaaggagggaggcagggaggaggggtgggaatggggcaggagtcctttgcgaatagatccctggcctgacccgggaaagctgtgctgaccagggctggggaacaagatgactttgaggggaatccctctgagatcagcactgtgtcttgacaatccatgccagccgccgtccggagtgttctgggggtggggagagggaggcggcaacacgctgaggcctcaggactgtctcttcagtttgtcaggtgtgcctacgtcatcatcctcatggccatttactggtgcacagaagtcatccctctggctgtcacctctctcatgcctgtcttgcttttcccactcttccagattctggactccaggcaggtgagcagacccaagggatcctggtgactttctggttctccccttctctctttctctagtccccactgtgagtcgcacaggcctgggggtgaccggaaaaccctcatttgtggattctccctggcagggagacaccactcgagcctgcatccccactccaagctgtccctgaagtcagcatctggggactgggtggctctagtgtgtggcaagggacagtcctgatgaggccttcgtgccacgctccaggtgtgtgtccagtacatgaaggacaccaacatgctgttcctgggcggcctcatcgtggccgtggctgtggagcgctggaacctgcacaagaggatcgccctgcgcacgctcctctgggtgggggccaagcctgcacggtaattacgccttctctctcttgccacgtggctctgcatgagccccagggctggaagggggtggaggatggcacagaccaggccatccactggtgagggctggccatgggcttacctggacttggctgggtggggtgcgttatagctttagtgggagagaccagatgcatgcgtggtggtggcacatggtgagcagcagtaagtaagggtcctcgaatccagaggaggtgggtcagcaagagtccttgcaggcttggaaggctttctgggggaggcagctagctgcagggttccaccgggaacaaattggatagaggctggatcaagctgtgtctgataggataagggaagcaggccagaagtggctcaactacccagctcatggggaagcagaaaggtcctctctccaagctggagcatctattcccactgcaaagaagcttcttatcttccccgatatcactcagtaccccagcttctctctccatttccaggatctctcctgccaatctagctagccatttccagctaagccatggagtcaatataatcataatcataaccataatcaatcatgatcataatgggtatattgagtgtctacaaggccccaggcatgataccaggagcttatgaattgcctcatttaattcttaccacaactctgagagctgagtattcttactgcccacattctgtggatgagggattggaggcagagagggataaagtgatttgctcatggacacacggggattggacccagcttctctgataaggcctgtgtcctctctaatcagaaactcagggcatatcttccttttgagacaatgtgtcccctcaatgatggcacgtccttggcccagccatcaggagtcagctgctggtcagtttacggtaaattcctcctgaggcgcccctgtgtcaggggctgtgctagaccctgagcacacacagacgctagcctgccctgcaggcaacccatgcccggggctcccttggtgcctcagattcccctgagcaggggactttgtggctctctgatctgttacacatcctggcattgattccttccagtaattgctttagcatcaaatcaaaagccatcatattttctagaaatgagagaccccaggaaagtggacctcagggccctcagaattcttctgcttggctcccttgagtggccagcttgggtgggaggccactccagtgggtttcattctgcagcatgctggagagcttccacttccaaacccaagttcacacatgcttctgtatcct

SEQ ID NO: 17112 - DNA, 2300 bp, Homo sapien
tgtatcccagaacttaaagtaaaattaaaaaaaaagaaaagaaaaaagaactgaagttgtttacttgctctcattcatgcatcccggagaaaaaggtttgagtgcacatcctggattaggcactgagaaaggcactagctggacaggtggtgatgaataaaacagacagtaaatagaaattacatcataataatgtgtcatatattttaaaatagctacaagatattttaaatgttctcaccacaaagaaatgacaaatatttgggccagacgcggtggctcacgcctgtaatcccagcactttgggagaccgaggtgggcggatcacctgaggtcaggagttcgagaccagcctggctaacatggtgaaaccccatttctactaaaaatgcaaaaaattagccgggcgtggtggtgcacacctgtaatcccagctacttgggaggctgaagcaggagatttgcttgaacctaggtggcagaggttgcagtgagccgagatcgtgccactgcactccagcctgggtgacaggagcacaactctgtctcaaacaaacaaacaaaaaacaaaaacaagagaaatgataaatattcgagtgataaatatgctcattagcctgatttgaacacaccacaattatacacacattgaaaaatcacatggtaccccgtaaatatagacaatgatttgtcaattaaaaatgaaataacacttaaaaaataaaaaagtaaaaagtaaaaattacaccaataaatataagaggtacaaattgtgctaagtgccctggggacacaggaaaggcgggaaaacccagggctatatgcatgagagttacaaagggaaaaggacaggagggaggcaattgcaggaggggcttgggagaatgcatgtccttgggtgcaggtcacaggaaggaactcatgagcttgattcaggatgtgttgaattttcgggccgagacacgtccagtctgcggaaggctggacatctgggactctggcatcatggctgggttgaaggcagaggatggtaatcactaaggagccggctgtggttaggccaccagcatggatgagactccccaaaaggaagctgcagaatgagaggcaggcagaggagaggaaagaagaaaatcacagaggtggggatgtctttgcatccgtgtgtctccagtgcccaaaacagggcctcgcggagaagaggtgctcggcacctgtctgttgcctggcgggctgaatgaatacatgggcgactgtctcagtgtcgccttagttgtgtcccttcctctctagagctccgtttccctctgacctgggtcgggcgggcagctgcggctgctgaggctcggtggggcccctccaagacgcgtgtccgcatctgcccgccgggcgtctgcggggtgcagcgtccactggagcgcgacagcccctgggacagaggaggacagtggcctcgcttccctgtgcgatcgcccaggagctccgggccggagagtgcgagcggggaaaaggggtcctgcacctagagtggggcggacgtggcgaggaagccaggggggaccgggaagcgaggcccgcggtgcggagggcgcggggcgtggggggacacctctcggagagacaccggaggggcggaagtaaggagatggaaaggagagggagatcggggagatagacctgagagacccagaggcctgcagagagtttcatccgggacccttcagagcccaggaaagagcagatgcggacgcgggagggcgccttacgccaaagcgggcagcaccagtgaccaaaacacgccccgcttggcagccccgggacgcacctctgcctcggcagcgcaggagaggcttggacagcgcgagatgctagggcccaggctgcccctagagggctggcccgaagcgttggagtccaaagacgcctcccaccgccgccgggtggcagaattgggggcaggcgcgtcccacagaccccgaggggtggccccgccccagggccgcggggaggcgcccccgtgcggggcggagttgtcaccgccccctccccaatccccggggactgtggccccttcttaagcccgcggcgcctctagctgcccctcactcgtctcgcccgccagtctccctcccgcgcgatggcctcggcgctgagctatgtctccaagttcaagtccttcgtgatcttgttcgtcaccccgctcctgctgctgccactcgtcattctgatgcccgccaaggtcagttgcatctccaggcagcccttcggacacccggcgtcctgtgcccactaacgggcacc

SEQ ID NO: 17113 - DNA, 2300 bp, Homo sapien
caccgattgatgtcgtagtggaaatggggacaggcttttgtgctaaccagagtgttcctacatacactctctgattaataatagtgatggcccaggaacagccgtgacagtcaaagagaaacattgctgtatttgtaacattccatttttttaaagagtgtatattcatatattctttatgaaatctaagttatcttgagaaatgaaaagaaaatggccattgctgccactttgagagccctccgactcaggggtgttgtgtgggttgggggagatttccaactccctgcttaattatctcaaaacaccccatccattcgggtcagccagcatttgactgcctgctactgcgaagctcaatactgcactctgcctaataagcacaaagcccgcgggtctctccaggaaggcaggggtggtgggtcagaaagagctggctctcaaatcgcccatgcctgtgattggatggggaggagttgagacaatagacacacagccaactaaccaaagccagagacaaaggaggtagattctagatcagtgttggcataggagttggtcctgaagaactgctgggattttgatgaggaagggaagggttggcgtgggtgggacagtctataggaggaaacatcttggaagaaaattaggatgtagatgagaagcaacttatggtcacttctaattccactcctatcccctggccacacattccattcctctaaggtgtccaatctatacacccctgccaccacccctatcccatctcagcaggagacaatatgtgaaaagaaagttcttcatttttccttcttttccatttctttcttcctgtctttctttcttttttttttttttgtaacagagtctcgctctgtcgcccaggctggagtgcagtggcgcgatctcggctcactgcaggctccaccctgggttcacgccattctcctgccttagcctcccgagtagctgggactacaggcacccgccacctcgcccggctaattttttgtagtttttagcagagacggggtttcactgtgttggccaggatggtctcaatctcctgacctcataatcaacccgcctcggcctctcaaagggctgggattacaggcatgagccaccgcgcacagccctttttttttttttttttttttgagacagagtctcgttctgttgcccaggctggagtgcagtggtgcaatctcggctcactgcaacctccacctcctgggttcaagcaattctcctgcctcagcctcctgagtagctgggattataggcaagcactaccatacccagctaatttttgtatttttagtagagacggggtttcaccatgttcgtcgggctggtctcgaactcctgacctcgtgatccgcccacctcggcctcccaaagtgctgggattacaggcatgagccaccaagccaagcccactcgtttttcattcttgatattgacagactgcccagagacagacaggagtgggtagtgagggtcagaaggattaaggagcttgcctagccgatgaggaagggaacaagataagatgcaaacctcagtctctgactctcagccaagtgctcactaccccaactagctgtcaaatgaggtggatggggccttggttaggtacatagacacctgagtcatatcaacctggtgtgaatcccagctctgatgttgagcgattggcctagcctctctctgcctccattttctcttttttcatttcatttttcttttttgaggcagagtctcactctgtcactgcctctgttttccatagcaaaatggagttaataatgcttacatgagggattaaaacgaagacaatgcctacctaatgcttagaatggtgcctggaacataggaacaatgttgaaacagtctttcattcttccctcctatcactgtgatcatcagtaccaccacacactgcttctcatttagtgcctgaattttagagcctgcctggaggctggagccctgcctggacatttcccttaatcttgttatcctcctcagagaggcggcacccaccccattggcagacgccacgggaattctctgggcctgcttgtcatcactccagatgttgtttagagttcttctgttagcacagctgtttctagggtctggaaaaactctaaggacccccaggaggatacacaccagattgggtctgggctcacaccaccctgcatccccagagcctccctggacgctgtttgcaaggtcctcaccgcctggaagtccaggagccatttttagggaacagcattcaagctcaa

SEQ ID NO: 17114 - DNA, 2300 bp, Homo sapien
agggaagggttggcgtgggtgggacagtctataggaggaaacatcttggaagaaaattaggatgtagatgagaagcaacttatggtcacttctaattccactcctatcccctggccacacattccattcctctaaggtgtccaatctatacacccctgccaccacccctatcccatctcagcaggagacaatatgtgaaaagaaagttcttcatttttccttcttttccatttctttcttcctgtctttctttcttttttttttttttgtaacagagtctcgctctgtcgcccaggctggagtgcagtggcgcgatctcggctcactgcaggctccaccctgggttcacgccattctcctgccttagcctcccgagtagctgggactacaggcacccgccacctcgcccggctaattttttgtagtttttagcagagacggggtttcactgtgttggccaggatggtctcaatctcctgacctcataatcaacccgcctcggcctctcaaagggctgggattacaggcatgagccaccgcgcacagccctttttttttttttttttttttgagacagagtctcgttctgttgcccaggctggagtgcagtggtgcaatctcggctcactgcaacctccacctcctgggttcaagcaattctcctgcctcagcctcctgagtagctgggattataggcaagcactaccatacccagctaatttttgtatttttagtagagacggggtttcaccatgttcgtcgggctggtctcgaactcctgacctcgtgatccgcccacctcggcctcccaaagtgctgggattacaggcatgagccaccaagccaagcccactcgtttttcattcttgatattgacagactgcccagagacagacaggagtgggtagtgagggtcagaaggattaaggagcttgcctagccgatgaggaagggaacaagataagatgcaaacctcagtctctgactctcagccaagtgctcactaccccaactagctgtcaaatgaggtggatggggccttggttaggtacatagacacctgagtcatatcaacctggtgtgaatcccagctctgatgttgagcgattggcctagcctctctctgcctccattttctcttttttcatttcatttttcttttttgaggcagagtctcactctgtcactgcctctgttttccatagcaaaatggagttaataatgcttacatgagggattaaaacgaagacaatgcctacctaatgcttagaatggtgcctggaacataggaacaatgttgaaacagtctttcattcttccctcctatcactgtgatcatcagtaccaccacacactgcttctcatttagtgcctgaattttagagcctgcctggaggctggagccctgcctggacatttcccttaatcttgttatcctcctcagagaggcggcacccaccccattggcagacgccacgggaattctctgggcctgcttgtcatcactccagatgttgtttagagttcttctgttagcacagctgtttctagggtctggaaaaactctaaggacccccaggaggatacacaccagattgggtctgggctcacaccaccctgcatccccagagcctccctggacgctgtttgcaaggtcctcaccgcctggaagtccaggagccatttttagggaacagcattcaagctcaacatggcaagttccctctttcctgcaggggaggaccagaagggagccggagatgggggagaagggtgggaggtggatggtttggaaaagggatggagacccagacggagagaagccagccagccagggtgagggaacaagctgctgtgctgcccaggagaggcctggcctcaggctgccagcctcagggaggtagatgcggctgtgacagcagcaaagaatgacggccaagggcgacagcaggggctggccatgctgtaaaggggcttcttgggagggtccagcctcaggaatcaaggggaactcctgagccgagaattctgaagatctcctccctccctgaagctgtgggctgggccatcggaaaactttcagttttgtttccttgcctgcaagaaacgaaactcaaccgaaagcctgcagagagcagaacatggaaggagacttctcggtgtgcaggaactggtaagaaagtgctttctccagcggcagacccgggctggcgagggagagacgtagacgacatagggctgtttctgaagggagcagaaagtggttcctgcataagaacacttaggaggacaagcagctg

SEQ ID NO: 17115 - DNA, 2300 bp, Homo sapien
acagggctacagtaaccaaaactgcatgatactggtacaaaagcatggtgctggtacaaaagcagacacatagatcaatggaacagaatagagggcccagaaataaagctacacacctacaaccatctaatctttgacaaagttgacaaaaatacgcaatggggaaagaattccccattcagtaagtggtactgggataactagctagccatatgcagaggattgaaactgaaccacttccttacaccatatgcaaaaatcaactcaagatggattaaagacttaaatgtaaaaccccaaactataaaaactctggaagataacctaggcaataccattctggacataggaacggaaaaagatttcatgacaaagatcccaaaaataattgtaacgaaagcaaaaattgacaaatgggacatgattaaacagaattaccatttgactcagcaatcccattattggttatatacccaaaggaatctaaatcattctgtcataaagacatatatacacaaatgttcacggcagcactatacacaatcgcaaagtcagggaatcaaactaaatgtccatcagtggtagaaaggataaagaaaatgtggtggcagggagtggtggctcatgtctgtaatcccagcactttgggaggctgaggcgggtggttcacctgaggtcaggagtttgagaccagcctggccaacatggagaaactccgtctccgctaaaaatacgaaaattagccaggcgtggtggcgagcacctgtcatcccagctacttgggaggcctaggcgtgagaatcgcttgaacctggaaggtggtggttgcagtgagccgagatcctgccactgcactccagcctgggcaaccaagcgagactctgccttaaaaaaaaaaaaaagaaaatgtggcacatatacaccatggaatactatgcagccataaaaaagaatgggatcatgtcctgtgcagcaacgtggatggagctggaagccattatcctaaatgaactcactcagaaacagaaaaccaaataccacatgttctcacttataagtagaagctaaacattgagtacacatggatacaaagaagggaaccgcagacactggggcctacctgaggtcggagcatggaaggagggtgaggatcaaaaaactacctatctggtactatgctttttatctggatgatgaaataatctgtacaacaaaccctggtgacatgcaatttacctatatagcaagcctacacatgtgcccctgaacctaaaaaaaaagttaaaagaaaaacgtttggattattttccctctttcgaacaaagacattggtttgcccaaggactacaaataaaccaacgggaaaaaagaaaggttccagttttgtctgaaaattctgattaagcctctgggccctacagcctggagaacctggagaatcctacacccacagaacccggctttgtccccaaagaataaaaacacctctctaaaagctgctcttccacctttctttgggttccgcactggttttccagggccaggaatggcagcagccaggaccccaggataagggcagtgcccaaggaaaggggagcagaagacattcagggagggggaaagaaatgaggctgggacagtggataagggccaggtgaaggggagaggggcggcttctgaaggctttgggcagggagagtggctgggggaagcctagtaatgcaacctatccagcggcggcttcggaaaaaacccggggctgggtcaggatgggaaaggcagcgaactgaaccgttttgagccccaagttcggggccgaatgtcttccctgtgcgcagaagcaagggcgggggcgtgccatcctcacccggagcgccggccgagcctcccgcctcccaacgcctggccagggccccgtctcgccctctgcacatgggatccactgaccaggcaactgcaggtttggggctctgcgacccgggggcaggaacagagccttgcaggcggcagcgcgtcacaaaggcggccggagcttggcatttagcttgggccagagcaaggcgcagacccggggcgcccatggagttggcgtcggagcaacagctgcgcgggcggagcaggtaggcgcgctccagtccctgcagcccgagcggggttcagcgaacgggtaacgggagaatgcgggccggagcaggctggggtggcggtgggatgccccgaggcccgcggcggggaggcgggctgctctcatcaccccctctgggaagcatctttggctgcaggagttgccaggccaactc

SEQ ID NO: 17116 - DNA, 2300 bp, Homo sapien
actagaaataccatttgacccagccatcccattactgggtatatacccaaaggattataaataatgctgctataaggacacatgcacacgtatgtttattgtggcactattcacaatagcaaagacttggaaccaacccaaatgtccaacaacgatagaatggattaagaaaatgtggcacatatacaccatggaatactatgcagccattgcagggacatggatgaagttctaaaccatcattctcagcaaactatcgcaaagacaaaaaaccaaacaccgcatgttctcactcataggtgggaactgaacaatgagaacacatggacacaggaaggggaacatcacacaccagggcctgttgtggggttgggggaggggggagggatagcattaggagatataactaatgctaaatgatgagttaatgggtgcagcacaccaacatggcacatgtatacatatgtaacaaacctgcacgttgtgcacatgtaccctaaaacttaaagtataataaaaaaataaaaaaataaaattcaccttaaaaaaataaataaataaaattccaggccaaaaaaaaaagataattcaaatattttaaaaagttatgtatcaaatttataaatgctgctttaaataaatattcaaaggactttaagtaagtttgaagtaggagcaattattagtcgaaagcagcttaaagtaattgctaatatctgctaaatttaaaaatagtatatctgtgaaccggacttatgaaaaccttaagaagtgtttaaatagaagcttaagaaagccaagtgcaatttctggacctcattgggatgtaatttggacaaaccaactctaccaaaatatatggaacaattggtgaaatgtgatcactaaatattattataatgttaaagaataagtcttttgtctcttttttggtgtgataaaggtattgtggttttgtcaaaagaaaataaagaatcctatgcttagaaatacacactcaaatatttaagtgaaatatttaactaaaaggacataatatctgggattagttttaaaataactaagctgatggacaggagtatagatgaagcaagactggccacatactgctcattgctgaaactgctgatgactatgcgaggttccttagtctatctacttttgtgtatattgcaaaagtagatgtacaagttttaaaaaaaatgcttaatgaagaaatatattttaaaccagttaaatattaattttgttaaaaccaagtaacttaaaagtagtctttttcttttcttttcttttttttctgaggcggagtctcactctgtcccccaagctggagtgcagtggcacgatcttggctcactgcaacctccgcctcctgggttcaagcaattctcctgcctcagcctcctgagtatctgggattacaggtgtgtgccacaacacccggctaatttttgtatttttagtagagttgggggtttcaccgtgttggcaggctggtctcgaactcctaacctcgtgatcttccctcctcagcctcccaaagtgctgtgattacagctgtgagccaccacatctggcctaaaagtagtctttttctgtgcataaagtcactcacaaaaataacaaccaaactcagacccaactgctccttctttcctcaggcttccagaggacagagctggtgctagcaggataggagtggtgaggaaataggcagctttctgctcatgatacaaaggtaccctgtaccaaggtgagcaggcagctttgagcagtagtgagatccccactctggccaggcctttgctgagggcatctcctgtgggtagatgaggtgacaatggcccgtcctgtcccttgagtccataaggttttaagtcttatgtgaccttgcccaccagcaatcactgctttagggaagagagatcagactctggcatgctgcttaagaagaaatctgaggttccctcttcctaacttacatgatcacaacccatctgctgtcagctgttgagttttgaggagcacagcttggcctcacctactctaatcctttttgtaaggtcatggaagagattgcttcccaggagaaaaatattacagctcttgaaaaggccatccttgaccaagaagggccagccaaggtggctcatacgcgcttggagaccaggacacaccggccgaacgtggagctgtgtcgtgatgtcgcacaatataggctaatgaaggaggttcaagagatcacccacaatgtcgcaaggtaggctagcagccagtgggcagagggccttcgggtc

SEQ ID NO: 17117 - DNA, 2300 bp, Homo sapien
gtcttgaacttctgagctcaagcaatcctcccgccttggcctcccaaagtgccaagattacaggtgtgagccaccatgcccagcccttgtgcagcttttaacttttctcagaatttgtatttgtctatttttaacttataaaaattaaaaaatattttaataggggtctgtgtcacccaggttggagtgcaatggtgtgatcatagctcactgcagtctcaaactcctgagctcaagccatacctcccaggcattccaagtgatggcacctcaggcatgcatcacggagactgtcatcatttatctactttttattgctcagaagagacataatttcaactcaccatgtggttatacttctgggttatgaatcatagtttgtataactcttcttaaagatattgttcaaaacttcttttgacttttagttgtaatttggactcattgctttttagttcggtagctattacaccgagctttcttttcatcacacagctgggttggttccactatgtcttatgtccagtatcttcttctttctggatttttcacttttgctctattatttttttccataaagaatgtacgctcaccgttttgagtactggcatgtccaaagaaatcttttattttgctctcatacatgaaatgctttgactggttgtagaatcccagatttgaaataattttctatagaatttgaaggcattatcctagcatcatttctagcaaccatcatttctagccacctgtgttagagacgaaacacttgatacctattctttctttttcttcttattctttgaattaagaaattccaccagaataggtataaagttggcccttcctatccgtggattctacatccttggatgcgatgacacacaaataaaaaatattcaggaaaaaaattccacaaagctccaaaaagcaaaacttgaatttgttgcaccctgagtgctatgttgaatccatgcgaatgaagcgatgagtaggcatggttagacattgtattaggtattgtattaggcattgtattaggtattatattaggtattaggtgttgtattatgtattgtattatgtattgcattaggcactgtattaggcactatattaggtattgtattaggcattgtattaggtattgtagcaatctagagatgacgtaaagtatgcctatctagggatgtgcgtaggttatatacaaatgctacaccactttatatgagacttgagaatctgcagatttcagtatctgagggggatcctggagctaatcactctatggattatatgcataatccacagggaggactatatgtaaggaatgggggtgtgtgttaatttcaggtgggtcgttaatctaaagacttgagtctttggctcaagttatctctctctcactttcacaattgttttgccattctctctctttttttctttccttctggaagtcctacttgacaaatattaaatcttctggagctatcccctcagatttaatttttctcccatattttccatctcctagtggatgcagagtgacttctggagtgtttgcctgaaggcgttctactcacacacctgccctcacagagtgccccatcgggcgccccacgcagaaataagccagttgtggtaacagacctatacaaactctggaggaaactcattgtagcttacagaaacaatcaacttggcttcctgatttttaaccctcaatttcgcctgcgactgcgaggtcctggaggcatcgcccagcccaaccccactgtacagccgggaagtctgagagccggggtacagcgcgacccgagatgatcccgcccgcgggagggctcggactagacgcaggtctcctgactcccagctcggggctttggccgctgtcttctgcttggtgccccgcgtcttcgcggtaggttgaggtggccggagcatctggccctacccttcccacacgccacactcctgggtctctggctctggggtccgcagaatttgcgcctgcgctaagcctttggccaggctgctcagtggcggaaccagccctctttgccctggcaacgcgtcacttgttgtcatggagaccgcgttgtttacctctctgttctgcaagagctggaagctccagttggggtaaggaggctcccatcccgagcttgcgtagtggttctgtgtggcgctgaggtaagtaaaccatgaccccaccccaccgacccctacccgcaaccctccccgcctaaccaaatccttatgacgttgggatgagccctaatttaggtccccacctctct

SEQ ID NO: 17118 - DNA, 2300 bp, Homo sapien
attaacttggcagaagtttgaagattgaagaaaagtagtggagtgagaaggccaattctgacagtacatcagcagtccaaataggagatgataatgagggaaaggtgagtgggaagggcaaggaaaagacagctgtggggaattcaataaacgctgaatcagtggcttggtggtgagggaaggatgaagaagagttagaagaatcagaattgactgaaaatttgtaggatgaatgtctaggggaataatattacccaaaacaccagtgtagatgaggaaaatgatatggtgacagtaataatgaggggtcagagggagagcagtgactaattttttttttttaatttgcatttcactagctggaggtacctcaagaaaaagatgttgtgtgtgaatgtgcagggctgagggaaaggtccatgctagacacacagatttgagagtcatctgcaaagtatactccaggaaagatagaacaaatggcactatatatccacagaaaacttagaaacactattcctgaaataaagattgcctttgctcattgaaaatgttcacagtgtttcaagttaacaactagtaaaggaccaagagcaagaactatcctcaggaaaatactggctataaaaagaaagacctgaagctctatgtgtacaagtggtgcttgtaaatttttctgagtagtctggtggtgattattggggcatccccagatattgatatttggagatattttctctggggcaattcagaatttttttttttttttttttcgagttggagtctcgatctgtcgcccaggctggagtgcagctgcgagatctctactcaccacaagctccgcctcccgggttcacgccattctcctgcctcagcctcccaggtggctgggattacaggcgcgcccgccaccacgcccggctaatttttttgtatttttagtagaggcggggtttcaccatgttagccgggatggtctcgatctcctgaccttgtgatccgcccacctcagcctcccaaagtgctgggattacgccaccatgcccggcccagaatttttttttaatagattattcttccaattgcctgaattcagaacaacacctggctcctgatgttctaggggcagggagcgggaaaaaggatggggcttcactgttcattttgcagactttgacgttatccccattttacgttatcccccaatcgaactgatctctgtacctaatgctctaagttcagaccctcttcatttcagtttctccagagaataaaactctagggtcttgacaaaggtgtatcttccgtgcaaggtggggtatgtgggttgggcattgttccatatatagacttttagccagtcctggtatttctcactttcatgtattctaggaaacgggtaactccaaggcttggatctttggggggttctctgagagctctttgtcttggtacttactggtattccccctcaacgcattttagggtatagcttctaataagtaaagctggaatccatttctccatctgtgttagtctgttttgcattactattaatataaaggaatacctgaggctgggtaatttataaagaaaagaggggcctcccactttgggaggctgaggcgggcggatcatgaggtcaagagactgagaccatcctggccaacatggtgaaactcgtctctactaaaaataaaaaaattagctgggcgtggtggcacgtgcctgtagtcccagctactccggaggccgaggcaggagaatcacttggacctgggaggcggaggttgcagtgagcccagatcgcatcactgcactgcagcctggctaccgagcgagactccatctcaaaaaaaaaaagaaaaaaagaagagaggtttgtttggctcatgattctgcagactgtacaagaagcatgtcactagtatctatgtctgataggggactcaggaaggttctactcatgttgaagggtgaaggggaagcaggcatgtcacacggtgagaaagtgagctagagagatgccaggctcttttaaacaaccagcccagctctcacgtgacgtaatagaacaagaactcactaattaccaacgggaaggcaccaaaccattgaggagggatttgtcctcattacccaaacacttcccaccgggcctcaccttgaacgctggagatcaaattttaacatggtatttggtggggacaaaccctatcagcagctgcttttaatatttaaaaaaatattttgagagagggcccacagaccctctgaaagaagcagactgctcctgcagg

SEQ ID NO: 17119 - DNA, 2300 bp, Homo sapien
agttggccacgaaactgttaagcaaaccgctactcaggagaaaggaagagttattagaaaaggaacacaagttcatgtttatacttcaactcttgagactcactgcaattcccttctgacaggaatttttttttgtcttatatatggtagagttaattgttctagaagcctacttcaagctaacttaagcaacaaagtgggatttattggaaagccgcttgggtgtctcacagaacccaaggaagagaattgagctggatttcacaggacctggaaaaccctcagaaactcaattgttctctctctttcttctctctccagtcagaaccttcaggaaggggagagtggctcatgggctgagtggataaaccacaaaatgggtaatatactataggtgagttttaagtgacaaatgaagtctaagctgttattgcactggtcggtgactgaaactgaaaatgggaattagaggttaagtggagggaatatgttgccaaaatgttagaaggatcttcttcaaagagaagttgaggctctagaggataatggtagggcacagagtggaggtgaagcttgtgaggggtgggggtcaatggggaggataggagagcattcctgattttgaggaggaaggatagagggttttactggtgaatgacgtgagtaagtgtcatgaccgctcgtattctcaggattcttcagtattgggagatgtgactgcagtggacagggcagtgtcagagagactagattttataatagaagcttttaaattacctacccatcaccaacttatcaggagactgacactgtccatctcctccaaaaaaaaaaactgacctgcccggcactttgatgtccaccagttgagctttatgtttatcaagaatagttgtgtaaacttccaaaactgtttatggcaggcacagtggctcacgcctgtaatcccagcactttgggagggtgatgtgggtagatgacttgaggtcaggagtttgagaccagcctggccaacgtggtgaaaccccatctctactaaaaatacaaaaaagaaattagccaggcgtggtagcgggcgcctgtaatcccagctactcaggaggctgaggcatgagaatcgcttgaacccaggaggcggaggtggcagtgagccgagatcatgccactgcactccagcctgggtaacagagcaagactgtctcaaaagaaaaaaaaactgtttatatcagttatatttgttattgtaatgatgaaatttatagacaaactaatgaaataggagtataaacataccagtattttttaaaaataagttgaatattttatgactacataaacaataatcttttaaaagtcactgtcaatttgatgactaggagtcagccatacaactataaaaggttttgagaaaactgtaaagatctaaatagaggctgcatttagtttttttccccacaagaacctttaggttctagacatttatttcaaataaatgtcaactcatctggatgtagcttatgcaagaaagacctagaagagctcttattatggacccccattcaatgaaaacacaatggccctttatttctctttcaacatgaggaggtggaagggctgttcaagcccttctgttcacgatagcccaggaggtccaggagagaggcgagccgtgggtgagcaggagtgtctggggagtgtcaactttccattgaaaaatacccctatgatcaagccatttcacttccgtggcaatcttatttatgtattcaccaaaattgggtgggagctagtgtttagctgtcatcgtccgtaggctgctgtgtttggctcatggcagggtgtgaaactggcatcagggagtgtttgccaagtgaataagggtgaggctgccctttccagagccgccgggagaaactctggatacagagaccctagcctggcgccagtcccagcgttcctcctagtcggggaggaatctgtgggtgggaggtggggagcctgaaacccaaatacaacagccactctgggctgggcgtggttccctgggagctgggtctcagatccttttaaagctgatttctccccggatctccgggcaagatgggcaagtacacggtccgcgtagccaccggggatttgctcctggcgggctctcccaacctggtgcagctatggctggtgggcgagcacggggaggcagacctagggaagcagctgccaccggtgtggggaaaggtgagcgcggactgcggtgagagctggggccctgggactcagaggtgtcactgggggccggggcc

SEQ ID NO: 17120 - DNA, 2300 bp, Homo sapien
tagataaaagtgagacttccttctgtctttgcagtctcttagcaaactgcctgtgatgtgctcacattctggtttaatgcttattcaataataaaactgttttctttcttcactactttcgtggagaggttttttctgggttgggagaaaattttgcttctaattatattctcccaacatagcgcatgtgcttaaaagggaaacaaaagcaggagggggaagggtctagagtgataagagctctagtgagaggctaggcctagagagggacatggagaaatagcatgcggagaggaacggtagaggagcaacgctaacattcagttgtaaataatacaatcatagcagctaatacatagagggactacacgccaagcactgttctcactgtttagccatattcactcatttagcatgcgcagtagcttgaatccggtttttcaattattcattccctctctctgcacgtggccgtagagtacactagagtgggcagaaaataagtcacaaaacagcaaagaaacagtgcttttggaagtaggtatgagacaaactcttttctaggcaaaagtaacccacgaaaatgtgtgtggaaaggccagatcctactattaggcaggatgggaatttgagccattttatttggatattacagaatggggtgaccccagaaaactggaagaactggggaccagcaaatggccgacctgcagtcctgagcagaggatgtaggccagagtggacctagaagataagaaagggaattgaatccagtaagggacagacactttatttttttatttttatttatttatttatttatttttgagatagagtctgatctggaggctggaaggcggggctaaaactcccactcacttacctctaccaacaactaggccaccaagtcatttctgaggactggctcaagaaagcagatttaacttacactggcctagcccaggccaccagatgcatccacggagatccaaatgcatataatcacttgaatcaagatctagacagggacgcgtgcagcaggcttcatctgactgattcctgacacgggagagaaagcctaagctccgaatcatccttcaatgtttacaaaggccctaaatagcagtgggctaattgctgttcctggatttccaggagacctgagacccatgaaggagcaggaaagagcttggggataaaaaattaatctggaacctactggagcggaaggggctgcactcacctggaaaagacaaagttcttgggaactggccacgtaggccaggtccctaagcaattccatcccgcaccctaacaccccgactggtgttcctgggtccctaacattgtctgtacccgcttcggaggttggacaaaatgagtttttcactgccctgcctcaggcctctctcaaaggtctggcccatgatatttggtgtacattgggaccccagcgcccagatatttgaaacggggtggggagcgggtgttgagctgctacatttccaggttctaggtaccctggggaacccctggtcgttgacggaagcacagcgttcaagggcggcagagctcaggtactggaggacacatgggccgcgccgggtctagccgcgggacatccccagaccccagcacggcctcccaggccgaccttccagaagccggcccactgccttccccgggtcccagcccagaaaagcggagaccttcccctccgtttggaagatggactcatcccctacttcctcctggctccccagaagacctggagacctcgggaagtgttctcatctatgttcgctccaacccgggggctcaggcccacctcgatcccgccttcccgggaggtccaggaaggtcccgccgcacccaccccgttggcctcaccctggctcgggcccctttatcatcctgcagctacgctccgaccaggaggcacagccagtccccacagccggctctaccgctctgctcgcaggtttgggctagtctggggcggggacttgggagcgcctaaaacttgcgaggagggcggggccgcagaccggtcctttaaaggttggaagtggccccgaggcgccggcagccctgggcggtcccgggaatcgcacaggacccggctcccctcgcctaagctgctggggggcgccatgggccgctaccgcatccgcgtggccaccggggcctggctcttctccgggtcgtacaaccgcgtgcagctttggctggtcgggacgcgcggggaggcggagctggagctgcagctgcggcccgcgcggggcgaggtcagcgcgggg

SEQ ID NO: 17121 - DNA, 2300 bp, Homo sapien
aggctctatttcctcccccagttaaaccccctacattagtatcccactagcccaggggagcagtaaactttctctgcaaagactagatccttttttacgctttgcagaccgcatagtcactgtctcaactactcagctctcctgctgcagcatgaaggcagccacagacaacatggaaatgagtgtgactatgttccaataaaactttatggacactgagatatgaatgttacatcacaaagtagtcttcttttggtttattcaaccatttaaaatgcaaaaaaaatccacaaacaaatgtgctttgtttgagacatgcacagccaggctacagactggatttggcccttgaaccctgcactagcctgaggccctgaccctacttccaaaacatccaagatcatggagcagggggatttcttagaaaaatcagcttacctcagctaactctccattcccaggaactaaccttcatgcctggtggccaatgtacaaattcctgactcagttctttggcaaattccttccacccatatttctcctattcacccatgtaccccaaaagtccctgaataagaatcatgtttttggggcagaatacaaaccactgccccaaaatggcttctttctccaaacagtcccagatgaaaggcacataattcatgtcttaaggctacttttccagcccctttaatactctgggatctatgtgtttcccacattccaagttatctttcacaagccttttaagaacaacatgcacaaaataaatggacaagaactacaaagttattctagccaatgatagtgtttatttgttaggtcctggggtctcaaggtcaaatgatccctctcaattattctgaggtcactgtcctcactagagtgggtacaacttgctcactgcaaaactgtgttcttcaaacatccctacttcttttcttttctttttttttttttttttagaagtagtctctatcgcccaggcgggaatgcagtggcgccatctcagctcactgcaaccttcgcctcccgggttcaagggattatcccgcctcaccatcccgagtggctgggatcacaagctcatgccaccacatccagctaatttttgtaatttttagtagagacagggtttcgccatgttgacctggctggtctcgaactcccgacctcaggtgatccgcccgcctcgacattcctatttctaaataattattacagatctgtcactcaccagttaaacatacaaacggcttttttggaggggatgacctatttatatttttaaatcttatatcctaccttattcaaaagtcctatcagttttcctagtttagagaagcaaagtgacatttttgtgtacatttaacaggactgcttaccttcacaacctgctcagtcggctttccctggacttctcctaaccgcccatttttcctggatttggcaccgagagttacagtatttcacgtgcgatgataaaatgttacttaggagaaacagttccaataccaagaaacttcagcaattttaaagcattttaaagccacaaaaccatgcccgatccccaaaagggggtcctaactcctttacactgtcagaatctcaattttaaaagggaggagtagagaagagatagaaacgctctctgttggtgaaaatctgtcttacttaccatttccccaacacaggagagactaaggaatttcaggtaaaaatcagatggctccaatcctccgatactaagagcccatcgccccagttcccaggagttccgccagttagactttttcccccatggcctcgctaaggctagttcctcgtcacgtgacgtgacaggcttggtcacgtgacataccagctccttccattcccgtgtgcggggggagggggaccaacaaaccggaggccctcgctcttccaatactcacgccctagctacagaggtcaaggaaggtttccccaggagcagttttggtttcagacggcgccgtctcccgcgaaagtcctgagaggagcccagccttttccgcctgccgcccccggatgggatggttgaggccggggccacgccccctctgcccccctgcgagggcatcctgggctttctcccaccgctttccgagcccgcttgcacctcggcgatccccgactcccttctttatggcgtcgctcctgtgctgtgggccgaagctggccgcctgcggcatcgtcctcagcgcctggggagtgatcatgttggtgaggggactccccggcaaggatcggagagggcctgaggggctccgggctgggag

SEQ ID NO: 17122 - DNA, 2300 bp, Homo sapien
gctaatttttgtaatttttagtagagacagggtttcgccatgttgacctggctggtctcgaactcccgacctcaggtgatccgcccgcctcgacattcctatttctaaataattattacagatctgtcactcaccagttaaacatacaaacggcttttttggaggggatgacctatttatatttttaaatcttatatcctaccttattcaaaagtcctatcagttttcctagtttagagaagcaaagtgacatttttgtgtacatttaacaggactgcttaccttcacaacctgctcagtcggctttccctggacttctcctaaccgcccatttttcctggatttggcaccgagagttacagtatttcacgtgcgatgataaaatgttacttaggagaaacagttccaataccaagaaacttcagcaattttaaagcattttaaagccacaaaaccatgcccgatccccaaaagggggtcctaactcctttacactgtcagaatctcaattttaaaagggaggagtagagaagagatagaaacgctctctgttggtgaaaatctgtcttacttaccatttccccaacacaggagagactaaggaatttcaggtaaaaatcagatggctccaatcctccgatactaagagcccatcgccccagttcccaggagttccgccagttagactttttcccccatggcctcgctaaggctagttcctcgtcacgtgacgtgacaggcttggtcacgtgacataccagctccttccattcccgtgtgcggggggagggggaccaacaaaccggaggccctcgctcttccaatactcacgccctagctacagaggtcaaggaaggtttccccaggagcagttttggtttcagacggcgccgtctcccgcgaaagtcctgagaggagcccagccttttccgcctgccgcccccggatgggatggttgaggccggggccacgccccctctgcccccctgcgagggcatcctgggctttctcccaccgctttccgagcccgcttgcacctcggcgatccccgactcccttctttatggcgtcgctcctgtgctgtgggccgaagctggccgcctgcggcatcgtcctcagcgcctggggagtgatcatgttggtgaggggactccccggcaaggatcggagagggcctgaggggctccgggctgggagggctgggaggcgaggaaactctgggccgcaggcaggccggaggggccggggatctacaggccccggagaaggagacagactgaaattgaaaaatgggaactgttcgagaccagcctgaccaacatggtgaaaccccgtctccaataaaaatacaaaaattagccgggcgtggtggcgcccgcctgtaatcccagctactcaggaggctgaggcaggagaatcgcttgaatccgggaggcggagggtgcagtgagccgagatcgcgccactgcactccagcctgggtgacagagcgagactccgtccccaaagaaaaagaaaaaagggaactggagcggagggccctggagtgggaggagccagggctggtaaaggtggagacccctcaaggtaggagaaacaagagcggggtgcctgagaggtgcttgagttgaatggaggacatgggaggaaaagagagtgcttgttccagaaatgtgtagctgggccttgttttcccagtaatccacccaccgccacttcaagaagaaatgatatgaagaagtgccggttctccctcccctcttccgcactgtcccgtgatgatgacgcctccagagaggacgataatctgggttcctgggagagatggcttggtcactattcccacccttgcctcgaccacttgtctcaatgtcaccacctcacgccctgttccaggtggctgagtccgaatccagtaaccaccacctcgttttggttaatctcaggctcgggtgttgtagcaacattggaaatgggaggggtttacgaagtgaacatgaggtcaggtgcctgaattcaacagtctacccattccccttttccagataatgctcggaatatttttcaatgtccattccgctgtgttgattgaggacgttcccttcacggagaaagattttgagtaagtattcgggtgggggaggcgggctgggagcaggtgggaggtggcgaggcctagggtcagaattacgtctgggaggcccggtgcttagggcccctaggttagaggacttggagaggagagcggctttcttgagaatgtggttaggagccagggagtcagacctcagcggccatcc

SEQ ID NO: 17123 - DNA, 2300 bp, Homo sapien
ggccggatgccagagatgggagaagggattcagtctctcgcccgggaaacccagtcccgcagagggcgccggcaagggtgggacgcgacctgggtgacacggtgcagggagtctttaaatagaggaggggctggagcggggaaacgcgccggggccctagcgcaccatgtattccttgcgcttattgagccgaacttggcagaaagagaagcctccgaggaggaggtaaaggcctgcagcgatgaaacagttgtagctgacttgctcgtaaaggttgtatatgttctgggggccattcctgggggtgggaatgaagcaaaggggtcaaactttaataggagccaacattttctgagcactatgtgcccgacacctgtttaggcgctgttacgtgtattactttattcaatcttcttgaccatcctatggggtgagatctgtcatagccattttgcagaggtggactgagaagcacagaaaagtaaaatacctaaagaggtcacacctaaggtggtgggtttgggatggccgctgaggtctgactccctggctcctaaccacattctcaagaaagccgctctcctctccaagtcctctaacctaggggccctaagcaccgggcctcccagacgtaattctgaccctaggcctcgccacctcccacctgctcccagcccgcctcccccacccgaatacttactcaaaatctttctccgtgaagggaacgtcctcaatcaacacagcggaatggacattgaaaaatattccgagcattatctggaaaaggggaatgggtagactgttgaattcaggcacctgacctcatgttcacttcgtaaacccctcccatttccaatgttgctacaacacccgagcctgagattaaccaaaacgaggtggtggttactggattcggactcagccacctggaacagggcgtgaggtggtgacattgagacaagtggtcgaggcaagggtgggaatagtgaccaagccatctctcccaggaacccagattatcgtcctctctggaggcgtcatcatcacgggacagtgcggaagaggggagggagaaccggcacttcttcatatcatttcttcttgaagtggcggtgggtggattactgggaaaacaaggcccagctacacatttctggaacaagcactctcttttcctcccatgtcctccattcaactcaagcacctctcaggcaccccgctcttgtttctcctaccttgaggggtctccacctttaccagccctggctcctcccactccagggccctccgctccagttcccttttttctttttctttggggacggagtctcgctctgtcacccaggctggagtgcagtggcgcgatctcggctcactgcaccctccgcctcccggattcaagcgattctcctgcctcagcctcctgagtagctgggattacaggcgggcgccaccacgcccggctaatttttgtatttttattggagacggggtttcaccatgttggtcaggctggtctcgaacagttcccatttttcaatttcagtctgtctccttctccggggcctgtagatccccggcccctccggcctgcctgcggcccagagtttcctcgcctcccagccctcccagcccggagcccctcaggccctctccgatccttgccggggagtcccctcaccaacatgatcactccccaggcgctgaggacgatgccgcaggcggccagcttcggcccacagcacaggagcgacgccataaagaagggagtcggggatcgccgaggtgcaagcgggctcggaaagcggtgggagaaagcccaggatgccctcgcaggggggcagagggggcgtggccccggcctcaaccatcccatccgggggcggcaggcggaaaaggctgggctcctctcaggactttcgcgggagacggcgccgtctgaaaccaaaactgctcctggggaaaccttccttgacctctgtagctagggcgtgagtattggaagagcgagggcctccggtttgttggtccccctccccccgcacacgggaatggaaggagctggtatgtcacgtgaccaagcctgtcacgtcacgtgacgaggaactagccttagcgaggccatgggggaaaaagtctaactggcggaactcctgggaactggggcgatgggctcttagtatcggaggattggagccatctgatttttacctgaaattccttagtctctcctgtgttggggaaatggtaagtaagacagattttcaccaacagagagcgtttctatctcttctctactc

SEQ ID NO: 17124 - DNA, 2300 bp, Homo sapien
gcacctcggcgatccccgactcccttctttatggcgtcgctcctgtgctgtgggccgaagctggccgcctgcggcatcgtcctcagcgcctggggagtgatcatgttggtgaggggactccccggcaaggatcggagagggcctgaggggctccgggctgggagggctgggaggcgaggaaactctgggccgcaggcaggccggaggggccggggatctacaggccccggagaaggagacagactgaaattgaaaaatgggaactgttcgagaccagcctgaccaacatggtgaaaccccgtctccaataaaaatacaaaaattagccgggcgtggtggcgcccgcctgtaatcccagctactcaggaggctgaggcaggagaatcgcttgaatccgggaggcggagggtgcagtgagccgagatcgcgccactgcactccagcctgggtgacagagcgagactccgtccccaaagaaaaagaaaaaagggaactggagcggagggccctggagtgggaggagccagggctggtaaaggtggagacccctcaaggtaggagaaacaagagcggggtgcctgagaggtgcttgagttgaatggaggacatgggaggaaaagagagtgcttgttccagaaatgtgtagctgggccttgttttcccagtaatccacccaccgccacttcaagaagaaatgatatgaagaagtgccggttctccctcccctcttccgcactgtcccgtgatgatgacgcctccagagaggacgataatctgggttcctgggagagatggcttggtcactattcccacccttgcctcgaccacttgtctcaatgtcaccacctcacgccctgttccaggtggctgagtccgaatccagtaaccaccacctcgttttggttaatctcaggctcgggtgttgtagcaacattggaaatgggaggggtttacgaagtgaacatgaggtcaggtgcctgaattcaacagtctacccattccccttttccagataatgctcggaatatttttcaatgtccattccgctgtgttgattgaggacgttcccttcacggagaaagattttgagtaagtattcgggtgggggaggcgggctgggagcaggtgggaggtggcgaggcctagggtcagaattacgtctgggaggcccggtgcttagggcccctaggttagaggacttggagaggagagcggctttcttgagaatgtggttaggagccagggagtcagacctcagcggccatcccaaacccaccaccttaggtgtgacctctttaggtattttacttttctgtgcttctcagtccacctctgcaaaatggctatgacagatctcaccccataggatggtcaagaagattgaataaagtaatacacgtaacagcgcctaaacaggtgtcgggcacatagtgctcagaaaatgttggctcctattaaagtttgacccctttgcttcattcccacccccaggaatggcccccagaacatatacaacctttacgagcaagtcagctacaactgtttcatcgctgcaggcctttacctcctcctcggaggcttctctttctgccaagttcggctcaataagcgcaaggaatacatggtgcgctagggccccggcgcgtttccccgctccagcccctcctctatttaaagactccctgcaccgtgtcacccaggtcgcgtcccacccttgccggcgccctctgcgggactgggtttcccgggcgagagactgaatcccttctcccatctctggcatccggcccccgtggagagggctgaggctggggggctgttccgtttctccacccttcgctgtgtcccgtatctcaataaagagaatctgctctcttcagccctgtgtctgtgcttgagtgggggcgagcacggggctgagactagaggtcggcctctgcctggaaagtcccgatgtctgagcggaagtggagcgaagtgtggcgcggaagtgaggcgaaggctttccccatcgactgggcgcgccgagcggtctaagcgactgcgtctgatggggcggggagccgccgggttgagcctatccgctgcggggagggcgggacttcctgcgcgggggcccgagccgctcagtctccctgctctccgtggtcccggctcgcgtgtagcggcggcggcggcgtctccgtgaggaggcgcgcggggccatgacgtcagcgtccacaaaggttcgacctccctcgcggacagcgctccctggcggccacgggagggcgggccccccacttggctcgcggctcttc

SEQ ID NO: 17125 - DNA, 2300 bp, Homo sapien
cttgggccctttcttgggtgactcagctggaagggggatgccagaatcttcatataccttgcgtttcacagtggcctttatctgggccctgaagaaaagagagaagaggttaggaaaggagtcatcagagagactaacagaagaggggacgggaggggaaggggttctgggagtcccttcataagaatccaggtcggggccccaacccattggtagggttctcactttctcgaagttttacactcactcaggatggatggagtgtggagagtggagtccctgaactgagtagtgggaaaggcccatctcctaattctcttctgggagagacatcaggtagagcttggtgatttacaggtggattgagatttactgatcaactagttcagggtcaccatatccctggaaacactgcagtggggtcctcaaacatttatataaataaccaggggacttccatcatcaaatacaataacagcatctcaggcaacctaaattcacattcttggaaggattaccacagcattttaggaacttctgaccaactgtgacaattctattctttcagtcctcaaggggattctaaaaaactagtgacaaagtagggaagcagctgagctggaaaggagttctgaggacgatggaaccttgggtaaggaggaagaaggctgcccacccgcccttttctggcagccaccctccctcacactgtccgttccttgatgacacagctgatgtgattaagatcgtccccaaatcgcttcacagcagccctcagcatctctatttccgtctccgtccacttcgcactgtcagaaggggagaggggggatagcaaaaatgggagggggggtgtggagcccgcccacaggctatgcatcccacagccaaccagccgcctccttccgatttctgggaccccttccacggatgcataaagaggtcctccgtaaggggaggcggaaagctcttgaggccctgcgggaaccgggaggaccccaatcacaagaaatcacaaccacctccaccttagacacccctttccaccatcaacgttaaacggctgctgtacacagcacactgaaaccaactcgccaggaagggcttttcaaaacagacccaccaacacagcctgcagccgtctgggggaattccatgaactggggtggttgggagtggcggtggtttgtggtcgacccgttcgcagcagggagaactgtgaaacaggagtctgggctatgggcctgtctgtatttttatctgtcattcattccctcacccaacgatcatttattaacaccgactctgtgctgtgccacgcacaaagggaaactaatgtctgtccctgtgctagagagggtccgtgtctgtgaccgagtccaagcgcccgctctcagcgtccacgtcccagtccgggctcacgtaccccgcaggagaagagtcggccacgggatgcagctgcatcgtcagctccccgagcttcgtgaaggcggcgccggccgccgagaagatctctccgacctgggggcggggcagcgtcacggggggccggcgcccgccctccccgtcccgcccggagcccctagccccaccccaggctcggctcccgcccgccccccgcccggggcggaagagccgcgagccaagtggggggcccgccctcccgtggccgccagggagcgctgtccgcgagggaggtcgaacctttgtggacgctgacgtcatggccccgcgcgcctcctcacggagacgccgccgccgccgctacacgcgagccgggaccacggagagcagggagactgagcggctcgggcccccgcgcaggaagtcccgccctccccgcagcggataggctcaacccggcggctccccgccccatcagacgcagtcgcttagaccgctcggcgcgcccagtcgatggggaaagccttcgcctcacttccgcgccacacttcgctccacttccgctcagacatcgggactttccaggcagaggccgacctctagtctcagccccgtgctcgcccccactcaagcacagacacagggctgaagagagcagattctctttattgagatacgggacacagcgaagggtggagaaacggaacagccccccagcctcagccctctccacgggggccggatgccagagatgggagaagggattcagtctctcgcccgggaaacccagtcccgcagagggcgccggcaagggtgggacgcgacctgggtgacacggtgcagggagtctttaaatagaggaggggctggagcggggaaacgcgccggggccctag

SEQ ID NO: 17126 - DNA, 2300 bp, Homo sapien
cttcgaacttgctcccagcttcctataatgttccacctcaaactaatttttaaaactccaaattgaacttattccccaaatctaatctgagccttgaaacttagatggcaccccaaaatagactgcacccccaaatcagcatgagtactttggttctgctgatagtccaagatgacacaggtgagcacaatctccaaattgtgggtgtcagaacccccagaactaatgtaacttccaagtcagccccatacctgaaacttaccatataggcctcaaaggctgaatgcagccaccggtgctcacaatcaaatcaacaccccataataaacagacaccccacaactgatcaaataatactccatcctgatgccaaagggagagcccctagtctaattctcatctccaagctgggcagagacctaaataaccctcacatgtcaaagccacctcatcgtcctgaatttcccagttcccggtttctcagctgttctttcatgcattcaaataaagacacactccggtctgaaggggagggccccgggcctgatatccagccccgtggaccatggtcggccattcctggccaactgtacactctccccagcccaaatccggggagcttctgccttgcagctggattcagctctagcaccccttctccaaatgagctttgccttgcctgcccgcaatgtctcccgaaacaaaatatgagggtgtgatccatgcccatctctcagatcagggacttcaaattagggtggttaagccccctcctgccctctctccctcctccttgttttcccttctcgtttaccccacccaattttaatgttcaattaaaagtcacctccaaagacatctgggtagcagtgtctagcttaattcgaaaagaaaacccggagttcccaggctcaggtcccgcttcttgtcccacccattcccctggctcctaaagcccgcgatttctcacctcgggtaggaaccccagcctgaggggaaagtcccctcggtctcctaactctagctccctccgcccagccctagtcccctcctaggagacagaggtgcaaaataaacccgcgcaaaggggaggaggctaaaggtttcagccgcccagaccaaatggatcctgcgcccgggtctgagcgcaccccaggccgggtggagacgaggggcgaggcgaggccagtgctcggccgccccctcgtggaaggagccgcacattgccgagccttgcctacttgccgcgctggaccccggcgtcccgccagcctccaagcgtagccgacgggcgggtgcccgaggccctcgtgagctgggattgggggaaagcaagcgggctttgggcgggagtccatctctctggatccctacaaggacccagaagagagtcgggagcgagagaggccggacgcctaggtctcccgagcgtctctcgcccctccacccccacctcggggctttccccacctcctcgaggggaagcagctggcggagccgtccggtcgcaggacaatggaaggaaaccaactagaaatcatatccgccctctccgtaccccgcccggccagagcccccctttttgtaggcccgggtagagtagcctgtcattcacaccacaccctccccgtctgagaccctacgggagcccactgtcgtctgcccaaacctgctgtctcgttgggctcccccttttctcccttaacacagtacaagagagggagagggggttgccgtatgcactttgtcctgcagcaaaggttggctcctggcaaaccctcccaaaagccaacacaccaattttcactggcccaggccttccgacgactcagactcccgtattgccaacctcgatatccctaacctcctccccaattccaatatccccgtcctcgtgtccacttgcagtgacccaagaccccctacgttacgaccaccccttgtttctgaggtcccgccctcgagacggagaccccgccctggactcgccatctggagagcgagggaggaaggaaggatacagacccaggcgttcaccccacctccacccccgcccccgacatcccggccagataaaggagccgaggccaagaggggagagagaccccgccccccttaagaagagaagccgcggcccctgcaggacgggggtaagaacaagagactgagggagccagactcctgggtcccccaagagggtaggagcttgtgtggagcttgccatcagcgagcctgagtcccagaaattgggctaaactagggattggggactagataggagtcgcagaattccgtagttc

SEQ ID NO: 17127 - DNA, 2300 bp, Homo sapien
ccaaaatggtgaaaccctgtctctactaaaaatacaaaaaatttagccaggcatagtggcaaacacctgtagtcccacctattcgggagactgaggcaggagaatcacttgaacccaggaggtggaggtcgcagtgagccgagatcatgccattgcactccagcctgggagacaagagcaaaactccatctcaaaacaaaaaacaaaaaacaaaaaaaaaaacactaaactaaaaccttccttcacttcccactacagcagcttatcccctgttgaaaataacaccaataagaccagctaagctaatattacttggctcctgctgcatgtcagcacataaactaagcatttttagtgcatggattttctaactgaaccccttgggcaacgcttaatagtaggtactattatccccagtttacagatggggaaaccaactgagagattcagcatcttgatcgagttaagtaataaagtcaagattggaactgggccaggcacggtggctcacgcctgtaatcccagaactttgggaggccaaggctggtggatcacttgaggtcaggagttcgagaccagcgtggccaacatggtgagacctcgtctctactaaaaataccaaaattaactgggcgttgtggtgggagcctgtaatcccagaaactcaggagactgaggcaggagaatcacttgaacccgggaggtggaggttgcagtgagccaagatcatgccactgcactccagcctgggccacagagcaagactccatctcaaaataaataaataaataaataaataaataaataaataaataaataaaagactggaactgtgatctgattctaaagacccgagttcttaatcactatgtaatacagccacagcaatttctgtatctttggcatattccccaccagccgacattttgactcttagaaagtatatatgtgtattattgatgattacttttatttcccacatataaaattatttaaggctcaatatgtcttttaagactacacacctccctccctgcctccacttcttgtttgctgctttccccagtaatctgggagtgaacattgagtccacggtttcaaggtcagggtcctgggaagtatggcttataatgaaggaacaggaaatccaagccattggtgttatggagactgggaaggactggggagtgtttgctaggggcctgaggactacttgggtaagagggggctgactgctccagtggccagggtcatagtttgtctctttagtctaccccaccatcagatcaaaaaaggtggttaggaagtggttgttactagagggcagaggaaaaggttccagccccagtgaggaagaggtaggtggtgttggtggggccctgtgtgagcttacagccgcccttcctctcctcagttatttttggtctctgtgacctgtaggtttcctgttagtgggaacagaagtgacaggaacgagttcccactacagaaatgaacgccaggagtccaactcattccccttctctcttcccttagccgttgaacttctcagggatccaggcttctaggtctgcgtgcctagggctgcgtgttagtggcttcaggcgctgcgccaaacacttcgtttgagtctcatctcctaacccctcccctacccccaacagggccttgcaattcctggacccctcattaaagcaagagagtcctctcctctccagacccagtttacccaccactaacccttccgtgtggctctgggtgctgaaacggggatgacttggcccgctaggtgaagaggagacggaagcttcctggcagtccccgcgtcacgtggggccctacctagtcagcctcctaacgcccctccttacgcatgcgcccattcactgctggtccccaacaatgcctaaatcccgccctgcccttctcgttccgcccctgcccgggagccccgcgtcctcattggcgagctccagggtggcccggcccggacaccccagtgataaaatagatcatctacacggaaactggcgcgctccaggggtggggcccaaactcagttccaccctctggctcccagccgaacaccgaaccgggaccgatccggccccggcttgaactagctcagctccgagctcgcggaaccacgcccccgggagactctggcccggccagcgcgggccaggtcttcagtcctatatcgccccgccttgggaaaaggtgcaggggcctctcgccgcctcgtcgggcccttcctctctacctgcctctccaacccctctcggccccgagccacccgg

SEQ ID NO: 17128 - DNA, 2300 bp, Homo sapien
gttttgctccttaagaagctgtttttcttgtctttacgtgcagattctttcccaataattaggaaacactgccatcatgtggctcaatggatgcatgctccaaacttaagttgctgaatgttctatcatattgtttaataattaaaccaaagaacacatctctgaattcaaagagctgaggtaaagaatgtcaacctatcaaaaaaggacattttctataaagtttttcaaaaaatcaatacctggcttcaatgacctgattttttactttgcttttaaaattgtaacctggccaggcatggtagactgtaatcccagcactttgggagtccgaggtggaaggattgcttaagtccaggagcttgagaccagcctgtgcaacatgctgtgaccccctctctacaaaaaaaatgaacaaatttagccaggcatggtggtgtggagcctgtagtcctcgctactcgggaggctgaggtggagtattgcttgagcctgggaggtggaggctgcagtgagccataatggcagtactacacttcagcctggacaagaccctgtctctataaataaatacacacacacatacatacatacatacatacatacatacatacatacatacataataaaaaataaaattctaacctaagtgtttagagattctgatctcaagaatcctttctattcccagtgaccccttattttagactcataagttttctgtccctgcaatggttccaccctttccagggcagtttgcttcaagctgtatccaggatctttcccttaactgtgccagattttgtttcagtcctgggattgttctccttgtaggtccacagttggacagacctaaattcaaatatccataccattttttccctgagagcttcagttactgcatctataaaagaggcacgacatcggccaggcgcgttggctcactcctgtaatcccagcactttgggaggccgaggtgggcggatcatctgaggtcaggagttccagaccagcctggccaacatggcgaaaccccatctctactaaaaaatacaaaaattagctgggagtggtggcaggcgcccgtaatcccagctactcaggaggctgaggcaggagaatggcttgaacttaggaggcagaggttgcaatgagccgagatctcgccactgtactccagcctgggctacagagtgaaactccatctaaaaaaaaaaaaaaagaaaagcgacaccttcttcatagggttatcataagatgaagtgatagcatgtgtaaacggtgcctggtacactgcaggtcttcacattgagggagtcgtgtttcatccctctgtccttgaggacctgttattttattttatttattttatttttgtttatttatttatttttgagacagagtctttctctgtcacccaggctggagtgcagtggcatgatcttggctcactgcaacttctgcctcccgggttcaagcgattccccgcctcagcctcccaagtagctgggactacaggcgcccgccaccacacccggctaattttttttgtatttttagtagatatggtgtttcgccatgttggtcaggctggcctcgaactcctgacgtcaggtgattcacccacatcggcctcccaaagtgctgggattacaggcttgcaccgcgcccggcctgggggtctgttattctaagcacagagctggcacttggtggaggtctgtgatctgattgatatccgagatttacctggtcctcggcaacgttcctgagaacaaaactactcatcccctcaggttttggggaccatccctatttccacgcgttggcggtggaccctgggctcgctggggtttgcaatccacgtgtctcccctgcgcgcagcaggcggcaggtgcatgcgtgtgagtagggcagggcccctctgcattcatttctcgccgctcccccctcccccgggcctgggggttgtgtgtgtacataattcaatccccgtgggactggcgtctggcctcacgcgcggcttgccggattggctgtttcagctcgcccccgccctccgtacaccccgcgtcccaggtggctcaggcccctgtggtgatctctgtttaccgagagagcccgtccaagttgggctccatcgctgccctcgctccccttcggggcccccgcccgcctgggaagcagagagaaagccgggcccagcccttcctcacccttcccctccccgcaccgcccggagaggtcgggtaagggggaaggagtgtgcgtgggacggggaacctcgggcctggggatct

SEQ ID NO: 17129 - DNA, 2300 bp, Homo sapien
agcaaagtaacacaggaacagaacaccaaacaccgcatgttctcactcataaccgggagctgaacaatgagaacacatggatacagggaggggaacatcacacaccagggtctgtcagggggtgggcggcaaggggagggagagcattaggacaaatacctaatgtatgcgggccttaaaacctaggtgatgggttgataggtgcagcaaaccaccatggcacacgtatacctacgtaacaaacctgcacattctgcacatgtatcccagaactaaaaaaaaaaaaagaagcttcaaacccactgaaccagactgaaaaaaaaaagttagtgaatggagaaatatcatgttcttttcatggaagattcaacaatgtcaaaatgttgattatctccaaattaatatgtgaatacactgcaagactgtggtagacacacagagagctacccaggtcccccttctaggaaggatgtggtgacccactgtggggagtgtaacctgcagacagctgcttcctgaggtcacacccatgtcagggctgactgccagtgaccgaaggagctggtgctctacaggaccctgtggcagtccaatgctggacagctcccgggggtggcattgtttgaacccagagctccctgttggtttggttgaagctctccaaagtgctgggcttctccctctgcccagcaccatttcatccactttccttttcgaagtgctaatccctaataaatagcttgtaccccaaattcagcctcaaccttggcttccaaaaaccgaacctgcgacatatactaatcaaaataccgaataccaaataaaaacaaaactggcaacgacctggccgggtgcggtggctcgcgcctgtaatccctgcactttgggaggctgaggcgggcagatcatgtgaggtcaggaggtcaagaccagcctggccaatatggtgaaacccctctctactaaaaatacaagaattagctgggtgtggtggcgggacctgtaatctcggctactcgggaggctgaggcaggagaatcgcttaaacccaggagatgcagtagccgagattgtgtcactgcactccagcctgggcaacagagtgagactctgtctcaaaaaaataaataaataaataaaataaaaaagaaaagaaaaagaaacaacttaaatttctgatttatttctgtcaatagagaaatgctaaataaataaattacggtgcctatgatgaaatgaggtgcaggtagatcaagtacattttataaactgatgtggagaaatgttcctgatagcttgttaactccaaaaaaaaaaaaaaaaagcacatagcagaacacaaccccatgtacatacaaaatataacctaaaatgtatttcttctccttctccaccttgtaagatactcagtttccttcctactgaaagggatgtgcgcgtggattcagggcagctcccttaggggttgagcagggatcatgggatgaaatggaatcctgttcatgaagacagcgcctgtgctgagagccagagcagggtgccaaactgtctccttacaagctgtgagtgatcttgggctctgagcctttagtccgtcatccaaaatgcctccccaggtgcttggggggaatggttgtggaaggtaaatgtctggcataatcctatcacagattactcaataaaatttgctcttttccttggcttctcccgtcctattagggccaagaagttctattctctggcacccccttccctccttccgagtggagtgaggcgagcgaggccacagctgagcagccgaatgactgggacccagaggatgctgatgccagggactcaggccaggattgagcaagagaacagactgggcttctctaggatcagaggtgcgatgatggagacccaacaattctgggaaatgtagaggcaggaagtgaaaggaagtgtagggtagaggagcaacagcagattgtacctctgatccagccctgctcccagatggtaaaaatgaggaagctccgagaagaggaaaggaagtaggcatggcctggaggaggagaacagagctggcctcaaacccaactctccccacccacacatggtctctgtgtgttctaatccctgttcattctcatttactgtctaaagttgaggagatgggatgtcccagatgatagggctcctgggatttcagacccaagaccagcaggactccagtcacctctaccccagctctccaggacacagcgctcccaactctgagtgacgtcccacctctggtccttgcagcacaaccaacg

SEQ ID NO: 17130 - DNA, 2300 bp, Homo sapien
gaaaataggattccataacccaaaacagaaaacctccaacaatatggaaacttcagaaatagtccaagtacatgttaacttctaagttaaaatgattttcaaatagggagaaagagaaggacgcagatgagtctggctttctctgtcccttctctccctgtagtgccgtgagtgggggtgtaagtgacaagccctgaaacgtggaattggttcagtcaaaggggtggccaatgaggatggccccatccctggttggcagttggcaaagcttgacatgcagtagacaatccatctgtgaagctcttacctgtatctcaggactaaatccacatgccccttaagatgggggcttcacagcagtgttgttcagactttgagttgtgacccattaatggactgggaaactcaacagaaggcacgtagtaaggtgagcattgtcccatcaaactttagtgtcaaccgtgtatttccaaacgcattattctattcactcactcactcagtagatacttgttgagcagctactgtgtggcaggcactggggatccaggagaaagtaacacatacaaatgcacctgtgtgtgcgggtgcttgtgtgtatgttctggatcacagcatgaaattcgtctctcgctgtgggctgcagtcagagagcccagcggctgctgctgcctggtggctgggtgggaatgtcagggtactgggggggtggctacttcccatgtgggtcagcaagttacaagaacagaaaaggcctctgtttgaattccttttcggcacccggggaaacgagcagctttataagaaaccctgcccgtagccatccgcccaagtttggtgagggtcagaaaatcatgcacaaaaactgtgttttctttcccgagctattgttagcgcaagtgtagacagtcagccacgttccttgcttcatggaagccagtcttcctcgtaggaccatgaagaccttttcttttctttttctttctttcttttttttttctttgagatggagtttctctcttgttgcccaggctggagtgcaatggcgcaatcttggctaatgcaacctccgcctcccaggttcaatcgattctcctgcctcagcgtcctgagtagctgggattacaggcccctgccaccacgcccggctaatttttgtattttagtagagacagagtttcaccatgttggccaggctggtctcgaactcctgacctcaggtgatccacccacgtcggcttcccaaaatgctgggattacaggcgtgagccaccgtgcccggccagaccttttgttatgatgttattttcccctctttactccattttgctttgccagtttctctactcacctgggccaccacctagagcaagttgcctcatctctccgaggctccgcttccgaaccctgtgaaatgggagtaacagaagtcctgcctcgtgggggtgttgtgctgtgataaatgaagaaacaccttggagaatttagggcagtggctgggcctgaggacagtgtttgtgttgcctgggctggggcagggtctgggccggacggggctctctgaggttggattcctcctgcgaggagagctgtttttctgcaaagccccttcctcctcctgctgaagcttctggatttgagaggctttactctccaggagagtgaagcgagttgggccagagctgagagtctggtggccgagcccacaggaagctggggtctgtggttcagatgccggattgggcaagagtagagaactggtcgctgtgatcctggtcagggatatttggagacacccacagttctggtaaattcggaggcaggaagtgagagggggagggagagagggaaacggcaaactgcaccccagcccctcctggcctggcaccccttccaaatggtgcaatgagtggggtgagtggcgtgtggagttgagcgcagcccaggggacccccctctctgggaataagaacagagatagccccgtcccctgcccccaccccacaaatgagttacagctctgtttcctcttctgtttactgtccaaagtcccaggccaggaggtgccaggttagagcttggacactcagaccctccagtgcaggccttgcccggaccagcccctcctccactctcctctcccctgtgagctccacctgccccagttctcctggctttaacccctccttggccaaggccagggttgcctgcgggagccaggtgtccgctctccacacctttcacaggtaactgaggctggggaggcaactgggacgaggatgcttgggaacaaggaggcc

SEQ ID NO: 17131 - DNA, 2300 bp, Homo sapien
tggcacgatctcggctcactgcaacctctgtctcccgggttcaagcatttctcccgcctcagcctcccgtgtagctgggaccacaggtgcctgccaccacgcctggctaatttttgtatttttagtagagacgggatttcgctatgttggccaggctaatctcgaactcctgacctcaggtaatccgcccggctcggtctcccaaagtgctgggattacaggcatgagccgccgcgcccagccgggtgaccactattccgaccgaaataatgtaggttcatttgcctgaataagcccgattgtaagtgattatattagaggatgtttaattaacagcccaacagtcaacaaaatcactggccattgtcccagcacatataaatgacatggtggttgtcaggacacagacaaaggagggcacacacagacctgtcacattttatgcaagagatgtgttcctgaatatctcacatcattgaaaactctcaaaattcaagccttgttttctcactgaaataactgtaaaataggatttggatgacttcacatttgggcctaaagtgagacttattatcttttttttttttttttttgagatgaagtcttgctcttgtcccccaggctggagtgcaatggcgcgatctcagctcactgcaacctccgcctcccgggttcaagcgattctcctgcctcagcctcccgagtagttgggattacaagcgcctgccaccatgcctggctaatttttatatttttagtagagacaaggtttcaccatgttggtcaggctggtctcgaactcctgacctcagatgatccgcccacctcggcctcccacagtgctgagattacaggcatgagccactgtacccagctgatacttattattattattattattattatttttttttttttttttgagatggagtcttgctctgtcaccaggctggagtgcagtggcataatctcggctcattgcaacctccacctcccgggtttaagcgattctcctgtctcagcctcctgagtagctgggattacaggcatgcaccaccatgccctgctaatttttttatttttagtagagacggggcttcatcatgttggtcaggctggtcttgaactcctgacctcaggtgatccgcctgcctcggcctcccacagtgctgggattacaggcgtaagccactgcgcccagccgagacttatctttaatattgcctgatttccaagtgagcataattcaaattcacatggctctctctgaagccccgtggggctgtgagggaccatcgtttagcatctctgggacactggagcccagctgtgtcaacgggatgggatcctggctctgtgtgatgggtgtggttctggggcccgaacgcagtgcctggagtcaggctgcccaggttctagtctaccctttgctgcttccttgcagcatgaccctgggcaagctcttaccttgtagggccttagctttctcatctgtgaaatgggatgtgctctggggataatgagagaagttcatgaacgcagtgacctgaggcacacagtagtagtgagtggaggtttgctggcaccagtcccagcggaggctctcctgcctttcctggaaccaagctggccctcatgctgcttggaggactttactccccaggagagggaagcaagtcaggccagagctgggaagcctggggctcagccccacaggaaactggggcctgcggctccggtgccagggtcacaggtctggattgggcaagagcagagaaccggtccctctgatcctgttcagggatatttggagacaccaatagttctggggaatttagaggcaggaagcgaaacggggagggaggagggatatggcaaatcccaccccagcccctcctggcctggcacccctcccaaacggtgcacggaagagtgaggtgactggcatgtgtgggggcaacacgattctcctccctggggagcagagcagaggcaacccatcccccactcccacccccacactcccctaagttccaatccatttccacctctgtttactgtccaaagtcccgggcactggagatgccacgtttggcgtgcttggacacacagacacgcagacacagagacaccggggcccagggccctcctatggaccctgcccgctcccctcccattgtccacggctgtccgcccacccccattctccaagcttcagccccctccttagttcggcatctgcacagcactgaagaacctgggaatcagaccctgagaccctgagcaagtaaaatgggaag

SEQ ID NO: 17132 - DNA, 2300 bp, Homo sapien
atccccagcaaacggcggtgaggctcctgggctctgtagccttcctgccacaggcactgaagttcccaaggtcccccggggtgggcagccaacaggggatgggtttgccctctgaactcctaggggtttgtctgttgggccctcctggggtccgtggctcccatgagcctttgggaaggacaactccttattgaggagcacagtgtccagggctgcaggagaaggggtgtcagctggcccagagtatggagaaggggttgtcagctggctcagagcatgggggtggcagggggtaggcattcccctacccgcgtatccctccatgtatcccacagggttgagcgacgagagtggtcaaggttaaaggccaaggtaggtggaggagggtgtgagcctgggtggaagtgtgagggctcatggagctgagctcataactaaccccgtggcctgctttttcttcttaggactggggctccagctctggatcgcagggtaggtagggttagttcgggaagatgtgggtgagaggagcactgagttgcttttgatatcctcaagggggagacagggctccaggtcccctgtttcagagccccttgcagatgccccacctcccaccaggtcgagaagactcggttctgagctacgagacagtgacgcagatggaaggtgagccctggcccctgccttggccccagcacttgctgctcccccaaccctgcgctcggcctaagccaggctctctctgcagtgcactatgctcgccccatcatcatccttgggcccaccaaggaccgcgccaacgatgatcttctctccgagttccccgacaagtttggatcctgtgttccccgtgagtgctggggccttggatggaggagaaggtggaagtgggggtggggcaggggaggcccatccctggggccataggcagagcctcctgggggatcggtgtgtagggagatacagggtttctccgagaaggggtgcttctcagccaccctctcattccatagtacccatgcccaggccagagacttggaggccctggagggtgctaggggaagcggttctggccctctgcagtcttggtctccctggcagctccctttcaccaaaggaccagctgggcactatggggatttgattgaagtaggcaggatttaagctagagggatggtggttagatctttggggggtggggtgacttcctggcagatacgacacggcccaagcgggagtatgagatagatggccgggattaccactttgtgtcgtcccgggagaaaatggagaaggacattcaggcgcacaagttcattgaggccggccagtacaacagccacctctatgggaccagcgtccagtccgtgcgagaggtggcagagcaggtaggacctggcgggcacccggtcctcttccttctcccctctccccaccccactgcctccctccagctttctctaactctctctctctctgtctctttccctgctgggtctccactccgctcctccacctccttctcctcttgggcaactctgtctgactgcctgctctctgcccctgctctctctcccacctccctcacttcctgaccccaaattccccaccaccatctggcctctttctctccccactcccttctccttgccccatttctcctctcttcccatggccttgtctttggtggcttggccttccccactgggtccctccctttttcctgactccccgctggccctctcccctgcctcacccttttctggggcccggctcccctctcccactcctctgctaactcctttcctttccccgctgctcctcaccctgccctccctccctccctccacggttcctttctccatctgcctcactccctcccatctgtctccttgttccttccatctgtctgtcctctgtccgtcctcccctccctcctccctctatcctacttcctttctcctttttcttggctttccttcccgcctgtgtcacctctgccttgcacaccccgccccactcgctgctgccccggctctgccaccatctcttgggtccctgcctgcctggtgctcctcccttcctccattctgtcctgtccctgccctctcccgtgctctccatcttccctttcctttccctctgtcttttactctgtccatacccgcttcctgcctgactctctgcccccgtgtttcttgacatccatgtcactccccttcggccaacttcccattccccacctctccccgtccgtgtccctccggcactgctctctgtcctttctcgccacccgc

SEQ ID NO: 17133 - DNA, 2300 bp, Homo sapien
ctcttggcggcctccccccattgccatagagacgtggcttcggttgccctggcaattggggaagcccctaggaccgggctaaagcgggccccgcctgggagtctagagaccaggcgattgacgtcagggacctgggcacgccccactttaaccctttcccgaatgaagtggggggagggagtagatgagcgggataggacccggatgtctttcaccactcccagttcctgacgtcctttgcactgcgtagggtgaggggcgtaggggagcgaggaaggcaggttattcaggatgcgctgcgcccacaaacctcttcagcccggcctcctctcggcctggctaacgtggggcggggcccagggcaggagaggcggggctagcggatcccttctgcgctcaggagtttggtcggccccaggccacgccccacccccctgttgtcctgacgacagggcctcctggaggtgggtctccccgggtcttgactggtcctagataccgttgctaggcaacacggtccttagaggaaggggtggattggacggctggttggtgagaccgagggaggggcctgcagctggggaaccccggattcccggggtgcagggtttagggcaaatgtctgtgaaagtgaggggcaagtctaggggagggttatgaaaatatctgggtagatatggggggttggggggatggggcaggaaatggggaccaggacccggtggacatgatccctggggtgtccatgtgtagcacataaggcatgtaacaccctgtggtgttacatccggtgagaagctcccttcccccaagcctacccccctctccccactctttgccatctgctgctcccctctccgtctggctgtctcccttcccgcttctcctacacctccttccacatgcagggggccccgggctgggcagagttagatccttgcgcgtgtgcatctgtgcgtgtgtgtgcgcgtgcgcatgtgcacgcgtgtgcgtgtgtgtgatgtggattgaggctgggcccttgagcagctctcagggtggcggagtgggcttggctaagaggctgaaagggtagccacgctgatgggaccctccgttatgggctccctctcgagtcaaggctcaggctgctttttgtctcttgttttcccaaacaggccaattctcccccagtgattgtcaacacagataccctagaagccccaggatatgtgagttgtttagattttggggctggggccattgcagaaggaaggagggagtaagggagggcagcagatgacgggcaggtggtcagacaggaatgtctgtctcactgcttttgtgtttctgtcccgtgctggagttgcaggtgaacgggaccgagggggagatggaatacgaggaaatcacattggaaagggtgagcaggctcctccatcggcagtccccgtggcctcccgtctgtacctttctttctgccatgtggtctgggtggctagcccctcaccctgtgccttcctcctctggctgctccaagccatttcccaccccacttgccttgccagacttgggcagtgaggggagctgaccctcttcccctccttcacccagggtaactcaggtctgggcttcagcatcgcaggtggcactgacaacccacacatcggtgacgacccatccattttcatcaccaagatcattcctggtggggctgcggcccaggatggccgcctcaggtggggagaggagacaggggttaggttgcttggtccctggagagggagggccagggcagcaggaagctcttggctcaggcccaccttgctgctcccagggtcaacgacagcatcctgtttgtaaatgaagtggacgtgcgcgaggtgacccactcagcggcggtggaagccctcaaagaggcaggctccatcgttcgcctctatgtcatgcgccggaagcccccggctgagaaggtcatggagatcaagctcatcaaggggcctaaaggtagtaactcattttgttcccacccccatcccaactgtcctgtgcccccaagcctgcttcctgggcacccacctctggcctcccctccatccaggtcttggcttcagcatcgcagggggcgtagggaaccagcacatcccaggagataatagcatctatgtaacaaagatcatcgaagggggtgctgcccacaaggatgggaggttgcagattggagacaagatcctggcggtgaggactccatctagcccattttctagcccagatttgggtctcacctactagccctggcaggcccaagttcatcacttcac

SEQ ID NO: 17134 - DNA, 2300 bp, Homo sapien
ggattcctcccgggcctgagaggaactgcaggaattctcctgcctcttacccgtaaaaccccaacttctctagccctagggcaggaagtcccaaacaatttctacccctttttctgcaattctcattggggtgagaggaggcccaggaggagagagagctgggctcagcttctttttgagctgctggagccctctgtgaggaggccctctttgctggcttctcaggagagcgtggctaggttctgcctgcctatgggaagagggggccagggtgtgtggagcaagatggtggcggtgctggtgccttgggacctgggggaatgggacagctggtcggctcagagacggcctactttactcacagctggaatttagtggggagaagcagctcaactccaatcctggaggattagggagattaaagtgagagaagagagagatgtcccagagaccaagaggtgaaaaacagggctccttgtggaggggaggtctgggagcgaagtggggggctggggctcggagatccttctccccaaatctttccgtaggggctggggtgaagggcacagtctggggagatgaagtgacagtgtgttcatcttcctgtgttggcatcttccctgtcccaattctccttgcatctcactagctcccaggtcagccctctggctcctggcacccccactgctgcggtgggcacccccactcctcacagtgctgcatagcgacctcttccaggccttgctgggtgagtagcccgttttctgagggacctgggcctccaagggccattactgaacttcgggggctgtttgggagcccagagatcatttggtccaagctggagcaccatgcagggtcctgcctatggtgtcctccatgagtgtggaccagccttggctgaaagggctcctcccttgccagccagccagcagcggtgatgacaggggtgatgtgcctggagaggcctggggtggggaggtaactcagttctgttcctgtgacagacatcctggactattatgaggcttccctctcagagagtcaggtaaggaggtgggggcgagcgcctaacttcctgaggggcaggcagggctggaggggtgagccaaatatcactaatattacctggaatcttgggggccctgctgacaaaagcctgagtcagtggcccagggacttggggcaccgagaatgcactctctgtggtcctgtacccactctccctttcttcctcgttttctttggctgccccagtttcaggcactaaagagtctagggcttaactttttaggtttccccctgagaaacctgagggagaactaggcccccagggattgcctccttcagctcctccctcacacccgaccccctaccgcctgccgagaggcctccctcccgtattcaaataaccgtgggtgctcccagcccaactatagatgcttccttctctaagaaatgaaatccagcctcatcgtctttgctgtcatcgctggtggctggccaggtctccatgtttgcctcaggggcctctgtgcttctgcttctatctcctttcccattatccgggttcctgccagcacagaaggagttaactctgccaaggcaccccccccattctggctcctagctccctccctccctccccctgcttcctctctcctcctctctccccttccctcttcggctccacggctccctcggccgctgccgtttccaacccccccaccccactcccccgccacggcccctagcccctggccgtttggcaagacccccccctaccccggggctccccgaaatccagttcccctcccccaccccagctcatgccccagcccccgaactccggggctgccagcccccggtgcccccgcccctcctgagaatcggggtgtgctccccaagccccctcccctccactggggagccccttttagggcccccttcccctccctcccacgctcccctccccttcccttctccaaccccctccttcccctctcacccctccccccatcctggccccccctgcaaaagtggggtgcggaggggggaggggtgagaacccacggaggggaggaacgaaactccgatgaagtcagagccccttacccgccgccgcggccaggccccccaacatggactgtctctgtatagtgacaaccaaggtaagcatgatgggggggctataaactggggggagggtatgagtttgtggggaggggttagtaggccttatctgggactggcgcccctggagtggcagcatcagaagtaagatgtatttgggggtctta

SEQ ID NO: 17135 - DNA, 2300 bp, Homo sapien
gaaaggagatagaagcagaagcacagaggcccctgaggcaaacatggagacctggccagccaccagcgatgacagcaaagacgatgaggctggatttcatttcttagagaaggaagcatctatagttgggctgggagcacccacggttatttgaatacgggagggaggcctctcggcaggcggtagggggtcgggtgtgagggaggagctgaaggaggcaatccctgggggcctagttctccctcaggtttctcagggggaaacctaaaaagttaagccctagactctttagtgcctgaaactggggcagccaaagaaaacgaggaagaaagggagagtgggtacaggaccacagagagtgcattctcggtgccccaagtccctgggccactgactcaggcttttgtcagcagggcccccaagattccaggtaatattagtgatatttggctcacccctccagccctgcctgcccctcaggaagttaggcgctcgcccccacctccttacctgactctctgagagggaagcctcataatagtccaggatgtctgtcacaggaacagaactgagttacctccccaccccaggcctctccaggcacatcacccctgtcatcaccgctgctggctggctggcaagggaggagccctttcagccaaggctggtccacactcatggaggacaccataggcaggaccctgcatggtgctccagcttggaccaaatgatctctgggctcccaaacagcccccgaagttcagtaatggcccttggaggcccaggtccctcagaaaacgggctactcacccagcaaggcctggaagaggtcgctatgcagcactgtgaggagtgggggtgcccaccgcagcagtgggggtgccaggagccagagggctgacctgggagctagtgagatgcaaggagaattgggacagggaagatgccaacacaggaagatgaacacactgtcacttcatctccccagactgtgcccttcaccccagcccctacggaaagatttggggagaaggatctccgagccccagccccccacttcgctcccagacctcccctccacaaggagccctgtttttcacctcttggtctctgggacatctctctcttctctcactttaatctccctaatcctccaggattggagttgagctgcttctccccactaaattccagctgtgagtaaagtaggccgtctctgagccgaccagctgtcccattcccccaggtcccaaggcaccagcaccgccaccatcttgctccacacaccctggccccctcttcccataggcaggcagaacctagccacgctctcctgagaagccagcaaagagggcctcctcacagagggctccagcagctcaaaaagaagctgagcccagctctctctcctcctgggcctcctctcaccccaatgagaattgcagaaaaaggggtagaaattgtttgggacttcctgccctagggctagagaagttggggttttacgggtaagaggcaggagaattcctgcagttcctctcaggcccgggaggaatccatctgcctgggcacatggtctctggaaggaacagagggcaaagacagaagggaatgttcaggaaggtctcagaggctttactaagggaggggcagtgaatctgggggggtcttcctactgtgaaactgtagctgttccaagagttagtgaatggcctacatctcagaagaatacacttagggtactcacaccctagcttgggtgccccccaccactgtaccctcccttttgtgttggccgagatagatttcatcaggaaccctagagtctgtctttccatgtctctgcctctgccatctaccttacacttctctttccctacttttcccttctaaccccaccggagaagccctcccttcagtccacctccatccctctggctgcagtgacttaagccccttcctcttctgtcccatcctatcccatcaccccgtcggaggactagactctaggtcggacgggcgggattaaggagtttgggggagacgagggacgcttggagatccctctaagtcagcggaacgcagggccgggctccagggaactacagctcccagcatgccccggggcccgcaaccgtccgccgcccggtgcactgtggacgatgagtcagggttaggggcgccaggacgtgggcgtgcaggacgccagagctgggtcagagctcgagccagcggcgcccggagagattcggagatgcaggcggctcggatggccgcgagcttggggcggcagctgctga

SEQ ID NO: 17136 - DNA, 2300 bp, Homo sapien
tccccaaaaccttcccccaactgaaatgctcagccatctgataatctaagtgccaactggcctaatctgtgccaagcccagtgtgccccccaatccctggctctcctagggttgcctcaccagatgccagcttggggaggtatttttctttctgggcctttgtgccaaagagcaggatgcctttgaaaccgatgctctgatgggcccccagggtaatgcccacgccaaggtcatgcatgcccacgatctccaccaaacgggcgtactggaggggaagcaggaatctggggttgtcactggctgcagggggacctgaccttaacaggagagtgtgggcaacagggcagttcctgacctagggcagttcctgacctagggcagtgcctgacctgggccatccccagtgtgtagaaaagaagtggggtgtgcaaagggcacagcagagaatgctggtctgtcttaggtctaggtaggagggtgacttgctactagtcagtctattgttaggcaatccccaacttagagatttgtaaggacttgggaaccagggtgaggcccatggctcaggcctaggggactgcatgtaaattgtgttatgtttggacagttaacatccatcccacaggcacccagggcaggtgcttagaagagaccttagccctagtctctaggtctatggcaaaagagctgagtctgccaagctggggtatggcatactgggatgtggcgatagggcgccctcacctgggtgttgcaaaggcccacaccacccagctcactgggcacttgcagaccaaaggcccccagctccttgaggccctgccaagtggtctcctccaccatctccagagcgtcattcttggcgggatcgttcacttcctggggaaggcacaggatcccacatccaggctccttttgagcttaacatctccaaacacctcaccagggaccaagccccgagtcattccttacctcgaagaaacgggacacaggctccaccagctctttaagaaactgtgtctgctcttcgttgagcactgcagagggtgggggacaggctggtcaggccaggctggcaggggaaaccaccctggccccacccagctctgattatcccttcccttaccggacgggtatgggaacacctgatctgtggtgagctggcctttgaacattcccacagcaaaggacttagattcctgggcagagagaggcaaatttcagggctctggttgggtctggctaaggtccacctggcctcggggctacctaccgccttggccggttttttcctggtcagagcgtcagaggggtgggaatctgacttgtccagagccagctgggaaaagagacggttagcaagttcagggaagggacttccgctgtgtcaaggggagaacaggcgagagccgcgcggggaggcggcgcgaagcggtgacctttcccctagtttcgccctagggcaccctggcttgccctttcccctactttcggcgactgagcagtaggcaggtacctggcaccaagagggagatccctgccgatggcgggcgccgaagcggaccgccgctcccacacccccttgccaaggctgcggtgacttacctgagcggcacccccggcatagggccgccgggcagggccgggccggggctgccccaggagcgccgtgagccgcgagctgtggggagtgggggttcagtgccggcccggtgcccagggccgctgcccaccgtccctcttgtcacacacagaccttccgcccccgagcctcagcagctgccgccccaagctcgcggccatccgagccgcctgcatctccgaatctctccgggcgccgctggctcgagctctgacccagctctggcgtcctgcacgcccacgtcctggcgcccctaaccctgactcatcgtccacagtgcaccgggcggcggacggttgcgggccccggggcatgctgggagctgtagttccctggagcccggccctgcgttccgctgacttagagggatctccaagcgtccctcgtctcccccaaactccttaatcccgcccgtccgacctagagtctagtcctccgacggggtgatgggataggatgggacagaagaggaaggggcttaagtcactgcagccagagggatggaggtggactgaagggagggcttctccggtggggttagaagggaaaagtagggaaagagaagtgtaaggtagatggcagaggcagagacatggaaagacagactctagggttcctgatgaaatctatctcggccaacacaaaagggagggtacag

SEQ ID NO: 17137 - DNA, 2300 bp, Homo sapien
ccagactggtctctgacttctgacctcgtgattcgcccgcctcagcctcccaaagtgctgggattacaggcgtgagccaccgcgcccggcccaacctctgcttttttgaaggcaggctggattaagttgggatagcatgggttttagaagaactgaacaaactggactctagctagaaagattgtttgacatggggatgctgatactatcttgggagttatcttggctttaaggcaaggtttttctagttgtcagcaatgtaatcttggacaatttatttaaattttgtgtcttgatctcatctgtgacatggagaaaatcacagaatgaaatggttagttcacgtgtgtggcacacgggaaattcttggtgaatggtaattgtaattagcattgaggctgaccactctgtaaagtaggttatggtgatacagaataatttgcctcagagtggaccaagctgtgctgagattgtgttatgttgggaagaatcctacattatgctgagacgggttagtagtgactgggctgtgttgtcacgttgacagcaaatggattatgttgatatatatcctggctcccatgaccatattaggctaacgggttaattagacaaggtgtcctaatttggggctaaggttgtgtgtggaaagagagagaggaacaactagggtagagagtctgatgctttatacgtttattcatttagtcgacagtatttgttaatgcttaagtgtcagtgtgtggtgtgtggctaggacatggtgttgaccagagtaagtgttcatggtttgatgtcatggtcaagaagaaggggcaagtccggtccaccacagggaacccattggagagatgaccccaaggctgggctttgggatctgtcaggttgagcagattgctttgtgcagaattttgtgcccagtgaggcacaggggaatgggaaccccagcttgccctctccttgggagctttcagtctaatgaggaacttccattgtttgtttgatccaatgggtggtttttttttttttttttttttctgaggtggagtctcactctgcccaggctggagtgcagcggcgcaatctcagctcactgcaaccttcgcctactgggttcaagcgattctcctgctttggcctccggagtagctgggattataggtgtgcaccaccatgcctggctaatttttatatttttagtagagaaagggtttcaccatgttggccaggctggtcttgaactcctgacctcaggtaatctgcccactttggcctctcaaagtgctgggattacaggtgtgagtcactacgcctggcctctaatgggtgtttttactcaagaaaggacagtcttctagaaatgaattagagaaaactaaaggaaagtataagagtagaggctttgatgaggaccaaagccttttttggaaggttttttttttttttttttttgagccgcccaggctggaatgcagtggcgcgatctcgacttactgcaaccactgtctcccgggttcaagcgactctcccatctcagcctcctgagtagctgggattatagacacccaccatcatgcccggctaatttttgtattttagtagagatggggtttcaccatgctggccaggctggtcttgaactcctgacctcaggtgatccgcccgcctcagcctcccaaagtgctgggattacaggtgtgagccaccgtgcctgacctttttggaaggtttgtaaggaacaggggtggggttgagaggaggccaccagccagtctcattagataggtatctcaggcagccgcatcagcgtgcgggattgcttttgaaactggactaagaggtttgagtcagactcaaggaagtctttggagcagcactgtgcccctgagggtgcgttagggagaggagaaataaggaaaggggattgagtttggagatttcttaggtgtcggagtgagttctttcaatgtaagagaagacctgaacagggcaggagaaagtcaacatcctggagccaggtgaagattgggagaaagtttgatgggggtcggggtggggatggttggtccagctcactgacctctaccttgtcgcttggcagggtggtgaaggaagaaatttcagatgacaacgcccgcctcccctgcttcaacggaagggtggtatcctgggtaagaggttctgacaccgaggaccaggccccctcagcattgccaagctccctcaagcctcagtctgtttctgtatcctccccaggccgcgcgttagcagccctggctctttacctcctgtctgtttgg

SEQ ID NO: 17138 - DNA, 2300 bp, Homo sapien
aagtcatccaagagaagggcagctcaagcaggtcccacccagccaggacccccaaggtccactttctctcgtctgcaggcccccgacagtgctaccttgcttgagaagatgaagctcaaggactctctctttgatctggatgggcccaaagtggcatctcctttgtcccccacatccctgacacatacctcccggccccctgctgctcttacccccgtgcccctttcccagggggacctctcccatcctcctcgaaagaaggaccgaaagaaccgaaagttggggccaggagctggggctggctttggggtgcttcggaggcctcggccaactcctggggatggggaaaagagatctcgaatcaagaagagcaagaagcggaagttaaaaaaggcagaacggggggatagactcccacctcctgggcctccccaggcaccccccagtgatacagactctgaagaggaggaggaagaggaggaagaggaagaagaagaagagatggcaacagtggtagggggtgaagccccagtccctgtgctgccaacaccccctgaggctcctaggccccctgccacagtgcaccctgaaggagtccctcctgctgacagtgaaagcaaggaggtgggcagcactgaaacaagccaagatggagatgccagctccagtgaaggcgagatgcgggtcatggacgaggacatcatggtagaatcaggtgagaggttcgggctggggcgaggggtttgagggtgttgtggatccaacagctcaggcagaataccaaacaaacctttttttccccaggtgatgactcatgggatctgatcacatgttactgtcgaaagccctttgcagggcggcccatgattgagtgcagcctgtgtgggacgtggatccacctctcctgtgctaagattaagaagaccaacgtccccgacttcttttattgccagaaatgcaaggaactgaggccagaggcccggcggttaggggggcctcccaaatctggagagccctgatggcaccaactttagcctggaacttccaaatgacaacatgatttgggaactgagcctcagggtcctcagcctatcccctggagcttggatactgtctgcacttcaaggcaggaattctcaagggagacttgtttgaaaatgagtgtctcactttcccaccctatccttcctccccactctgtggacttgaaattgaatccattacggttggggatgggaggctgtctgtgtcccgacacataatctctgtctcttggacctgccaccatcactttctgggtcaggattggaattgggatggaatgggacagttgtctataaaactctagtgtaaatattagcactcccctccctcatcttttcttctatttcactccccatttattttcttctacaccggttgtatttttaattttggacttcccctattgggcatggcagctcaaaggtggagtactagagcctggccaagtgaggaaggaaagcagaaaggtgacgattctcactcacctcttttgtttttaataatatcggccgctgtttgtacagacagcctgcgtgttgtaaataaagcagagtgggctcttttgtgtttatagccctcactgtcctgctcgggagggaggctttggtggctgaagactagctggaggtggggctgaaacccacgtctcaaagtccaatctgaagatatcacagcactgggcctttcccaccccaagacaagtaagccaccttagagctttcattgtatttggccctccccactcgagtctaggaacccccacagtccccaccttcactccctgcacgcacactcctgcgggtcagagttgcttcgtgctccatcgtgggtggggtaaagcggggtgggagccgatggtccgtttcctgaaggcacaggccagcttagcctgggtgctcagaggacctcggctggggtacacgtttgggggctgggagaccgttgctgaaggcagcgatcatgtggcgggggcactaggcggagtcagacggtcacgtgattgggaggggatcacgtgacggagggcggctgaggagcgcggggtggctgcctttaagtcacgtgacatgaggagaggtgggcgggtacctggaggaagctcgcggcgtcggtggcggtggcgcgcggcggccgctgagaccggggctttgagtcgcaccccgcggcccgccccccgccgccaccctcgcagatccgtgctttttcccctttgcttctctcccgtactgggtcagtcctgtccgcgctcgcgcgtc

SEQ ID NO: 17139 - DNA, 2300 bp, Homo sapien
aagagggggtctgggtattgtctacggcagacggacctgtaccggggggtagttgtggagagagcgagccaggaagcgaggcgagctgggtagttgtagggggtggtggggcggggtggggggggttaagaccggcgacttgtcgggcgggggggtagggttggtccgcgagggttaagagcctgggagttgctgagggtgaggggggcatcggcggcagcagcggtggctgctgtggagagagagagagagtggctggttggggggaaggggccagagttgaggggtccatagcctagtaactgggtggtgagtacgggggcggaggggggggcggcggccggagagggctaggaacagggccggggggcccggtggggagcccgaaaagctggagacggggaggggccaaagccccggatgggggcggagggacggcgaaattgtggggagcgcggtatgggcgggggggggggggcaggtgggggccgcgtccgggttagagctcccgggtctgtcccggccgtgaagtagcgttggatgcgtgtgcctgtgtgtgtctggggtgggggtgaggggcgcgccgggccgcgtgctcgagtagaaggggccggagggcggggagcggttcggcgtggtcatcctggaccctgggggctggcgggcggcgtgtgcggtctcggagggcccgaggcggtggagcgcggccgggtaggaactcggggctccgggcgcgtgtgaaggacgggggcggctggcggcggcccggacgcggccccgggagcggtacggtggggtggggcgctgagggatccgagtagactggagtcgagagagaccgtgagttgggggggcggggcgccgggcctccggttgggggaaggggagcgctatagcgaggcctcagagggcgccgcgcccaggctccgcccctcgcggggcggaagggggagccggggcggatccaacacagctgggggcctgctggcctggcagagggacctgggagagcagggggttcacttaggaacaacggggtttagagggggagttttacacagattgttcctagtgtcttgactcagcttttattgcttttccagatccacctccgacccttaagccagagactcaggtgaggtttgccttacctttgcagcctagtagccctgcctgacaacgccccccgccccccttttctagacctcacttagggactgtgtttctgggaatgccattcttaaactgtgtggctttgcatgtgatccatatctccttcctttcagccaccagagaaacggcggagaacaattgaggatttcaacaaattctgcagttttgttttggcatatgctggttacattccccctagcaaagaggtaggggcaagagaattactgacttgaggctggtgtggtgggactatagagtgactgttgttcaaacagaactgtattgctttatagaaggaggcccttagaaattatatgtaagaccagggaagttggagactcttagggctgtggtaggaaagctggtatgcggggagtggatggccgggatagctagcttgaacagcagtgaaaaggaagggggatttggagtcgctggttgagattttggcatagtcttgaggtgctgtgaatggaaggtgtttatggataaattttagggagatgaaaatggtaacaaatgaggctatacagaaaaagagctaaggacataacggctccggtctgggtgatacagtgttccacaggccctgggcaggggcagcggtgaggtgtcagacttgagggtagaggtaacacggactggtcaagaggacatgctgatgggaattggggtggggagaagtttttggagtacagtgggatttagtggttgaggtaggacattttggggtaaatccagtcactccttttcaagctgggtttgtggaggggctgagatgacactggggttctgctgaccctggtctcttcccccttttaaggaaagtgactggccagcctctggctccagctctccattgcgaggagagagtgcggccgacagtgatggctgggactcggccccctcagatcttcgaaccatccagacttttgttaagaaagcaaagtcatccaagagaagggcagctcaagcaggtcccacccagccaggacccccaaggtccactttctctcgtctgcaggcccccgacagtgctaccttgcttgagaagatgaagctcaaggactctctctttgatctggatgggcccaaagtggcatctcctttgtcccccacatccctga

SEQ ID NO: 17140 - DNA, 2300 bp, Homo sapien
tcagtgaaggagtcaggcaatggtttgtggttctagaagaacgtgtctgggtcgtggttggtttaagttactggagcccagttgctgaacagttttctgctttcatcccaggaacaccatgaagaagacttctttctctacattgcctacagtgacgaaagtgtctacggtctgtgaagctgctgcccctgagctggaggggggtctcattctacaaagagagaggtggcccccctttcttgacctcctcctccttcaagctcaaacaccacctcccttattcaggaccggcacttcttaatgtttgtggctttctctccagcctctcttaggaggggtaatggtggagttggcatcttgtaactctcctttctcctttcttcccctttctctgcccgcctttcccatcctgctgtagacttcttgattgtcagtctgtgtcacatccagtgattgttttggtttctgttccctttctgactgcccaaggggctcagaaccccagcaatcccttcctttcactaccttcttttttgggggtagttggaagggactgaaattgtggggggaaggtaggaggcacatcaataaagaggaaaccaccaagctgaactgaattttgccttgtgttgctcccctcgtcccgctgattttaagtctttccaaggtgtcagtgggtttcagtggtggggaaagaagagtactgggtacaagctggagggatagaagtatattttggtttattctgttcatgttgggcttttccctgtctgcaaaaagagggtgcttttgttgtgatggaatggaatactgaggattatttcttgaaactttagttttataacacgcatgtgaaactaaatgttaaaaatgctcatgtaaaaaaaaatttttttttactgtgggttcctgtggagaaagttccgaagtacctgctttaggtgaacatccacatttgctagaacattctaactaagatattttcatgtgtgcaagctagtaaaacggctgttctcagttgcatgtcacttggctagacttttgccggtgtgtgggatccggcagagtggaatcagggagggagaagactgggagcgggagccattatcgccaggaatacttcaactcccagcaatcatttctccggcaggccggaagtggggcggtcctcctggggagaaagaagctgcagaacgaggcagtatggtggccgagagttctaatcccttcttcctcttctttcttggtcccgcccagcctacatctcccaggggcctgcgcgcgcacttccgctctcccctccggctcctggtctccccgccgctccccgggggaggggagcggcttggtgcgcctgcgccagcctgtggctttctgggaatcaaagttccggaggttcatgcggtcccttttccgctgttcccggacggactacaaaacccttggtgcactgcgcctcggcgccggcggggggaggagggagagaagaggagggagggaggagagaggaggtggaggaggaggaggagggagcaggcggccggcggcgcggggggagggggcccggtccgggagtgcgggaggcagtggtagagggaggtggcggcagcggctagcggactcgagtctcaaccgggctgaggcggacacttctgtggagcgaagcagtgggagcatcgagcactagaggcggcaccgggatccccggctccggggaggggggcgccggaccgggaggaggggagggggcgatgctggaagccatggcggagcccagtcccgaaggtgagctctcgaccggtgcagagcgctgagccggcggggggcgggcgaggaatcaattggcaaacttggaggtcgagccccggagcccagcgggggagttcggggagggggtcgggaggctggccctggaggtgggagagcgacgagttgagagaccttggagaaagaggagtgggaaactgggctggggtagttggagatcagacggtgtgggggtgcgggggataggagcttgaaacccggagcctcgggggttagggcccgaaagggccaccggcagattggggccctggaactggaaggttaggggaatccagtggccggagagttgctcaggagggaggacgtagaagaggctgagtgaggggcccggtagttcgccgaggtggggtagtttgtggcggtggtaccggagctccgagtagttgccgccggagaatgcccggtgattgtcggagaggtgggcaggtagttgtggggagaagagggggtctgggtattgtctacggcagacg

SEQ ID NO: 17141 - DNA, 2300 bp, Homo sapien
agacaatacccagaccccctcttctccccacaactacctgcccacctctccgacaatcaccgggcattctccggcggcaactactcggagctccggtaccaccgccacaaactaccccacctcggcgaactaccgggcccctcactcagcctcttctacgtcctccctcctgagcaactctccggccactggattcccctaaccttccagttccagggccccaatctgccggtggccctttcgggccctaacccccgaggctccgggtttcaagctcctatcccccgcacccccacaccgtctgatctccaactaccccagcccagtttcccactcctctttctccaaggtctctcaactcgtcgctctcccacctccagggccagcctcccgaccccctccccgaactcccccgctgggctccggggctcgacctccaagtttgccaattgattcctcgcccgccccccgccggctcagcgctctgcaccggtcgagagctcaccttcgggactgggctccgccatggcttccagcatcgccccctcccctcctcccggtccggcgcccccctccccggagccggggatcccggtgccgcctctagtgctcgatgctcccactgcttcgctccacagaagtgtccgcctcagcccggttgagactcgagtccgctagccgctgccgccacctccctctaccactgcctcccgcactcccggaccgggccccctccccccgcgccgccggccgcctgctccctcctcctcctcctccacctcctctctcctccctccctcctcttctctccctcctccccccgccggcgccgaggcgcagtgcaccaagggttttgtagtccgtccgggaacagcggaaaagggaccgcatgaacctccggaactttgattcccagaaagccacaggctggcgcaggcgcaccaagccgctcccctcccccggggagcggcggggagaccaggagccggaggggagagcggaagtgcgcgcgcaggcccctgggagatgtaggctgggcgggaccaagaaagaagaggaagaagggattagaactctcggccaccatactgcctcgttctgcagcttctttctccccaggaggaccgccccacttccggcctgccggagaaatgattgctgggagttgaagtattcctggcgataatggctcccgctcccagtcttctccctccctgattccactctgccggatcccacacaccggcaaaagtctagccaagtgacatgcaactgagaacagccgttttactagcttgcacacatgaaaatatcttagttagaatgttctagcaaatgtggatgttcacctaaagcaggtacttcggaactttctccacaggaacccacagtaaaaaaaaatttttttttacatgagcatttttaacatttagtttcacatgcgtgttataaaactaaagtttcaagaaataatcctcagtattccattccatcacaacaaaagcaccctctttttgcagacagggaaaagcccaacatgaacagaataaaccaaaatatacttctatccctccagcttgtacccagtactcttctttccccaccactgaaacccactgacaccttggaaagacttaaaatcagcgggacgaggggagcaacacaaggcaaaattcagttcagcttggtggtttcctctttattgatgtgcctcctaccttccccccacaatttcagtcccttccaactacccccaaaaaagaaggtagtgaaaggaagggattgctggggttctgagccccttgggcagtcagaaagggaacagaaaccaaaacaatcactggatgtgacacagactgacaatcaagaagtctacagcaggatgggaaaggcgggcagagaaaggggaagaaaggagaaaggagagttacaagatgccaactccaccattacccctcctaagagaggctggagagaaagccacaaacattaagaagtgccggtcctgaataagggaggtggtgtttgagcttgaaggaggaggaggtcaagaaaggggggccacctctctctttgtagaatgagacccccctccagctcaggggcagcagcttcacagaccgtagacactttcgtcactgtaggcaatgtagagaaagaagtcttcttcatggtgttcctgggatgaaagcagaaaactgttcagcaactgggctccagtaacttaaaccaaccacgacccagacacgttcttctagaaccacaaaccattgcctgactccttcactgactccaaggcc

SEQ ID NO: 17142 - DNA, 2300 bp, Homo sapien
cctgtgggtgggagtgcagtctctgcgggaggaggctccacctagcagctgttcttttgagggcatttttgacctctgtgactttcttgcatcttgtatcttttgcagttggtcagttctacttcttgatccggaagcgaattcatctccgagctgaggatgccttgtttttctttgtcaacaatgtcattccacccaccagtgccacaatgggtcagctgtaccaggtatggtgactgggaagtggtggaggctttggagaggaatcttggaagagcgtgaggggaagaaagtgttgttacatcagtagttttggactagcttcctggcttgccttaaagtttcataatagccgtgggttgggggtttggacagaacagtaggagtagagagaaggaaagagaacagtgagctagagaaactatctgttcgggactcttcccagtccccctccccattccaaagcagcagaaaacagtttgaggcctttttgcccaggactgcagagattatactgctcgtgtggtaggccttggagtcagtgaaggagtcaggcaatggtttgtggttctagaagaacgtgtctgggtcgtggttggtttaagttactggagcccagttgctgaacagttttctgctttcatcccaggaacaccatgaagaagacttctttctctacattgcctacagtgacgaaagtgtctacggtctgtgaagctgctgcccctgagctggaggggggtctcattctacaaagagagaggtggcccccctttcttgacctcctcctccttcaagctcaaacaccacctcccttattcaggaccggcacttcttaatgtttgtggctttctctccagcctctcttaggaggggtaatggtggagttggcatcttgtaactctcctttctcctttcttcccctttctctgcccgcctttcccatcctgctgtagacttcttgattgtcagtctgtgtcacatccagtgattgttttggtttctgttccctttctgactgcccaaggggctcagaaccccagcaatcccttcctttcactaccttcttttttgggggtagttggaagggactgaaattgtggggggaaggtaggaggcacatcaataaagaggaaaccaccaagctgaactgaattttgccttgtgttgctcccctcgtcccgctgattttaagtctttccaaggtgtcagtgggtttcagtggtggggaaagaagagtactgggtacaagctggagggatagaagtatattttggtttattctgttcatgttgggcttttccctgtctgcaaaaagagggtgcttttgttgtgatggaatggaatactgaggattatttcttgaaactttagttttataacacgcatgtgaaactaaatgttaaaaatgctcatgtaaaaaaaaatttttttttactgtgggttcctgtggagaaagttccgaagtacctgctttaggtgaacatccacatttgctagaacattctaactaagatattttcatgtgtgcaagctagtaaaacggctgttctcagttgcatgtcacttggctagacttttgccggtgtgtgggatccggcagagtggaatcagggagggagaagactgggagcgggagccattatcgccaggaatacttcaactcccagcaatcatttctccggcaggccggaagtggggcggtcctcctggggagaaagaagctgcagaacgaggcagtatggtggccgagagttctaatcccttcttcctcttctttcttggtcccgcccagcctacatctcccaggggcctgcgcgcgcacttccgctctcccctccggctcctggtctccccgccgctccccgggggaggggagcggcttggtgcgcctgcgccagcctgtggctttctgggaatcaaagttccggaggttcatgcggtcccttttccgctgttcccggacggactacaaaacccttggtgcactgcgcctcggcgccggcggggggaggagggagagaagaggagggagggaggagagaggaggtggaggaggaggaggagggagcaggcggccggcggcgcggggggagggggcccggtccgggagtgcgggaggcagtggtagagggaggtggcggcagcggctagcggactcgagtctcaaccgggctgaggcggacacttctgtggagcgaagcagtgggagcatcgagcactagaggcggcaccgggatccccggctccggggaggggggcgccggaccgggaggaggggagggggcgatgctggaagc

SEQ ID NO: 17143 - DNA, 2300 bp, Homo sapien
ggctctggacacttggatatctcaagaaaggaggaggtgggggatcctcagagggaataaaaaaggtttgtcctgttttaactctgttcccttaagaatttaacatttggacccaggtcgtcttacttcaaagctcatcactttagctagtaggctgtgggcaaattgaacctatctaatcatgaatatggtgataatttaggtcccacatctccagtgatgctgccttacaagagtgttgtgagggtatgaactataaggtactctaccaatgcaagttattgtcaccccaggttcaccgctgatgttcgttccgtgctgagccgaaaccttcaccaacatcggctctggtgacagctgctccccctccacctgagttggggtgggggggaaagggagggcgagcccttgggatgccgtctgatgccctgtccaatgtgaggactgcctgggcagggtctgcccctcccacccctctctgccctgggagccctacactccacttggagtctggatggacacatgggccaggggctctgaagcagcctcactcttaacttcgtgttcacactccatggaaaccccagactgggacacaggcggaagcctaggagagccgaatcagtgtttgtgaagaggcaggactggccagagtgacagacatacggtgatccaggaggctcaaagagaagccaagtcagctttgttgtgatttgattttttttaaaaaactcttgtacaaaactgatctaattcttcactcctgctccaagggctgggctgtgggtgggatactgggattttgggccactggattttccctaaatttgtcccccctttactctccctctatttttctctccttagactccctcagacctgtaaccagctttgtgtcttttttccttttctctcttttaaaccatgcattataactttgaaaccaaagcggccttaggtccttctctggggttttgggaagtgaagagaggggactttgttcacatgcaccctgtcccacaggcagagggggaagagactgctgttggactcaaggggcagggggaaaggtggcgttgagtatagggatagaataatgcggacaccagatgcctgggatacaataatgctgacaccagatgctttggcgggaagggccgagtgacaggatgggcgcgctggtggggagtggaaggacaccttcggagaagcaggctatggaagcacgaaaggagaaaccggctatggaagcacgaaaggagaaacctggacggccaaagggcgtagagctggagaaaccgggcttcgtccggggcactgacgtggacaggttaagcgggcgctgcccccaggtggctggcgccccgacctccgctgtccgggaaggcgtcggtccccctcccagctgtcgcccagccggccccgcctccccggcgccctcccaagccggccctacttcgcgcacccgccacgtgacgctccgccctctttgagatcacatgatttaactcaagtcccgcagtgttcctccgcgctggcgtagtccctacctttccaacctcctctccagtccctattggtctactcattttggcacttaagcgttctgtagatctctccaaacatctgttttctttttgacttcttatttctggagatcatctccgccacttgggtactactttgttttggtgtcaacggccgccttcagcgtagcaacacggttcgtgaatagctaaccttgtaattgtccctgctgttcctctacgttgttaacgaaaggaacttggagaaccaagtctcgtatgatgattaccatcttttactcctcttcagccccagcttccttgaggggacggttggggaataggtttagagtaattttcgatgagcaaaagccaaccgtctttgctacgtcgcctgcgtagcccacaaattgattccaaagcgattacgctaatggcgtgagggggccggtcagttggtggtgctacgctagcagcgttagcgccgctgaggtagtggcgtatcttagcggggggggcagtccccgatagtcgggggcggggttggtgaatagggaagtggcgcaaattcgtggatcgctccgctgaatccgcccgcgcgtcgccgccgtcgtcgccgccccccgtcccggcccccctgggttccctcagcccagccctgtccagcccggttcccgggaggatgaagttcgtgtacaaagaagagcatccgttcgagaagcgccgctctgagggcgagaagatccgaaagaaatacccggaccgggtgccggt

SEQ ID NO: 17144 - DNA, 2300 bp, Homo sapien
agcatctctgaccctaaatttttcttggctcctagctcttgtctcgggggaatagcgctgctgcctacagccacaaccatcctgtactgttcgcgccctaaatcaggaagtggaagcagactggtaaaggacagaatgaacccaaggccagacccattctcccaaatcagttaaatcaaccaccactaccactgagggctttctggaaattctctggaccccaggtcaccccaacctgggtttattctttcaaattgtattgaggtatgctaaggggtacagaccacagtacagacccagaacctgtgtctccgcttactaaattctccccagactccttccgaggattctccctggtggtggtgagaccacaagagcacattcatttaaagtgctgttagctgaaggacctctgaccttggagaaaagctaagggagaggggacccagagatgcttgggtccatccggacagtttccctcagaatgctaggctctcctggagaagcaaacgtcctcattttcaagccctacaactgcccagcgctgtcctctgacagggacacccaaacttcaatggtgggcacagcacccaccttgaactccctcccacaattaaagaggcccatcgtaaaagcatctgctttagtcttcaataaatccagatacctacactcacactatgaaataaattttcacagcctttttggaggaattctcttaatgggaaccgcaggcgtttctccttcacacccagggctttcccaagttcccgtccttgtttgtaacgtatgccctcccacccacctccacccttgacacacaagtctgtctcttccttgttataggaccaaacacacaccgaggttccaaatagggtctttcccaagcccacatccacagatccggctgtcatcaaacaggtgttccccgcctcttggtttctttagcaacaactccagctttcttaaagagcgccccacccaccaccttagcccccaagagttgccaaatcctgtcccatctagccccatcaaaacccccaagggcaaggttctattacaagggtctcccacctcgccccgcttagggtgcccaattctctggcgagaaaagccccagccaggattcccttcctaggcccaaacagaggcccgacactccgaaaacccctgagcaccacggacagatgtccccaacaccgccagacgtccccaacaccgccagcgcccaccctggctcaccgtgcggatctgcctccgcagaaggtaaatgaagaagctccagagcttggcggcgaaggccacgaacgtgcgcagccccagcagacactgcgtccgcatcatcccgatgaccccggcaccgccggccccggggcccccgcggcccagctccgccagccccccgggggcagccccccgccgccgggagggggaacgggggccccgagtggcaggagaggctgcagagaggggcacggagcgggcggctcagaaagccacccctggcgagggtaaagcccagcggaacggggagctgggggacaggcgtgggcagcccgcgggggcccacatgggctgggagtggcaccgacggcttcggggaggttgcgggccgagacaggtagggctaggatggggtcctccgagacctggagggaaggggaaggataattgggggagggggcagtgggggagggggctagggaaaagggaggaagggaaaagggaaggggagggggggaaagcagagagtggcccgctgcgcaggcgcgctagggggctgctcgcaggaacggggagggcgggggcagcggcgcgcaaagggccgcggcagcggagaacgggcctgcagagcgaaggagcagggaaggagggggagggggagccggagggcgcagagcgctgggccggagcggcctccccctccccgagctcgggggtcctttagccgctggggaccggggctgcagcctctgcagctgggtttcccactctgacaggcgccattttaccgtccaaaggactccctcttcctgtctttccccctcctcttcccctttgacactacttccggtggtgacgtgtattcgcttcaccgggactaagttcctcctgcgcggtctatggcgggtaggtataaggaaagccaaaagcactccaagcgaggctgcagtattgcgcacgcgcagaaggtggccgcggggcggggcctgaggcgaagcaggccccgcctcaaactgcgtgggcggggagagtgacgtcacttggcccgcgcttagggccctcgcggggggcttgtg

SEQ ID NO: 17145 - DNA, 2300 bp, Homo sapien
ccaccactaccactgagggctttctggaaattctctggaccccaggtcaccccaacctgggtttattctttcaaattgtattgaggtatgctaaggggtacagaccacagtacagacccagaacctgtgtctccgcttactaaattctccccagactccttccgaggattctccctggtggtggtgagaccacaagagcacattcatttaaagtgctgttagctgaaggacctctgaccttggagaaaagctaagggagaggggacccagagatgcttgggtccatccggacagtttccctcagaatgctaggctctcctggagaagcaaacgtcctcattttcaagccctacaactgcccagcgctgtcctctgacagggacacccaaacttcaatggtgggcacagcacccaccttgaactccctcccacaattaaagaggcccatcgtaaaagcatctgctttagtcttcaataaatccagatacctacactcacactatgaaataaattttcacagcctttttggaggaattctcttaatgggaaccgcaggcgtttctccttcacacccagggctttcccaagttcccgtccttgtttgtaacgtatgccctcccacccacctccacccttgacacacaagtctgtctcttccttgttataggaccaaacacacaccgaggttccaaatagggtctttcccaagcccacatccacagatccggctgtcatcaaacaggtgttccccgcctcttggtttctttagcaacaactccagctttcttaaagagcgccccacccaccaccttagcccccaagagttgccaaatcctgtcccatctagccccatcaaaacccccaagggcaaggttctattacaagggtctcccacctcgccccgcttagggtgcccaattctctggcgagaaaagccccagccaggattcccttcctaggcccaaacagaggcccgacactccgaaaacccctgagcaccacggacagatgtccccaacaccgccagacgtccccaacaccgccagcgcccaccctggctcaccgtgcggatctgcctccgcagaaggtaaatgaagaagctccagagcttggcggcgaaggccacgaacgtgcgcagccccagcagacactgcgtccgcatcatcccgatgaccccggcaccgccggccccggggcccccgcggcccagctccgccagccccccgggggcagccccccgccgccgggagggggaacgggggccccgagtggcaggagaggctgcagagaggggcacggagcgggcggctcagaaagccacccctggcgagggtaaagcccagcggaacggggagctgggggacaggcgtgggcagcccgcgggggcccacatgggctgggagtggcaccgacggcttcggggaggttgcgggccgagacaggtagggctaggatggggtcctccgagacctggagggaaggggaaggataattgggggagggggcagtgggggagggggctagggaaaagggaggaagggaaaagggaaggggagggggggaaagcagagagtggcccgctgcgcaggcgcgctagggggctgctcgcaggaacggggagggcgggggcagcggcgcgcaaagggccgcggcagcggagaacgggcctgcagagcgaaggagcagggaaggagggggagggggagccggagggcgcagagcgctgggccggagcggcctccccctccccgagctcgggggtcctttagccgctggggaccggggctgcagcctctgcagctgggtttcccactctgacaggcgccattttaccgtccaaaggactccctcttcctgtctttccccctcctcttcccctttgacactacttccggtggtgacgtgtattcgcttcaccgggactaagttcctcctgcgcggtctatggcgggtaggtataaggaaagccaaaagcactccaagcgaggctgcagtattgcgcacgcgcagaaggtggccgcggggcggggcctgaggcgaagcaggccccgcctcaaactgcgtgggcggggagagtgacgtcacttggcccgcgcttagggccctcgcggggggcttgtgggtcctcctccccctcccactgacaactgccccaactgctcttcccgccccggtcacagtgaaaatgtagacggggtcgttgtccgtacgactgtgcgccagggctcggggaggggcgccctccgcgtgagcgcccccctgggaatattgaacataatcacctctcattccagactatg

SEQ ID NO: 17146 - DNA, 2300 bp, Homo sapien
ttttctatcttctcttgtggagtgcccgcttttttttttttttttgagacagagtttcgctcgttgcccaggctggagtgcaatggcgtgatctccgctcactgcaacctctgcctcctgggttcaagcgattctcctgcctcagcctcctgagtagctggaattacaggcatgtgccaccatgcccaggtaattttttgtatttttagtagagatggggtttctccatgttggtcaggctggtctcgaactccagacctcaggtgatccacccgcctcagcctcccaaagtgctgggattacaggcgtgagccaccgcgcccagccatggaatgccatctgaacatacaccaccgcctctatcacaacaatggctgatgcaaaattggaggctcaacagataagatgtaaactactattatcatccactgagttgccgggactaggaagtagaaagcatcctactaatggttcttaatgtctcctgatcaggcatgccgctgggtttaggaacttccttatctcaatactttcttctcccccatattagtcaataaatcctggaaattctacccactaaagtcctttacatgtgttctaaactttccatctctactgccactgccttaaaccaggcctctatcacttcctaccattattccctaaaattcattaggtcaggaacaggtctcactcactgccgtctccagtatcttgcacagcacctggttgatagttggtgctcggtacatatgtaccttaaagagtgaagccggattaacggattactgcaatacccttcccacatgttctccctatttccaggctatttctctctcgacttctatgatctttgctttggactccccaaatactcatcactcctcttattaattcttgcctcctgaaagatccatatccaattcttcaatgaatatttaaggaactgctactacataccaggttctgcgcttgttgtaaagaaatttccttagcattataggtctcaaatttaatcaaatctcttccaactggtacttaccgattgttgatatcagagtcaaaaccttcacgaaactcttcctcgctcacttcacagcccaggatatgcacttgctccccactaaggcagagatgagaagggattgtcaaagagtgggcacaggtgccctatccagggtaggccggggagacactgtgggatactcaccacagtgcagatttcttgacaagcgccttcaagagactgcgcccctcccactccacggaatctgcagagcgagggacggataaagggtatgagagcgctgggattaccgccttcgcgaacccgtcgcgatttccacacctagcctgtgacccctggcccttcctgcccacttccgtcccctcagccaggcccgaaccgcaccccccgccccgccaccgtgcctctggctctcaccccgaagcagcaccaggccgcccaaggccaacagcgagtccaacatctccaactcgcgtccggtccctgctctggcgccctctgatggcgtcatgacccagtgtccttcctcctcggggtgaaacgggccgagcactcgggcgtcctcccaccattaagacctaacatagtctggaatgagaggtgattatgttcaatattcccaggggggcgctcacgcggagggcgcccctccccgagccctggcgcacagtcgtacggacaacgaccccgtctacattttcactgtgaccggggcgggaagagcagttggggcagttgtcagtgggagggggaggaggacccacaagccccccgcgagggccctaagcgcgggccaagtgacgtcactctccccgcccacgcagtttgaggcggggcctgcttcgcctcaggccccgccccgcggccaccttctgcgcgtgcgcaatactgcagcctcgcttggagtgcttttggctttccttatacctacccgccatagaccgcgcaggaggaacttagtcccggtgaagcgaatacacgtcaccaccggaagtagtgtcaaaggggaagaggagggggaaagacaggaagagggagtcctttggacggtaaaatggcgcctgtcagagtgggaaacccagctgcagaggctgcagccccggtccccagcggctaaaggacccccgagctcggggagggggaggccgctccggcccagcgctctgcgccctccggctccccctccccctccttccctgctccttcgctctgcaggcccgttctccgctgccgcggccctttgcgcgccgctgcccccgccctccccgttcct

SEQ ID NO: 17147 - DNA, 2300 bp, Homo sapien
cagaggacgtgagatttggtcctgcctgtagaacagcttaaagaaagtcaagaattaagtcaagaagtaacaactacagaaaaaacagctcaggaaagggagactggcataggtagcagaactttttttcccagatatctcttttctatcttctcttgtggagtgcccgcttttttttttttttttgagacagagtttcgctcgttgcccaggctggagtgcaatggcgtgatctccgctcactgcaacctctgcctcctgggttcaagcgattctcctgcctcagcctcctgagtagctggaattacaggcatgtgccaccatgcccaggtaattttttgtatttttagtagagatggggtttctccatgttggtcaggctggtctcgaactccagacctcaggtgatccacccgcctcagcctcccaaagtgctgggattacaggcgtgagccaccgcgcccagccatggaatgccatctgaacatacaccaccgcctctatcacaacaatggctgatgcaaaattggaggctcaacagataagatgtaaactactattatcatccactgagttgccgggactaggaagtagaaagcatcctactaatggttcttaatgtctcctgatcaggcatgccgctgggtttaggaacttccttatctcaatactttcttctcccccatattagtcaataaatcctggaaattctacccactaaagtcctttacatgtgttctaaactttccatctctactgccactgccttaaaccaggcctctatcacttcctaccattattccctaaaattcattaggtcaggaacaggtctcactcactgccgtctccagtatcttgcacagcacctggttgatagttggtgctcggtacatatgtaccttaaagagtgaagccggattaacggattactgcaatacccttcccacatgttctccctatttccaggctatttctctctcgacttctatgatctttgctttggactccccaaatactcatcactcctcttattaattcttgcctcctgaaagatccatatccaattcttcaatgaatatttaaggaactgctactacataccaggttctgcgcttgttgtaaagaaatttccttagcattataggtctcaaatttaatcaaatctcttccaactggtacttaccgattgttgatatcagagtcaaaaccttcacgaaactcttcctcgctcacttcacagcccaggatatgcacttgctccccactaaggcagagatgagaagggattgtcaaagagtgggcacaggtgccctatccagggtaggccggggagacactgtgggatactcaccacagtgcagatttcttgacaagcgccttcaagagactgcgcccctcccactccacggaatctgcagagcgagggacggataaagggtatgagagcgctgggattaccgccttcgcgaacccgtcgcgatttccacacctagcctgtgacccctggcccttcctgcccacttccgtcccctcagccaggcccgaaccgcaccccccgccccgccaccgtgcctctggctctcaccccgaagcagcaccaggccgcccaaggccaacagcgagtccaacatctccaactcgcgtccggtccctgctctggcgccctctgatggcgtcatgacccagtgtccttcctcctcggggtgaaacgggccgagcactcgggcgtcctcccaccattaagacctaacatagtctggaatgagaggtgattatgttcaatattcccaggggggcgctcacgcggagggcgcccctccccgagccctggcgcacagtcgtacggacaacgaccccgtctacattttcactgtgaccggggcgggaagagcagttggggcagttgtcagtgggagggggaggaggacccacaagccccccgcgagggccctaagcgcgggccaagtgacgtcactctccccgcccacgcagtttgaggcggggcctgcttcgcctcaggccccgccccgcggccaccttctgcgcgtgcgcaatactgcagcctcgcttggagtgcttttggctttccttatacctacccgccatagaccgcgcaggaggaacttagtcccggtgaagcgaatacacgtcaccaccggaagtagtgtcaaaggggaagaggagggggaaagacaggaagagggagtcctttggacggtaaaatggcgcctgtcagagtgggaaacccagctgcagaggctgcagccccggtccccagcggctaaaggacccccgagctc

SEQ ID NO: 17148 - DNA, 2300 bp, Homo sapien
gcctgtaatcccagcactttgggaggtcgaggtgggttgggatcacctgaggtcaggaattcgagatctgcctggctaacacggtgaaaccccgtctctactaaaaatacaaaaattagctgggcgtggtggtgggcacctatactcccagctacttgggaggctgaggcaggagaatcacttgaacccaggaggtggaggttgtagtgagccgagatcatgccattgcactccagtctgggcgacaagagcaaaaactctgtttcaaaaaaaaaaaaaaagagttcatgaaagtcttcattttatacaaaagcaggtcaattagcttagcataagggggactttaatatgtttagcgaataaacgaaggaaagacagagaaatgtttgagagggcaaaacaaagataaaaaacgtgagagagttgaggtaaaaaatggagagaggaaaatgaaatgagagagagccagaataagcagggtatgtgagaatctgagaagtatgaggaggttggagggtagtaggaagattgggaggaaactgggcagggtgggtggggaaagtgcagtgtgcacctaagaagaggaaagaaagattaattgctgatgctgggttccaaggagactggagacaaggcgcaaaggtaaacgaaaagacaaggagtgggctgggtgcggtggctcacgcctgtaatcctgcactttaggaggtgggggcagggggattgcttcagttcaagtgttcaagaccagcctgagcaacatggtgaaaacccttctctaccaaaaatacaaaaactttagctgggcgtggtggtgtgcacccgcggtcccagctactggggacgctgaggcggggtgatcgcttgagcccaggaggcgaggctgcagtgagccgagattgcacctctgcactccagcctgggtaacacagacttcctcctctcaaacaacaacaaaaaaaagacaaggagtgaaacaggaagctccaaagcaggaaaggcaggaaggggagatgaccaaagatgaaggaggaaggagcaaaaggctggaaggggtgccgggaggaaggagggagcaatgctttggggagagatagcaggactgcagggtgagggaccatggacgaccaccttagagagccagattatagggaggacggaacagtgaggcgtgacagagtgcacagcaattggcagtccaagcccaggcccgggagggaaagagaaacgggcgagtgtgggggaggggtgggaaaggtggaggataggtctgaaaagactctaagggaggggaacgatgggtgtggccaagactctgacctagccctcaccctgctccccaccctcggccggctttaggtcccagtggtttcttcctccagttaggagccttgatgccggaggggacagtggtaggtggggaggttgagtgcaaagggttcaggctgtaagtcatgttgggttggaatgggggcacaggaaggtggggctgttggggagccacgctaagccgggtgtctgtagcagagccagagaaccgggacactgaagagggtgctgaagggggcgactctcagggatcgagccagggcccccgaaggtgggatcgaccagggtaggagacaggaaaaaaaaggagagcagcgggtgggggcgaaagcagggccgaggagagagcactttggacagaacccggcggggaaagggcggcgccgaggcttgtcaggggcgccccgcagcgtcccaggcgcacctgttgggaagaaaggaaggggcttcccggtgttcgagggaaatccagtccggaggggctgactcggagcttgggactcctggggagccaccgcctcctccccagcggcggtcaaaaccgggcaagcgaaggggcgtgaccctggtgctcaggtttcttcctcctcacctgggcaaggaggggtgggggccacgacttccggttcaggtgagtgtcccttcggtgacgtcaggtcatcctcggccgcccctccggtcccgcctccccctcccgcgctcccggggcgcgcgggccgcgcccccgacgccctacatatactcaggtgcgccccacctgtccgcccgcacctgctggctcacctccgagccacctctgctgcgcaccgcagcctcggacctacagcccaggatactttgggacttgccggcgctcagaaacgcgcccagacggcccctccaccttttgtttgcctagggtcgccgagagcgcccggagggaaccgcctggccttcggggaccaccaattttgtctggaaccaccctcccg

SEQ ID NO: 17149 - DNA, 2300 bp, Homo sapien
ccgggcgtggtggcgggtgcctgtagtctcagctactcaggaggctgaggcaggagaatggcctgaacccgggaggcggaggttgcagtgagctgagatcgtgccattgcactccagcctgggcgacagagaaagactccgtctcaaaaaaaaaaaaaaaaaaaaaaaaaaaaaaaaaaaaggaaagtcagttgcggtagctcactcctgtaatcccaccactttgggaggctgaggcagggagatcacttgaggtcaggaatttgagcccagcctggccaacatggtgaaacctcgtttctactaaaaatacaaaaaattagctgggcgtggtggtgcgcgcttataatcccagctactcgggagggtgaggcaggagaattgcttgaacccgggaggcagaggttgcagtgagccgagatcgtgccactgcactccagcttgggtgacagagcgagactctgtttcaaaaaacaaacaaagccagaacaatgatgacacgtggctgtaattgcagctatttgttggggggtgggggggcatgctttgagcccaggagttcaaggctgcagtgagctataattgtaccactgcactctagcctgggcgacagagtgagacccggcctctaagagtacattaatccagaaaagtaccattaatccaaaagtacaacaataaaaacgaataacaaacagttcatggctgggagcagtgactcacgcctgtaatcccagcactttgggaggtcgaggtgggttgggatcacctgaggtcaggaattcgagatctgcctggctaacacggtgaaaccccgtctctactaaaaatacaaaaattagctgggcgtggtggtgggcacctatactcccagctacttgggaggctgaggcaggagaatcacttgaacccaggaggtggaggttgtagtgagccgagatcatgccattgcactccagtctgggcgacaagagcaaaaactctgtttcaaaaaaaaaaaaaaagagttcatgaaagtcttcattttatacaaaagcaggtcaattagcttagcataagggggactttaatatgtttagcgaataaacgaaggaaagacagagaaatgtttgagagggcaaaacaaagataaaaaacgtgagagagttgaggtaaaaaatggagagaggaaaatgaaatgagagagagccagaataagcagggtatgtgagaatctgagaagtatgaggaggttggagggtagtaggaagattgggaggaaactgggcagggtgggtggggaaagtgcagtgtgcacctaagaagaggaaagaaagattaattgctgatgctgggttccaaggagactggagacaaggcgcaaaggtaaacgaaaagacaaggagtgggctgggtgcggtggctcacgcctgtaatcctgcactttaggaggtgggggcagggggattgcttcagttcaagtgttcaagaccagcctgagcaacatggtgaaaacccttctctaccaaaaatacaaaaactttagctgggcgtggtggtgtgcacccgcggtcccagctactggggacgctgaggcggggtgatcgcttgagcccaggaggcgaggctgcagtgagccgagattgcacctctgcactccagcctgggtaacacagacttcctcctctcaaacaacaacaaaaaaaagacaaggagtgaaacaggaagctccaaagcaggaaaggcaggaaggggagatgaccaaagatgaaggaggaaggagcaaaaggctggaaggggtgccgggaggaaggagggagcaatgctttggggagagatagcaggactgcagggtgagggaccatggacgaccaccttagagagccagattatagggaggacggaacagtgaggcgtgacagagtgcacagcaattggcagtccaagcccaggcccgggagggaaagagaaacgggcgagtgtgggggaggggtgggaaaggtggaggataggtctgaaaagactctaagggaggggaacgatgggtgtggccaagactctgacctagccctcaccctgctccccaccctcggccggctttaggtcccagtggtttcttcctccagttaggagccttgatgccggaggggacagtggtaggtggggaggttgagtgcaaagggttcaggctgtaagtcatgttgggttggaatgggggcacaggaaggtggggctgttggggagccacgctaagccgggtgtctgtagcagagccagagaaccgggacactgaagagggtgctgaagggggcgactctcag

SEQ ID NO: 17150 - DNA, 2300 bp, Homo sapien
agccggaaacaaagtgaacctgtggagcaggaactgggtgaggaagctttctttgaaggatgaagaggagtcctttggaattccggatttttttttttcttcttgagacggagtcactctgtcgccaggctggagtgcaagggcacgatcttggctcactacaacctccacctcctgggttcaagccattttcctgcctcagcctcccgagtagctgggattacaggtgtgcataaccacgcccggctaatttttgtatctttagcagacatggggtttctctatgttggccaggctggtttcaaactcctgacctcagtcgatccacctgccttggcctcctaaagtgctgggattacaggcatgagccaccaggccgggccggcattccagatttttcaggggattagtgcagcaaaggaatcaagaagggatgtaaaggcacagtgtgttctgggtacaataaggacttaggcattgcccagaacaggaggcgaaggagatagaaggagaggcaggagagataggtaaggccagagatcggataagagaggcaggaggttttgttcactctgaaaagggatttgaacttggcaattggggcaacagagacagtgacttcttgcttgagagatgagattggaccttcgaaaattgttctctgccctcgtcataaaggaaataagaggagcacgaagaccagtgagggtgatggtgatctggactgaagtggcagccgccacggagaatatcggatgaatgtgagagagttttggaggtcaaagcaccaatgttggaaactaactggataaacgaggagagcggcgcaggacaggaggaatcgagcctgacttctaccataggggtgactgggcgggtaattcattgaaataaggaagttaggaggaggagcaggtttggacatgctgatcactagagctgccacatccgggcggtaacgaacacctggatctgcagctccagagaagggcctgggtcagatgtcactgaagccctatggtggcggaaaggcgagaaatagtgggttgagattccaagtgcaatccactgcggctcctcgctcgccctccaggtggcagcacaaccctgcgcttccgaagcccgttttctgagccagacactctccacgctctgggtatttcggcttctctctccccacacgccgaccctaggtcgcgcactttctgcctggcagaatttggccgaggatccaaacccggagcagcctccagagagcgtgtcgttcacgcggccagcatatgctcagagacctcagaggctcagagacctcagggctggtggtgtggtcggttgtgaccacttgtccctcggaccggctccaggaaccaacctggggaatgtgtgtaggggaagggcgggatagacagtgcccggagcagggaggcgctgaaagacaggaccaagcagcccggccaccagacccgttgtgggaacggaatttcctggcccccagggccacactcgcgtgggaagcatgtcgcggactctttaaggcgtcatctccctgtctctccgcccccgcctgggacaggccgggacgcccgggacctgacatttggaggctcccaacgtgggagctaaaaatagcagccccgggttactttggggcattgctcctctcccaacccgcgcgccggctcgcgagccgtctcaggccgctggagtttccccggggcaagtacacctggcccgtcctctcctctcagaccccactgtccagacccgcagagtttaagatgcttctgcagcccgggatcctagctggtgggcggagtcctaacacgtgggtgggcggggccttttgttccagggactcttttctcaaaacttcccagtcggaggctggcgggaacccgagaggcgtgtctcgccagccacgcggaggggcgtggcctcattggcccgccccaccaactccagccaaactctaaaccccaggcggagggggcgtggccttctggggtgtgcgggctcctggccaatgggtgctgtgaagggcgtggcccgcgggggcaggagcgaggtggcgggggcttctcgcgtcttttcccccagccccgctccaccagatccgcgggagccccactgctctccgggtccttggcttgtggctgtgggtcccatcgggcccgccctcgcacgtcactccgggacccccgcggcctccgcaggttctgcgctccaggccggagtcagagactccaggatcggttctttcatcttcgccgcccctgcgcgtccagctcttctaagacgag

SEQ ID NO: 17151 - DNA, 2300 bp, Homo sapien
gtgatggcgaagagtggcacgtaagctgctgcttggagagagccacctggagacacgaaggcgcgttttcggcagaggaaaccgcatgtgcaaaaggcctcgagtccgctggagcttgacgcctggccggagaccacagcccccggcatacagacgtgagagaccccaaagccagtctagggcggtagacatcagagctgcagcggtcggtatgggccacatgggtggacacattgatcaaaactcagcgaaggccgggcacggtggcttaccctgtcatcccaacactttgggaggctgaggcgggcggatcaccagaggtcaggagttcgagaccagcctggccaatatggtgaaaccccatctctactaaaaatacagaaattagccaggttgtggtggcgcaagcctgtaattccaggtactcaggaggctgaggagggagaatcgcttgaacccgggaggcagaggctgcagtgagcccagatcgcgcactgcgctccagcccgggcgacagagggagaccttgtgtcaaaacaaacaaacaaacaaactcagcgaagaagaattgcgcattgtactacttgtaaaccttgtttccaatacaaacataggtaggggcaggccgggagccaccttgaggtggctcaaggcaggagaatcgcttgaaccagggaggcggaggttgtagcgagccgagatcgcgccactgcactctagtctgggcgacagggcgagaccctgtctcaaaaaaaaaaaaaaaaagaaaagaaaagaaaaagaaagaaaaaagaaaagtagggggtcctggctcatgggagcaagtgtgagccgggaaaaccattctgctgcgctttccagcctatcctgcggttggatcccgcagccccagggtgtgcagggccgtcctgtggggagagggtgccaagggcggtggtggccggaaggcgtctgcacctggcagcatacgggcaaggtcggtctcgagggtggaggcgagcggtgctactcactgccagaaccgaggctgcagattcccgcccctcgctcaggtcgttaggggcaaccttggcactgcggccccggccccgcccttcccgcagaggccaggtggcggttggggcgcgaccggcccgtttgatttcccgcggccggtggaaaggggcggaggggggaggggaaaggggccgccggccaatgggttgggccgggggccgtcacgtggcggccagggggcggggcccaggtgtacttactgggcggctggcgggggccggggccgcggtgcgaagtccgggaggcggggtcggcgtgcggtccgggggtgctgctgggctgggattggcccgtggtcgggaggcggggtctgcgcgagcggcggcagcgggctgccattggcctcggctccgggcccgctgccggcgtgtgggcgaggctcggggcgcgaggaccgagcagggcggtgggttcgcgagccggggggaggggccggggcggtggcggctgtggccggtactggacccggcgggatgagcgaggtggaggcggcagcgggggctacagcggtccccgcggcgacggtgcccgcgacggcggcaggggtggtagcggtggtggtaccggtgcccgcaggggagccgcagaaaggcggcggggcgggcggcgggggcggagccgcctcgggccccgctgctgggaccccctcggcgccgggctcccgcacccctggcaatccggcgacggcggtctcgggaacccccgcccccccggcccggagtcaggcggacaagccggtgctgggtgaggggcaggcgcgcacagggcggctctgaggggtcggcgggctgggggaggggcagtgtggagcccggcaggatccggaaaaccaaaggcggcctggcccgcaggcccagagcgctaactgggctgggagctgcgcaccaaagtggattcccctggtgggaaatcctgccgtaccttcctgggagagagggcggggccggcaggttcagctaaggtcttggggtggagaataaagccccagggtccggccacgcccccgggcgggacacagtgcctagttgactgggttagaactaggcaaacctctgagcctggcaagcaggtgcactggggacccttgcattgggagggctagaaaaaccctcagttatgacctgggggcggcactttgcagaccaggtgagtacccagttctaggtgaaggggctggatttgtaggatgtggggaacgtgacttagagttggaaggctttttgaaagcctgagtccctgtgtgg

SEQ ID NO: 17152 - DNA, 2300 bp, Homo sapien
gatgccccggaaatccgaatcttcaactctgaaagggccggaggggtgcggcgggcgatagatagcaagtggagggtcagcgaggaagcggaatccggcggcctccgggagcggccggcagagggcgcgccgggaccgggagaggcgactgcggctgctgcgggcagctggcggcgaaggagacgcggaggacgccagcccttgggaagcgcacgtggggcttgcccagcagcgcctgggggcacgtgtgctgccccggggcgcgctgccctggctaaaaatacaacgcgcacccgcgtcctccctggtgggggaggcggccctagggaggagatactgctggagcctcgtttttctgggattacaggcgtgagccaccgcgcccggcccattttcttaatcttcccaggctcccgagaaacctggtacaagcctcgcactgcccctcagtcctctcatctgtggaatgggggccgttcatgtattcgataaatattgaacgtgtacgttgtaccaggcactgctgcaggcgtccagcttaactacaaggctcttactgctgtggagtttacagcccactgtgtgcagggaaataaaataagcaaatggtcaggatcatgtcatattttcaaaaatgccattagaaaaataaggaatggtgtgatggcgaagagtggcacgtaagctgctgcttggagagagccacctggagacacgaaggcgcgttttcggcagaggaaaccgcatgtgcaaaaggcctcgagtccgctggagcttgacgcctggccggagaccacagcccccggcatacagacgtgagagaccccaaagccagtctagggcggtagacatcagagctgcagcggtcggtatgggccacatgggtggacacattgatcaaaactcagcgaaggccgggcacggtggcttaccctgtcatcccaacactttgggaggctgaggcgggcggatcaccagaggtcaggagttcgagaccagcctggccaatatggtgaaaccccatctctactaaaaatacagaaattagccaggttgtggtggcgcaagcctgtaattccaggtactcaggaggctgaggagggagaatcgcttgaacccgggaggcagaggctgcagtgagcccagatcgcgcactgcgctccagcccgggcgacagagggagaccttgtgtcaaaacaaacaaacaaacaaactcagcgaagaagaattgcgcattgtactacttgtaaaccttgtttccaatacaaacataggtaggggcaggccgggagccaccttgaggtggctcaaggcaggagaatcgcttgaaccagggaggcggaggttgtagcgagccgagatcgcgccactgcactctagtctgggcgacagggcgagaccctgtctcaaaaaaaaaaaaaaaaagaaaagaaaagaaaaagaaagaaaaaagaaaagtagggggtcctggctcatgggagcaagtgtgagccgggaaaaccattctgctgcgctttccagcctatcctgcggttggatcccgcagccccagggtgtgcagggccgtcctgtggggagagggtgccaagggcggtggtggccggaaggcgtctgcacctggcagcatacgggcaaggtcggtctcgagggtggaggcgagcggtgctactcactgccagaaccgaggctgcagattcccgcccctcgctcaggtcgttaggggcaaccttggcactgcggccccggccccgcccttcccgcagaggccaggtggcggttggggcgcgaccggcccgtttgatttcccgcggccggtggaaaggggcggaggggggaggggaaaggggccgccggccaatgggttgggccgggggccgtcacgtggcggccagggggcggggcccaggtgtacttactgggcggctggcgggggccggggccgcggtgcgaagtccgggaggcggggtcggcgtgcggtccgggggtgctgctgggctgggattggcccgtggtcgggaggcggggtctgcgcgagcggcggcagcgggctgccattggcctcggctccgggcccgctgccggcgtgtgggcgaggctcggggcgcgaggaccgagcagggcggtgggttcgcgagccggggggaggggccggggcggtggcggctgtggccggtactggacccggcgggatgagcgaggtggaggcggcagcgggggctacagcggtccccgcggcgacggtgcccgcgacggcggcaggggtggtagcggtggtggtaccggtgcccgcaggggagccg

SEQ ID NO: 17153 - DNA, 2300 bp, Homo sapien
tgttggacttttgaacaatgtactcacaaagttgtttgcgtttttttgtttttgtttttgttttttttttttacaaaggaaagggcatgaatttcagaaaattgaggggaagtagctgggggttagcataacaggctacacaaatgtagtaattcaatctagtgtttgcagttcacatgtatcgtgtcacaagactttttttttttcttttttaagaaacaggttctctgttgcccaggctcaagtgcagtggtggggattatagctcaatgaagcctcgaactcctagactcaagctatccctccacctcagcctcccaagaaagagtagctaggtctacaggcaccagccactgagctgagcttttcttgtttttgtttttttaattttttatttgtagagatgggccgttgttatgttgcccagtctggtctgtaactgctagcctcacgggagcctcccaccttgacctcccaaaaagctaagactacaggtatgagccactatgcccaacccatgttgcagaatttttgcaacgtcctgaaaaattgggaagttcaggcatcattattattctcattttatgggaagaaaattaaggcagagctatctgaagtaattccttaaagacacaaaagaaggatgagatcccaagatctttggtcgcttgtttctgtctttttttttttttttttttttttgagatggcgtattgctctgtcgtgcaggctggagtgcattggcgagatctcggctcactgcaatctccacattctgggttcaagcgattctcctgcctcagcctcccgagtagctgggattacaggcacgcaccaccacggcacggctaatttttgtatttttagtggggacggggtttcaccatgttggccaggttggtctggaactcctgacccaagtgatctgctcgccttggcctcccaaagtgctgggattacaggtgtgagccactgcgcctggccgcttgtttcagtcttgttatccaacaaggcagccatgaaggtagtgcaagaaacccaggaattggaagaagactacgaagtttcaggaaaagcgaaatggggggcggagagagggagggcaaagaaaataaagttgggaagatagctcgtctccagcttcatggtctcctatgattaagacaatgtcaatgtaatctaacataccacttttttttttttttttttttttttgagacagagtctctcgctgtgtctcctaggctggagtgcagtggtgcgatgtcggctaactgcaacctccgcctcctgggttcaagcgattctcctgcctctgcctcccgagtagctggtacaggcgcccacctccacgcccggctaatttttttgtattttcagtagagacgggggtttcactacgttggccaggctggtcttgaactcctgaccttgtgatccgcccgcctcggcctcccaaagtgctgggattacaggcgtgagccaccgctcccggcctaccactattttattttatttatgtattatttatttatgtttttgagacttgagtttcgctcttgttacccaggctggagtgcaatggcgcaatctcggctcacggcaacctccacaggagaagcgattctcctgtcccagcctcccgagtagctgggattacaggcatgcgccgccacgcccggctaattttgtatttttagtagagacggggtttctccatgttggtcaggctggtctcgaactcccgacctcaggtgatccgcccgcctcggcctcccagagtgctgagattacaggtgtcagccaccgcgcccggcccaccactcatttttatagacaattttttctaagggacctcgtagacaatactttggggaaccgcagagcacagttggggaaaacacagtaataccatctaagtttctttactgaggacctcagagccgaatggcctctatggatgccatagagaccaatacggactgagggtttaaagaagatggtgtccgccgcaggaccgctctatcttctcgggtgaactctatggcagagcataggcattcgatttagagaagtgaagccgagatgggtgggaacccgaccacactagcgcgctagaagagtggggcggaaagacatctcccgcgcatgtgtggaactggggggactgattccaagacaaggcgcccaccccacagagcaagttttctgaaacgtgtgagtcgtttaagtccagttaaagccgaggtggggcgtatcctgagacgcatgcgttctagacgagacaagtgatctagcgg

SEQ ID NO: 17154 - DNA, 2300 bp, Homo sapien
tttgtttttttaattttttatttgtagagatgggccgttgttatgttgcccagtctggtctgtaactgctagcctcacgggagcctcccaccttgacctcccaaaaagctaagactacaggtatgagccactatgcccaacccatgttgcagaatttttgcaacgtcctgaaaaattgggaagttcaggcatcattattattctcattttatgggaagaaaattaaggcagagctatctgaagtaattccttaaagacacaaaagaaggatgagatcccaagatctttggtcgcttgtttctgtctttttttttttttttttttttttgagatggcgtattgctctgtcgtgcaggctggagtgcattggcgagatctcggctcactgcaatctccacattctgggttcaagcgattctcctgcctcagcctcccgagtagctgggattacaggcacgcaccaccacggcacggctaatttttgtatttttagtggggacggggtttcaccatgttggccaggttggtctggaactcctgacccaagtgatctgctcgccttggcctcccaaagtgctgggattacaggtgtgagccactgcgcctggccgcttgtttcagtcttgttatccaacaaggcagccatgaaggtagtgcaagaaacccaggaattggaagaagactacgaagtttcaggaaaagcgaaatggggggcggagagagggagggcaaagaaaataaagttgggaagatagctcgtctccagcttcatggtctcctatgattaagacaatgtcaatgtaatctaacataccacttttttttttttttttttttttttgagacagagtctctcgctgtgtctcctaggctggagtgcagtggtgcgatgtcggctaactgcaacctccgcctcctgggttcaagcgattctcctgcctctgcctcccgagtagctggtacaggcgcccacctccacgcccggctaatttttttgtattttcagtagagacgggggtttcactacgttggccaggctggtcttgaactcctgaccttgtgatccgcccgcctcggcctcccaaagtgctgggattacaggcgtgagccaccgctcccggcctaccactattttattttatttatgtattatttatttatgtttttgagacttgagtttcgctcttgttacccaggctggagtgcaatggcgcaatctcggctcacggcaacctccacaggagaagcgattctcctgtcccagcctcccgagtagctgggattacaggcatgcgccgccacgcccggctaattttgtatttttagtagagacggggtttctccatgttggtcaggctggtctcgaactcccgacctcaggtgatccgcccgcctcggcctcccagagtgctgagattacaggtgtcagccaccgcgcccggcccaccactcatttttatagacaattttttctaagggacctcgtagacaatactttggggaaccgcagagcacagttggggaaaacacagtaataccatctaagtttctttactgaggacctcagagccgaatggcctctatggatgccatagagaccaatacggactgagggtttaaagaagatggtgtccgccgcaggaccgctctatcttctcgggtgaactctatggcagagcataggcattcgatttagagaagtgaagccgagatgggtgggaacccgaccacactagcgcgctagaagagtggggcggaaagacatctcccgcgcatgtgtggaactggggggactgattccaagacaaggcgcccaccccacagagcaagttttctgaaacgtgtgagtcgtttaagtccagttaaagccgaggtggggcgtatcctgagacgcatgcgttctagacgagacaagtgatctagcggcgtggtcttttcaacgcctggcgtactgacggcgtctgaggtggaaggggttgtttaggattccgaacacgcatgcgttctgagacccaggcgtttcctttagagggtgtggagtgcagggctccttattgcgcaggcgcaaggactgcccggtaggacgagcggtctatcaaggggagggaagatgaggttgaagagattaaaaaaccgggtgcgcctgcgcgttgcagattagttgaaaacgctcagggtttgtgaggggcggggtcacgtatgcgcgtcattggacgggtcggtgggagggagggtggagatgggtagggtgtgtgcgcttgcgcagtgcgggggtggagggcggaggagatagatagcac

SEQ ID NO: 17155 - DNA, 2300 bp, Homo sapien
cttgtttcagtcttgttatccaacaaggcagccatgaaggtagtgcaagaaacccaggaattggaagaagactacgaagtttcaggaaaagcgaaatggggggcggagagagggagggcaaagaaaataaagttgggaagatagctcgtctccagcttcatggtctcctatgattaagacaatgtcaatgtaatctaacataccacttttttttttttttttttttttttgagacagagtctctcgctgtgtctcctaggctggagtgcagtggtgcgatgtcggctaactgcaacctccgcctcctgggttcaagcgattctcctgcctctgcctcccgagtagctggtacaggcgcccacctccacgcccggctaatttttttgtattttcagtagagacgggggtttcactacgttggccaggctggtcttgaactcctgaccttgtgatccgcccgcctcggcctcccaaagtgctgggattacaggcgtgagccaccgctcccggcctaccactattttattttatttatgtattatttatttatgtttttgagacttgagtttcgctcttgttacccaggctggagtgcaatggcgcaatctcggctcacggcaacctccacaggagaagcgattctcctgtcccagcctcccgagtagctgggattacaggcatgcgccgccacgcccggctaattttgtatttttagtagagacggggtttctccatgttggtcaggctggtctcgaactcccgacctcaggtgatccgcccgcctcggcctcccagagtgctgagattacaggtgtcagccaccgcgcccggcccaccactcatttttatagacaattttttctaagggacctcgtagacaatactttggggaaccgcagagcacagttggggaaaacacagtaataccatctaagtttctttactgaggacctcagagccgaatggcctctatggatgccatagagaccaatacggactgagggtttaaagaagatggtgtccgccgcaggaccgctctatcttctcgggtgaactctatggcagagcataggcattcgatttagagaagtgaagccgagatgggtgggaacccgaccacactagcgcgctagaagagtggggcggaaagacatctcccgcgcatgtgtggaactggggggactgattccaagacaaggcgcccaccccacagagcaagttttctgaaacgtgtgagtcgtttaagtccagttaaagccgaggtggggcgtatcctgagacgcatgcgttctagacgagacaagtgatctagcggcgtggtcttttcaacgcctggcgtactgacggcgtctgaggtggaaggggttgtttaggattccgaacacgcatgcgttctgagacccaggcgtttcctttagagggtgtggagtgcagggctccttattgcgcaggcgcaaggactgcccggtaggacgagcggtctatcaaggggagggaagatgaggttgaagagattaaaaaaccgggtgcgcctgcgcgttgcagattagttgaaaacgctcagggtttgtgaggggcggggtcacgtatgcgcgtcattggacgggtcggtgggagggagggtggagatgggtagggtgtgtgcgcttgcgcagtgcgggggtggagggcggaggagatagatagcacgcttgcgcggctgtcatagggctgcttggttggtcagtggggagtcggcgcctgcgtactaagacccgtgtgcagcagcggcggcggcggtagaggcggcggcggcggcggcagcgggctcggaggcagcggttgggctcgcggcgagcggacggggtcgagtcagtgcgttcgcgcgaggtgagagcgggcagggcgcgtgtgcgcggtaccttggcttgggcccgggagaagatggaactgcgcgggggtcggggagggggcagaggggagcggcggccgccgccgcacgggttcggccagagagcggcgcgaggtgaggagaggcgcgggcgcgcgccccggttggcgcgcggggtgacggttggggttggcccggtgacgttggagcgacgcagggcgggggacggcgagccgcgaggcagccacgcgggagaggccgccaggcggccacgccggggcgagggccaggggccagatcggcccaccggggcaagggtacctgggccgttgaggacccggctcagcgcggccacgtgaggtgggggagggggctattcggtgagagggcatgatggggggggttggcggacggccggggggaggggagg

SEQ ID NO: 17156 - DNA, 2300 bp, Homo sapien
ggccaggctggtcttgaactcctgaccttgtgatccgcccgcctcggcctcccaaagtgctgggattacaggcgtgagccaccgctcccggcctaccactattttattttatttatgtattatttatttatgtttttgagacttgagtttcgctcttgttacccaggctggagtgcaatggcgcaatctcggctcacggcaacctccacaggagaagcgattctcctgtcccagcctcccgagtagctgggattacaggcatgcgccgccacgcccggctaattttgtatttttagtagagacggggtttctccatgttggtcaggctggtctcgaactcccgacctcaggtgatccgcccgcctcggcctcccagagtgctgagattacaggtgtcagccaccgcgcccggcccaccactcatttttatagacaattttttctaagggacctcgtagacaatactttggggaaccgcagagcacagttggggaaaacacagtaataccatctaagtttctttactgaggacctcagagccgaatggcctctatggatgccatagagaccaatacggactgagggtttaaagaagatggtgtccgccgcaggaccgctctatcttctcgggtgaactctatggcagagcataggcattcgatttagagaagtgaagccgagatgggtgggaacccgaccacactagcgcgctagaagagtggggcggaaagacatctcccgcgcatgtgtggaactggggggactgattccaagacaaggcgcccaccccacagagcaagttttctgaaacgtgtgagtcgtttaagtccagttaaagccgaggtggggcgtatcctgagacgcatgcgttctagacgagacaagtgatctagcggcgtggtcttttcaacgcctggcgtactgacggcgtctgaggtggaaggggttgtttaggattccgaacacgcatgcgttctgagacccaggcgtttcctttagagggtgtggagtgcagggctccttattgcgcaggcgcaaggactgcccggtaggacgagcggtctatcaaggggagggaagatgaggttgaagagattaaaaaaccgggtgcgcctgcgcgttgcagattagttgaaaacgctcagggtttgtgaggggcggggtcacgtatgcgcgtcattggacgggtcggtgggagggagggtggagatgggtagggtgtgtgcgcttgcgcagtgcgggggtggagggcggaggagatagatagcacgcttgcgcggctgtcatagggctgcttggttggtcagtggggagtcggcgcctgcgtactaagacccgtgtgcagcagcggcggcggcggtagaggcggcggcggcggcggcagcgggctcggaggcagcggttgggctcgcggcgagcggacggggtcgagtcagtgcgttcgcgcgaggtgagagcgggcagggcgcgtgtgcgcggtaccttggcttgggcccgggagaagatggaactgcgcgggggtcggggagggggcagaggggagcggcggccgccgccgcacgggttcggccagagagcggcgcgaggtgaggagaggcgcgggcgcgcgccccggttggcgcgcggggtgacggttggggttggcccggtgacgttggagcgacgcagggcgggggacggcgagccgcgaggcagccacgcgggagaggccgccaggcggccacgccggggcgagggccaggggccagatcggcccaccggggcaagggtacctgggccgttgaggacccggctcagcgcggccacgtgaggtgggggagggggctattcggtgagagggcatgatggggggggttggcggacggccggggggaggggaggcggcgtggctccggcctggcgcagtctctgaggagggggcggccgcggcaccggaagtgccccccacgggaggctgccctcggggtcgcaggccgcatggccaagcgtggaccggggccgcatggcagcgcggggacccctccccccaggtcccggccaccggaagcccggaacggccacatggtcggcaggagccggcagcccctagcgcggggagctagtcctcgcgggggttccgagggggcctgagattttgaggagtggaagccggaggctcgggtcctaatcaccccggagggcctgctgcaggcatatgttagcgcttcccaacctcaagggccccaggagctttcctgaaaaaccctcctgtgaagtgtggcggtcagccaggtgtaagtggcaccccttcgagctgggag

SEQ ID NO: 17157 - DNA, 2300 bp, Homo sapien
caaggtgggctgagcctggggggctgtggaggaataaaaagggctatcctgacccagttctcctcccaggtactgcctccatcctgagctgccgtcctttgaagggagaacctggggtagggttcgaggagcctggcgagaactgtgcacctcctcgggaggagcagccccctcctgtgctgctttccccctcccttcaatatgctggggcggagaccctggcctccaaagtgcagtgagtactgggaggggtggggagagatttccaggggctcggatggagagggcccaagcgcagccactggggtcttcatgattcgccctccccttttctcatctcgtcttgctagctgccagtctccaactcagccctttcttcattcattgaacaaatactacttatatactcttctagtgggcaaaaaaaggaaccttgctcttgtggaacttctgccttttctctctacaatgttcatacgtaataagtattatttatttatttatttttatttttattttttttgagacggagtcctgctctgtcacccaggctggagtgcagtggcgtgatctcactgcaacctccacctcctgggttcaagcgattctcctgcctcagcctcctgagtagctgggactacaggcacgcaccaccaagcccggataatttttgtatttttagtagagacggggtttcgccatgttggccaggatggtctcgatctcctgacctcgtgatccgcccacctcggcctcccaaagggctgggacaggcgtgagccaccgcgccccgccagtatttagtatttttaaaggtaataagtaaggactatggaaacagagaaagaatggggcggagacagcagtgcggttggtgtggacatcctaagaaggtgggagagattcgagcaaaggcttgaagaaggaagtgaagggtgtagctgagcaggctttgggaggaagagcatttcaggtagaacagctagagcgaagttcccataaggtgggagtatttcctaggtacagcaaggcttgtgtggttggaacagactttgcaagggggaggtgatggggcgagaggcttcactcccttattttttcttgtctgacagattccgggaccccaaatcccagcggacgcaccaggctcaggtggcgttccaggtgtgtgtgcgccctggctcctacaccccgggacccccttccgctgcccttggagaacctcctgaccctcacttcagtccagccgaacttgagtgggtcactaaggagaagggggccacactcctctgtgccctgctggtacgggtggaatgaggggtgagacaccactactacaagcacagtcgggccgcgggcccatggactctgagtggcgactgcctccacctcattcccgtgactcgtggcatgcgcaggtgctggagcttggcagccgcgcaggagcatgtaggcaggctctcagatgtaggtggcaagtggcacagctccatgtccggaggcccagcactccgtctgatgggaggagtcgtgggagcccagctccaggccctggtacccctcttcatgcactgatttggggaacatgactcccttttactcccctaccccacatcacttaatttatttccgtttttgtttctggttactgtgaatcccagaggagtctctccctgtgcccacatgaagctgctttttccggggccaccgggcgggagtggggaagggtgggcgcacggaagatgggggcctctgtacagttgttactgactctgatttctaaggagccaataaacaccgtctcagagcctccgcctcggcctctctctcgcgcgcccctctccggagcccgcgtcccctggggtgccaccaggtgggcccgcgaaattaaagagagctgaggatgccaaggccagtctgcagccgtcgtcgctcacgttcccggcgacggggtttgtacgccgcgggcacccgtcgcagcgcgcttccgccttctttcacctgtgaggtcggccgccgccgtgactccggaaggactcggccgggccgccggatgtgacgcaggggccagggcgcgtcggagccgctgagaaagcgcagagaaggcgggtaggaagggcagtcgtccgcgctggctgggcagggagcggcagcagcgagccggggaccccggcgccgcccgcgcgcggtgggactggggctgcggtcccggccgggtggcgggctcctgggacacgtgaccggggcggcgagcgggccgggcggacgggcttccgcctgggccgggcgcggccccctct

SEQ ID NO: 17158 - DNA, 2300 bp, Homo sapien
gaggttgggcttcctgctttggggaccagcttggggctgagtggagctggctgggatcagggaagcaaggtttgggcctatggtggctgtgggtagtgacagacctaggggatctacctgtcccctccccttgaattctgggaagtcctgcccaggcccacaggggctcagtcctccttcatcttaggcagttcttgctttttcctaaggggatcccagggacagaggagataggattgggccttacacccagatcaagacaccagcccaagacattggagggttctgacagacagggagtgggcaggggccaatgtgaagttgaagttggcaggctgactcaccccttctgccatccccccagtggtacagccatcatgcaagacggtaacacgatgcgcaacaattatgggtgtgacctggatgcgctgggcacaggtgcacgcattggcatgatgcgaactgccaagggcgacctgcactacttcatcaacggccaggaccaaggcgctgcctgctcgggcctgcctccgggtaaaggtgactatgtggctttcagcctgccaccctcagcccagaccacctggctgtcaggcttctgaccttccctctcctccccagaggtgtatgcggtagtcgatctctatggccagtgtgtccaagtgtccatcaccaatgccaccggccccatggacaacagcctggcgaccagcaacactgccaccgagaagtccttcccactgcactccccaggtgcggcagcagggcgggggctggacgggctctgcttgcctgctgtgcacctgaggagtagggtttccaggttagagaggttctgcaaagacggttggctggggtagctgccggctccagggaagggacagcccacggtggcaagcagccagtgagggggaggttacacctggtacttagagcctggacacttccctgccaccaaggggccaggacaccataagctgagcatgccaggtttggaaatgggccttgctgtggtgaaaagaggtatcagggccgggcgcagtagctcacgcctgtaatcccagcactttgggagttcaaggcaggtggatctctcgagcacaagagtttgagaccagcctgggaaacatggcgaaaccccgtctgtaccaaaaatacaaaatgtaggcaggtgtggtggcatgcacctgtggtcccagctacttgagaggctgaggtgggaggatagctggatcccaggaagtcgaggctgcagtgagccacgactgtgcccctgcactccagcctgagtgacagagcgagactctgcctcaacaaaatacaataaagaggtgtcaggaggccctgaggtgtaatggcagatggcagatggggcgttggcatccccatttcgtttcatctgaaagctttgctctgtgttctgcctgaagctcgctgccccaatcctaccccttctactggtgccatctcttcacagtggctggcgtggctcaccgattccacagtacttgcggcaagaacgtcactctagaggaggatggcacgagggcagtgcgtgccgctggctatgctcatggccttgtcttcagtaccaaggagctgagggctgaggaagtctttgaggtaggccgtagtgatgtgacagaggggctgcgaggcccatcacgacagggccagcttatgttttctctgtctcgtaggtgaaagtggaagagctagatgagaagtgggcaggttccctgcggctggggctgaccacactagcaccgggggagatgggacccggggcaggcggtggtggcccagggctgcctccttccctgccagagctccggacgaagaccacttggatggtatccagctgtgaagtgaggcgtgatgggcagctccagaggatgaactatggccggaacctagagaggctgggggtgaagtggctggctccagggacaggggaggggttgggagtggaggtggcagggagaggtgggctgaacatcgtccgtccttgtcctacctcggtcctaggtggggagccgtgtgggtgttcgtcggggggcagatgacacgatgcacatcctggtggatggagaggatatggggcctgcagccactggcattgccaaggtagacctgaacgcttccttgggttctgggaggatggttgaggtcttctgctgatctctgattttctgggtcttgtgtgcctcccagaacgtgtgggctgtgttggatctctacgggccagtccgcggtgtgtcaattgtcagttccacgagactggaggagtcagaaggcac

SEQ ID NO: 17159 - DNA, 2300 bp, Homo sapien
aatgagcctacgagtagtacttattccataggctgagacttgtagaagctaatgtctgtgaggtggtttaactcagtgcctgactcacgtggagcattgacgaaatgtggaaattgtcatgtctggaaaacaaggacccaggacctgtcctccagggtggtctgagactctcacgaataccttctggagttgttcctgtgtggagtggggtgctgagcaggcctcaggactcctctaaactgtttgtcttctttgattaggagggtgaccacattggcctcacaaggaagtccaactctgccctacacttcttcattaatggtatcgatcagggtaagggccgcccagagagagcctctgggccggggctttcggtggggctgggactgggggctgtacctcatcctcctgcttctctttggtgcttggcctccctgtgtttgactttctcccctcattctccctgtccactcccacacccccgtaccttcctgccacaggagtggcaacccccttgacgcccccagtggtgtatggtgtggtggacttgtacgggatggcagtgaaggtgaccatcgtccacaataacaaccacagtgaccgtctccgccgaaacaacgccatcctgcgggcgctgtcccccgagggtgctctccgccgtgctgcccctgccgcccaggcagaacctgagcgcctgctcttccaccccaactgtgggcagaaggcagccatcacccacgagggacgcactgccctgaggccccagtatggcccatggggtggggagaagcctgaagaagggattctaatgggggggggggggcggggcaaggaagtggaaggcagagggagcctggcgggggcagcttcctggaggttgagctttagttctttggcttggggcagtgagtgttggcaggcattgctgggctaagccttggcacattgagagcgtgtgttggggatctgactctccacttgctgtgccctcagtgccaccgatgacttcaatcacggcgtggtgctgagcagcagagccctgcgggatggagaggtgttccaggtgcgcatcgacaagatggtggacaaatgggctggctccattgaaattggtgtcaccacccacaaccctgcctacctccagttgccctccaccatgaccaacttgcgctctggtgagctcccaggaagggcagggacaggatagggttttggggggaagctatccccaaagccctggcacttgttctgcagctcctttttcacttgtcactcttgtgaccactcattcagtggctagagagtgtcccgtgggcagggctgtggctgtcttggaagctgcagagttttcttgtcctgctcagggaagaaatctagtcatcaaagaaaaggcaaggtggactgtgggctcgggagtcctgtgggcgctgctgtggcaaggagaggagccctgcatttcccctcatgtcccctcctgctccttgtcctcccagggacctggatgatgactgggaatggggtgatgcacaatgggacgaccatcctggatgaatacgggcacaatctggaccgcctcaaggtgggaaagtgggtgcgccgcctggcggccgcagcgggcatcacaaacaccgcggggctgatgcaggaccagccccggcaggaactctgcctgactcctcactccagcacccccttcttccaaggcaggggacacggtgggcgtggtacggcgggaggacgggactctccacttctttgtcaatgggatgactcagggccctgctgcctggaacgtgcccccgggcgtctatgctgtcgtcgatctctatggccaggcggcccaggccaccattgtggacgacgtgggtgagggccgggctgggctggggctgggggttagggtggccttgggaggtctgagagacacctagagacctgatgggtgatgtccacttttacagaggtggctccagttcctgaaccactccctgaggggaacaaccaggtgtctccaagctctccgtcctcaggggccgggggctctgacctgcgcttccatcagctgcacggcagtaacgcagtcatcactaacgggggccgcaccgccctccgccacaactgtcgcagcgagtttaatgacgccatcgtcatctccaaccggtcagtctctcaactttcatgtccccaccttcctcctgcccagcctcagccatgcaagtagagcctctctgatcgccagtctcctggcagggccctgcgggatggagagctgtttgaaattgtcattcagaagatggtgg

SEQ ID NO: 17160 - DNA, 2300 bp, Homo sapien
gccgggcaccgagagggaacagaaagaccatagagcaccagggggcggtcaggaagacagcatgaagcagaaacattgagtttgaagatgacattaagagcttgagttttctcaagatccagaaccagggaagggacacgagggctaacccactagaatggctgggaacagacctcctggtacaatttcttgggcatggaggatggagagatgtcagagatgtgatggcaagtgaagaaagatgccaaggaacgaacaaacgtaatcccagcactttgggagtccgaggcgggcggatcactagagtcaggggtttgagaccagcctggtgaacgtggtgaaaccccgtctttactaaaaatacaaaaattggccaggcatggtggcgtgcgcctgtaatcccagctactctggaggctgaggcaggagaatggcttgaacccgggaggcagaggttgcagtgagctgagatcatgccattgcactccagcctgggcaatagagtgagtgagactccgtctcaaaaaaacagaacaaaccattgaaggacagaggctgtgccagaaagataggtgaggagaaagatccagggtgagggaggtgtgtgtgattcagtgaagaggccaggctcacagaaaaagaacttggaaggagattgaatctgggtagagcctgatctttggagagaattaggccaggggaaaggaatgaatgatacacaagagcaagaggtgtgggtataggaagtaggagaatttggatggttggagagccatagagacaaggaaagttagaggaggcaggaggttggaaccaaggaatttgtgcttggcttggaaaggagtggtttagtaaacactgagtagagagcagagttgctaaaggaaagcccaaataattaccaagacggagtccagaaaatcactgtctgcatctctggattagtgttccaagagacagaaagccagctagctgtctgagaggtgggaagatatggtggcctgtggaatggggggtggcccattctaagcctctgtccaatacccctatcccaggtcaactcctggagcggctccattgagattggggtgacagcgctggaccccagtgtgctggactttccaagcagtgccacgggcctgaaggggggctcgtgggtagtgtcgggctgctctgtgctgagagatggacgctctgtgttggaggagtatggtcaggacctggaccagcttggtgaaggggaccgcgtgggcgtggagcgcacagttgctggggagcttcggctctgggtgaatgggcgggattgcggtgtggctgccacaggcctgccccctcgtgtctgggccgtcgtggacctttatggcaagtgcacccagatcaccgtgctaccccctgagccaggcttcagcccccctactcccatccccacacctcccctcgagcccttggcccccactgaagactctgccttggctgaacaggggacctctgcagatgaaggtgagaacacagctagggcagtggtggtggggtggggacggaatgggggaaatagagtgacaagacaggctgggtgtgggcagggccaccctgatccccaagtctgttgaatgggagagcaggagctagaggatggggggttctcctggctatgggccgtgaagcagggactgaacccttattcccctcccatcccacctggtccccagccttcatggtgtccccagcgcaggcccggccggagacgtttcctaacagccttgagtcgcataatggtgagggctttggggaggccctgggaaggggagtgggaagtgaggtggacaagggagggccctcaggagaaggggtagggagagaggcaccaggtctgggggtgtagagcctcatcccaacttccgagcttccttcttccatcctgctgctatagactttgccaacatggagctgtctgaggtggtgagcaacaccatcctgtctgcctacaatggagggctcctgaatgtgaacctgagctccccaccggcaggggaaggcctgggatctagcggtgctgccacctcgcccattctcacttccaacgatgccctgctctttcatgaaaagtgcgggaccctcatcaaactcagcaacaataataagacggctgagcgccggcggcccctggatgaattcaacaatggggttgtcatgaccaatcgcccccttcgggacaatgagatgtttgaggtgtgcaaagtcctgtggtctggttggcgccttatccctgggagctaaagatggggattgacccttggtgc

SEQ ID NO: 17161 - DNA, 2300 bp, Homo sapien
caacctctgcctccccggttcaagccattctcctgccttagcctcccaagtagctgggattacaggtgcctgccaccacacccggcttatttttgtatttttagtagggacagggtttcaccatgttggccgggctggtctcgaactcctgacctcaggtgatctgcccacctcggcctcccaaagtgctaggattacaggcatgagtcaccactccgactcaaaacaggtttcttataccttgttgaggctggggatggggtcagacttaatgataatcacagtcctgtgcagccacggtttatggggcacctgctcttctcccgaaagcctggaacctcggacttcccactcaattgccctcacctactctaactcttcattcttaaggctctgcccctttccttctggctcccaccctcaggtgtcctgaaccctcccgactctgggctggctgcccgcagagctgggctccttacttctccacattgggggatttctgcatcaagttggagctgttctttcgtaggatgctccggggccggtcctgttgggagttttgggggttcaagcaagttggcccagagtgcggactgcacccggggctgtttacctcttgccctgcaggtcccccaggcccggggctggaagccctggatacactggttcgaggcccggggatgttgaatccaccagggttcctgccagacccaaggctgtggttcgcagcctcccttgggtgctgactgggcccggaaccaaggaccactatccccccggagggacagcttgaaccagtactatgagttacggagccccctgagtgcacgtggggcccagaaccgtgaaacaagactactctggagggctgcccagcgcctgcctcgactcctgtgaccgctgcgggcactcctctggctgcccctccaggggaatcccggttgaggccgccagcagcccctagggactccaccttctccatggccccactggggggctgctctcagcgatcctgacccgcctcccggctccacgtagccccgcccctggccccgcccccaccgctgccggccggggatgctcgggctcagtcccgggtccacttctcccctgctccagagctgcggcgggcggaatcaagactatatagagactcgggctgggggtccctccgctcgcccctttcctttgtgtcccacccaaagattttctttgtctgggcaatttgttcccgcccttctccatcaccaccctcatccaaaccagccaatcccagtcagggggccaggccaggagcttcgactgtgacctcacggtcctccagcctgagcttgagcttcggggagttgggcagggggcttgttaatagctctaagggagatcttttggggtcatcaacgctgtcgcttgaaacggcctgtcgggacttctttagactctttgtggtcttaacatggaatagtttggttgagttggagttgaagctgggcttgacttgaactatcagcgagcttcccccacccccgccagtcggctagctcagccaatcagaagaggtgtgaggcaaagtggaaggactgccgcactgttgcaagacacttcgtcctcagtcgggtggcgggaagagactttcactaccgcttctctgggtcctccagactcggctcacgctgctttggagcctgcatcccgaggggagacaccccctcttgccgtaaagcgagtgcttcaaggtgtcaccgccccctagcgagggcggggtcgtcggtgccgctgtcgcaaagcagaaagtgtttgggctccagcaccccaccgtcgtaaagatgcctgcggtgggcgtgtctttctcccactgtcgcaaaagctccctgcccaggtcttcgtccccctcggagccgctccgtcacctcgctatgccgtaaagcgaggctcccgaccccgtgtccttctgttctcatcgtggtcgtccccagctcctagcgcgggctgcttcattgcccggcagtgccgtaaagcatacctggcctcagccccccggtcgtatccctcggactgtctgcccgacgcggttgccacggtgccgccaagcgcggctgtcgcgctgccccggtgtcagcggagatggcggcagggtcgggtgggagtgggggctctgggggaggccctggaccggggccgggcgggggtgggggccccagcgggagcggctcaggaccggggtccaacgggggtctgggcagcggcggggaactgcacccgcgcactgggcgcttggtgagcctgtcggcctgtgggcgtac

SEQ ID NO: 17162 - DNA, 2300 bp, Homo sapien
aagtccgagacaaccatggggggaggtggagcggtcactgaagtttttctaaaatgggaagggtaagagaagtcagtgagatgaggatctggggcctgagcttctcccctctggtgagggcccacaacagacacctgggaggcatggatacaccagatggctagaagacttggattcatttgattgattcctcagattcctccacctacagaaatcagtccccccagctgtggccactatcatattggggcaggagattgctctgcagcacaaggaatatgatggcaaaggactatacctgaggtcctgctcccacccagagcttgtagaggacgtggaagatgagcatcaggatggtgagaacctgggcaggccagcctagggggcaggagggctgggaatgcacagcctgatgggtacccgagccctgatccctgattctaggctccacaagcttgacctaggtgattgagaaccccgtaagcactgaagtccacctactggaccacatgggaggcccctttagggatcacaaggccacggagagctccctgatggcaacaatgacaacattgcagcctgttgagggcaccaggccaccatctccctggggctgtctcttggcaagctcccatctcccagccctccaattctttcaggccagtacatcagcaacaggtggaaggagaggccctgaacagcctcaagtccaaggtccacattggacaggcgaggaaccagggagactcagaggcggttgggaccccctccagcttggcaccacacactggctccatgcctcctccttcactcctctgccacaccaccccactccaggtatttctctgtcctccaaagacagtgagtctcaagtggtgtccagctggtggctggggggctgagctggcaaagcccaaggagttcagagagggagagtggaagcaaccccaactcctcaagccagaacaagcacagcctggcacactgagcctgggcagaggcaaggggatgcatacactggccagggaggtagaggagctgagtggggaggttctaggggatccagagtcacatggacaagatctcatgcctgctacgagaaagccatgaactcaaactcttctctccagatgaaaccctgggacttcaatggactcaagaaaaggaaagcaaacaatggaaaatggggctggttgggggcggagtgggggcaaccttcccttcatgaccaccctatgaatagaaataaagagcagaagagcaagagtctgggagctgtgaatcgggtgctcaggctgggcctgctcagtcgttgaggagaggggaggaggaaggggagttcacacacaggaaccatgaatatgacggcaaaacgaagaaagctgggagcagtccggggtactggactccacaggagcaggcccaagctgtagcaggatgacaatgactgatgcaattaatatagtgaaccagctgggcacagtggctcacgcctgtaatcctagcactttgggaggccgaggtgggtggatcacctgaggtcaggaggtcgagacaagtctgaccaacaaggtgaaaccccgtccctactgaaaatacaaaaagttagccgggcatgatggcaggagcctgtagtcccagctactcgggaggctgagacaggagaattgcttgaacccaggaggcggaggttgtagtgagccgacatcgcgccactgcactgcagcctgggcgatggagggagactccgtctcataaataaataaatttagtgaaccatgaatttactgctatcaccttcttcacttcgtacagccctggaggaaggggttatcattcccatcttccagatgagaaaactgaggaatcagagagctcgtccaggggcacataacctctaagtgacagagccaggatttgaacctagatctgccaggcccccaagataaccacgaagagagaaagaaacagaggctagagccccaggaggaaggagctggcagatcgtctctgagggtggggctgtggcttctctgatctcaggcccccatcctccgcccaggccccgcccctgcccctcccagcactgcctggaagtgtggggtgagagctcctcctaggacacccctttccccttggggaaagaattgtgcccccaggcccttccccgcggaggtccctctcctccttccccctcatctccccttcctgggacagaaagtgcctccacctgcatccccaggggcccggcctccagggcccgctggccccacagcaggcaagctgagatgacggtcaag

SEQ ID NO: 17163 - DNA, 2300 bp, Homo sapien
tgatggcatggggaggaaggctgggagaagttgggcggccggctgaccctggctcttctctccaggctcgcctgcctgttcctgaaacggggagctgatctgggggctcgagactctgaaggcagggaccctctgaccatcgccatggaaacagccaacgctgacatcgtcaccctgtaagaatgcctgaaggggcggggctggcgctgggactccccccacccccgcccacccacgttcgggcgggcgggcggggctgacgccgaaacagaagcctgtgctgtggggcctcggaaaggggctgggccagcgccggggccaggctcgagaaaggctgcgcgaagtgtgcactgggacgtggagtagaaggcaggcgggagggcgggcagggtgcaaggatgcttggcccaccctgagaggcgtaattcgcccatcaacattgctgtcaggcatctttttagcactagacgtgaccccgggggtgggggcagatgaacggaacgcaacccagctcaaaggatgggaagttgtgggggaggtgaggatagtctttttttttttttttgagacggagtctcactctgtcgcccaggctagagtgcaggggcgcgatctcggctcactgcaacccccgcctcccgggttcaagcgattctcctgtctcagcctcccctgagtagctgggactacaggcgtgcgccaccacccccggctaattttttgtatttttagtagagacggggtttcaccatgttggccaggacggtctcgatctcctgacctcgtgatccgcctgcctcggcctcccaaagtgttgggattacaggcgtgagccaccgcgcccggccaaagatagtgtcgttcatttcttaattccctcctcttcaggctacgactggcaaagatgagggaggctgaagcggcccaggggcaggcaggtaaagaatacacccaccccaccccccaggcccaacacctgaactctgggcttctggtccacggtgacctctctccctagtgcccagctgcattcattccgttatttaacaaatgcgtattgggcgcatgcgacgtgccaggccctggcaaggcataggtgctggcgcagtgcccgcggcgcgcacgttcccacccaggctcggagcgcgaggtccccaggtgggccccaaccgccggatcctgcccttctgcactggggcccagccgcctcccggcctttcctccctcccccaggagatgagacgtatcttgacatcttccgcgacttctccctcatggcgtcagacgacccggagaagctgagccgtcgcagtcatgacctccacacgctgtgacccgaggcccacggggcccgcgcctgcctcccttccccgccaccgggccctctgccattaaagcctccgtgcttcgctcttcccttctggttcacttcttgggcgccaccttcgggcccgtagggtgttgggcgctgcggctcccgaggtgcggggagcagctgggggtttgcgagctccagtccagcaaggtgcgactccggggagcgaggcggcagcttcggccgcggcctgagcgcagggcgctgcggggcgggggctctcgggctggggcgacgtggccagcccagtcctgccgaggggtggggctggccctggggctcgctggccccgcgccgccgcggagagagcgcgcccgggccaccccggctggaaggcatccccggaatgcggcggctcagcacccgccccctcgggaattccccgggggagccgctgggagggactcggctcccgggctgggccggccgggcctcgggctctgagcggtgggattagaggctccagccccgccgacttgcagacgtgagatcgggcacacctgagcggcggcggggcggtcgtggccacatccggggcgacgtgcctgagtcaccccgtcccgccagcgtctgccagtccagccagtccgcccagtctctcgcgtccgagactcgcctccagcctcccacctccgcccgggccgcgcgagcctcgcgggggcgggggcggggcgccaaggggcggggctgtctcttaaagggccccgggccgctgcccttaggccacttcctgggggcggagaggacctcagcggctgcggcgacacccagggaaggcggcgcggccgggtcccgaaactcctggctgtttccatcagagccctcggacactcccagcccgggctgagcacgcatcgtcgctccccggcggatacaagggggctccgccatccgctcccgtcagttcggcctccatctcctggga

SEQ ID NO: 17164 - DNA, 2300 bp, Homo sapien
gccttccggcacatcctcaatttcctgaggctgggccgcctggacctgccccgtgggtacggagagacagcgctgctcagggcagaggctgacttctaccagatccggcccctcctggacgcgctgcgggaactggaggcctctcaggggacccctgcacccacagctgccctgctccacgcagatgtagatgtcagcccccgcctggtgcacttctctgctcgccggggaccccatcactatgagctgagctccgtccaggtggacaccttccgagccaaccttttctgcaccgactctgagtgtctaggtgctttgcgggcccgatttggtgtggccagtggggatagggcagaggggagcccacattttcatctggagtgggccccccgccccgtggaactccccgaggtggagtatgggagactggggctgcagccgctgtggactggggggccaggagagcggcgggaggtggtgggcaccccaagcttcctggaggaggtgctgcgggtggctctcgagcacggcttccgactagactctgtcttccccgaccccgaagacctgctcaactccaggtctctgcgctttgtccggcactgaggatgctgttctcagtttgactgtggggaggagagagaatggggtactagcacccctgaagcctctttccagctctgcttcaggagctatgagagtcgggactctcctgcacctgactggagctcagatgtgggcaggaattcccaaacctgagcccaccaaggactcacaagtggtccagaaggtctcaacctgtgctgaccctgggaggggtagggaaggttctctcagcttgttcttgcctaaggctgagcacctccagtctctccttgatttggagctcagtgtttaagggcttggaaaaggggggaacatctctttacccagactagacctagcaaaaccctggaaggatattgaggtctggggaaaagggaggactttgcattttcccaatgcggtctcttggaccatggcttctactcctgaagctgggtggcctggcctggcctgaccaatgagaggccagaacactctggaacatcggaagaggagttctttgctatgttccaagccatctactgagggaggcagaaaggccacaacccaccctaggttgatgtatgggagctaggacagtccccatggcaatggggctggagcatccctcatctggaagaatcccatactgatggcagggctggccagggggaagagggtagtatctgtgggtcctggcctttcttcatgtgtgcgtgcatatcagcccgtgtggctgactgatgtataggtccctggcatcctggttcatatctgtgttgctgactacagtgtctgtgatgtccgcatgtccaggcctgtttggggttgcctagcgactcttctggcacagggtgtgtctgtggtatacctgtgaggtggttgacaattagtagtttaatcacagggtgtgtgtgtgtgtgtgtgtgtgtgtgtttatgtgcacgcatgtatatgcatcaccacgtagccaggaggggcctgttggggtttgagtcactgggatcttcctggtgagaggtaagagaagtcactgggcttagctgggcctctgaggcctgtatggaactcttggttgctgaggcaaccatggacctgttgctaggagatagctggggaaggcccaaggccgcccagggcagagagaggagacgaagagtttgggacagtgggggaggagatgggaagggatgggatttctgggtcccagagcgggtgggatactcacgcacagcttcttcactggtggggggtggggcacacattatttctcactggtcatgatttacaagaagaaaaataaaactgcttttggaaccacaaacttgtgaaggctgttgagggccaggttgggggtgctgtcccctcacaacagaagccctgctttctctgcccatcgcctgctggagatgccttctggaccccagttccttgagccccagctttaccccagctgaggatgggcagtgccattgttcattgttctggaacattctagaacctccaggcaagggctggagccagggctgcagagcattcctcggctcagctggggcagcgccgccccatcccccagtggtcctcatgtggaggctggcactaggcggggttttcctggcagccgcccaggcttgtgtcttctgtcgcctcccagcccacgacttgtcaggccgcctggctcggctctgcagccagatggaggccaggcagaagga

SEQ ID NO: 17165 - DNA, 2300 bp, Homo sapien
ggttcacgctattctcctgcctcagcctcccgagtagctgggactacaggcgcctgccaccaggcccggctaatttttttgtgtgtgtgtatttttagtagagacggggttttcaccgtgttagccaggatggtctccatctcctgacctcgtgatccacccgcctcagcctcccaaagtgctaggattacaggtgtgagccactgtgcctggccaagtagagtaattttcatatgagtataacaacaaccaaaaaataaaattaaaaaacccttccatgtaaggattaaacagcacatcagatgtaaccaaagagagaattagtgaactggaagacagactggaagagattacctgaatgtatcaccaagacacaaagagatgaaagatacaggagacaggttaaaagacacagagtacagaatgaaaaggtctagaacactcctaatcagagttggcaaaggagagagcacagaggacagaggaaaaataatatctggatggtttctgagaactttccaatatgataaaatacgataaaagatgtgaattcatacatacaggaagtacaacatattgagcagaataaatagaataaataaacatctagatacattgtgacaaaactacaaaacaccaatgatatcttaaaagcagggagtaaaaagagatcatctacacaacaatgaggattagactgaggagacttctttacaaccaacatgtatcaggcctattatatgcccacactgtcctaggtacttagaacacaagtatgaacaagccaggcccagcccctaccctgtggagctacagaacctctaacagggatcgcagatgtgcagtaacaattatagtgtgatgagcgatcctggttggagggcaaaagaatcggcaagaaaacaataccatagaacagcattatgaagattttcctatcccacgtaggatccacacagggactggcccccaagcacagatccttgctggcagcctgagagtcactcggtctaacttggtttcaaggcaactccaccagcctttattaaataaggctctgggtctctgggtactggctgcctgctcacactttcccttacagacatctggacccctcccttaccccacattataagcaaggaggaagaagaggacccgaggctgggaaacgtggaggtggcagttgggatcaaacatcctacatgtttaccaagaccaggagggcttttccctccaagggacccttgggacagcagctgctatgttcacgcgtccttccttgggacaggggacagactagatgtcctaagactggcagcttcctctctgggacccctgagagaagcggagacaaatggtcctcctcagggccttcttcaaggtcctggacttagtcccagtggccacaggctaggtagcagtgtgcagggccctgagttctgcagagcttgcatggagagcaggcgttacgctggaaggaagcccaggagtgtcagtaatggggaagcgtgccctgaggcatggaatgctgccggtgatcaacaacagcttcaactgtagactctgtctaggccagggccaactctccgtaccagcatcaacatctctctgccctggccccattccagggttcattaagtaaagcctgctaggaagctctgaaccccctgccatggggcaggaactgtgtcctatttagccttatattccctgtgcgtggacaggatagctctatcgggcgcttattcatgtaagaggtagggtcctggctgagaggtgaaggatttggcgagagggcatgggggacagagacagaggagtgaagtctggggagggctgggaagctattcggagaaggctggaaagacgtgaaggaagacgagcagaggagaagggaagggggcttctcacagtcggggcgatctggtctggaggagggaggggccgccagtcgccctggggaccgtcaccttgtcccactagggaactcggggtgcggccctcgccggccccgggccagcggccaggtccccgccctccgcgggatttactcctgtcccgcctcctcggatttagcccaggcagcctgggaggttccgcagtcgccgcttccgccttgaccaggtgagggtccggaccgagcagggggcccgggctggggagagccggcggagcagccgtcgctgggggcgcgtccggggggcgctgggcctgtcctcttctcctgcgtccttccctcccgcagccgcgcttcctcctgtctcccttctgcgctccccgcttcccaccgagcgcgcagg

SEQ ID NO: 17166 - DNA, 2300 bp, Homo sapien
ttattcatgtaagaggtagggtcctggctgagaggtgaaggatttggcgagagggcatgggggacagagacagaggagtgaagtctggggagggctgggaagctattcggagaaggctggaaagacgtgaaggaagacgagcagaggagaagggaagggggcttctcacagtcggggcgatctggtctggaggagggaggggccgccagtcgccctggggaccgtcaccttgtcccactagggaactcggggtgcggccctcgccggccccgggccagcggccaggtccccgccctccgcgggatttactcctgtcccgcctcctcggatttagcccaggcagcctgggaggttccgcagtcgccgcttccgccttgaccaggtgagggtccggaccgagcagggggcccgggctggggagagccggcggagcagccgtcgctgggggcgcgtccggggggcgctgggcctgtcctcttctcctgcgtccttccctcccgcagccgcgcttcctcctgtctcccttctgcgctccccgcttcccaccgagcgcgcagggccgggtcccccagggtcctgggctttctccttcccaacccaaccctgttcgcgcccggttctgagtccacctgcgcgtttccaactaggcccagcctcgatcctcttcttcctccttgcttataatgtaggggaagggacgggtccaggagtgtgctagggaaagtgtgagcaggctgccagtacccagaggcccagagccttatttaacaaaggttggtggagttgccttgaagccaagttagaccgagtgactcaggctgccagcaggcatctgtgcctggggctgagctcaggtaggtgtgggactgtgtacctgacagcctcagtggctccataggcagcacctaagcctagcggccatcacaagtgcctgatttgatttcaaatgttgctgcctccggtggaggagaggcaatgactgtggacctcttttggcttgaggggtccctatgcccccatagctcaggtatgctgtgtgcacactgtacctcgatgtctgtgtgttgtgttcatgtggacctttgtgtcttagccgtgtggggcagtgtatctaggtgtttggaggcagtgaactgccatgtcccatggatgtgacacgtatgtacaaggaacatctcatggaaggacacagatgagcctgggcgttttgtggccgcatgctgaaatgtctcagcgttaagacgacatatatcggccgggcgcagtggctcacgcctgtaatcccagcactttgggtggccgaggcgggcggatcacgaggtcaggagttcaagaccagcctggccaatatggtgaaaccccatctctactaaaaatacaaaaaatagccgggcatggtggcacgcgcctgtagtcccagctacttgggaggctgaggcagaagaattgcttgaacccgggaggcggaggttgcagcgagctgagatcacgccactgcattccagcctagatgacagagcgagactccgtctcaaaaaaaaaaaaaaagaggacatgtatttgggagtctcggccatgttttgcagtatatctgtaggtctcagtgtgtgtgtgtggcagcatgtgggaggcagtgtaccttcgtgtgtgtgcgtgctctacctacatgtctgaggtatggtgtggttgtcatatctgagcatctccagtgtgtgtggtaggcaaacatgtctcatgttggaggaagggagatgtctcatgttggaggaagggagatgtcgtctcaggtgtgtatgagtgagtttgtgccactgcgtagctcaggtctaaaagggcagtgtttctgggtgtccgggtgtgtgatgtgccgtgatatttcagagtcaggatggtaacatacctggagtctgtagtaggagcaggcagtatgctaaaattgcaggtgtgagcagggcaggttactcagcggtgaagggacagagtacccggatgcctgggcacggggaacattctatctgggatttgtgtgcgtgagtggcagggatcctggctgtctctgctgtgtccctgcctctgtacctgagtgtttctaatgacttgcaggtggagctggagacctggtctctctagggcctaccctgagctcaccatctgaaggagagtgccatcatccttaggaactccttctccagacatgcttcctgaggctggctccctgtggctactgaagctgctccgggacatccagttggcccagttttactggcccatccttgaggagcttaatgtcactcggccag

SEQ ID NO: 17167 - DNA, 2300 bp, Homo sapien
gaccggcctggccaacatgcagaaaccctgtctctactaaaaatacaaaaattagccgggtgtggtggctgtagtcctggctgcttgggaggctgaggcagaagaattgcttgagcctgggaggtggaggttgcagtgagccaagatagcgccactgcactccagcctgggtggcagagtgagactctcaaaaaaacagaaaaaccagagtgacccaaaggtccagtggcagagccaaggctgggtctgtaggctccttcctcccagtccagtgctctcactgcatttccatccttcacctcaggtggcatctagggcacagggggaacctccacatggagaaccactgcagtacgtctcacgtctcttctctgtccagaccctccaacatttcccatctcagggtataattcagtggactaaaaggccatgcgtgacctggcttcttgtgacccctctgaccttcccctcattaactccattccagtctcactggtcttctgcctcaggacctatgcccttgctgttccctctgcctgaaacacttacccagtaatctgcacagctcagtccctcatctcctttaggttctgggtcaactatcatcttctttctttctttctttcttttctttcttttttttttttgagacggagtcttgctttgtcgccaggctggagtgcagtggcaagatctcagctcactacaacctctgcctcccaggttcaagcgattcccctgcctcagcctcccgagtagctgggactacaagcgcccgccaccacacctggctaatttttttgtattttagtagagacggggtttcaccatattggccaggatggtctccatctcctgacctcatgattcgcctgcctcggcctcccaaagtgctgggattacaggcgtgagccaccgtgcccggcctaactatcgccttattggtgatgccttcgccttattggtgatgtctaaataaatatttatttatttatttatttattttgagatggagtctcgctctgttgcccaggctggagtgcaatggcgtaatctcggctcactgcaacctctgcctcccgggttcaagagtttctcctacctcagcctcctgcatagctgggactacaggcgcccgccaccacacccggctaatttttgtatttttagtagagatgggtttttgccatgttggccaggctggtctcaaactcctgacctcaggtgatccgcccacctcggcctcccaaagtgctggaattacaggcgtgagccaccgcgccccgccacgatctttctaaaacacacatttgaccttctttgttctaaaaatgtctcggtggactcctcgctgctcgtggggccaaatcgcagcttccacacaacccgccctgtatgtggactgcactccgtttctaaactcatctcttgcgccactcagccagtggcccccaaggcaggactggtcctggctcaggatccagtcgaagacactcatctcgggggtcttttctgaccgcgcttcctcctctggccctctaggcggcctgagcacgctcactgacaccgtttggcggcctgtcacccgcgtggctggggcacctgcagaaactgctgtcgctgcgaggtgcccgtgtgggtcaccgctgtgccagggagagaagacggcgaggtcgcccctgggaggcagaaggcgagccaggagccagtcctggaagccaatgagtgagtgtgaagggtgttccgctgcgtcagcgaggcccgactgcccttgggaggaggagcccaggggccagcgcggcccgggccgccctcgcctcccacccagggcgctgagcacgcacgccgccggcctggcggcgttcgcggggcccgggaccagccgccgccttctccaggcgctcctactctctgggcatctgcagtccgagcggaaggggcgggaacgtcggcgacgccgaggagcaaagcccacgatcggcttcccggggcagcggacggctgccttcctcccggcgcaaacgcaccgcccaggagggggcgggctcggcgggtcggggggcggggccggggtccgagctcgggcccgcctccgcctccgccagctcctgtgagctgccgagtgctaggcacccgggctcttctgggggctccaggtgagcgggggcacagaggggtcagggagaccgcccttggggtggggctgtcggtctgaccgcgggtccatctgtcctgccgtcggcccacagcctcctccgcaggatgggagaacaaagggagggggcggttctggggccccc

SEQ ID NO: 17168 - DNA, 2300 bp, Homo sapien
cttgccttcagtctctcaccctcggtctttttacatctttctcttctgtatctctctccttggtgtttctcatttctttctctctctccaaatgccttccccaaatttcccccttaagccttctgtctctctctcctgtctttccccatcactgtctcccccattttctctcctcatctctgtctgccacatcttgctccctcctccttctccctatccctctgccttctctctccattcctgcccaggcctgactcccccagccggggagagttgagggacgggggctcaggccgcaggcccccccttcctgcagtggtgaaaatggcttggctgggaaggggagaaggagggggagggggagatgggaacacacggggtctgtgggcccattcaaaggatcattcatggactggagagaggcagagacaaagagaccaagacgcagagacacggcgagagcatccctaggcggagacacgcagacagagcaggctgggggaaaccaggcgcagggagggagatggggagagggagaccccagtggaccgccacgcagccccctccaccgacccggcttaggtcctacctggctcagccctggggccgtggtgcctccatccagggctccgagtggggggcgaaaggccttcgggagggggcggcggcctctgagcccccgcggccccgcaggcccagcccccgcccgcagcgcctcacccggcgggggagggggatcgccccagccccggggggcggggccgggatccagtcgatccccgggaaaaggagagctaggggatgggatcagggggagcccgagaacagggaaccccgcagtagggacgatagagaaaggagggggcaacgggacaggactagattgaggatccgctggttccgtgggccggcttcgagggaccagaaggcggtccaggcggaggatcctaaggatcgggtgctggaggaggagtccacgttaatccccaggggcccggggcccgggagcgcaggatccgcggtgcaggggcagggatccagccggaatcctcggggagggggagggatctagtcgatcccgagggcgggcgtgagggggaggtccggggagtcagaggagggcgggagccgagtccagagccccggggcgggggtcagcgcggatcctaggagggaaggcgggggtgaggggaggcttcgagggacgctcagcagccgggaggcccggactcctggctccgcgcgccagggccggcccgccccgcgtccatcccagcccgagagtgatgatccgccggcggagcagccgcagcagccccgcgcgtcaccgcgcggccgcctcccccgccccctgccgagagagcggcgcacaccccccgctcgcaccccccgctcgcacccgcctgcccgcccgccctccggagaatggggggattggagatggtgggaagaggcgggagcggacagacggacagatggacgtagcgggccagggcagggtggagacattcccccggatctcccaccctcggggctctcgcggtctcggagggctggcgggggggagaatatcttaactacagggggcggggcatcatacaaagaaggcggagccttcagacatgggggaggggccatttgtgcagtgggcggggtttactggcaataggtggggctttgctatctttcgggccgcctctttttggtagtgggtttgatttgaagctgaacaggaggagcctgtggaaaaaggggcggaactttgagagaagaccgggatctttggaaattggccggagcatgggggtggggggttcgaagaggcgatcaacttggaaagtgggccaatccttgacgcaaatccccctagtcccgccctcaaccccgcccccccactgcttagctcctctgttcctaattggtgctggtttctccgcccgccagacgtcttcgccactctgcagcggttttacaaaggcgggtgaagagcgcaatgctgaaatgaacacggcccggattgggcgcctgtgaaccttatttgcatgggcggtcgggattggctggcctcttgggtggcctgggcggcgttggtccggtgcgtcctgttctacagctatggccgggccagctgcagctttccgccgcttgggcgccttgtccggagctgcggccttaggcttcgcttcctacggggcgcacggtcagggggctggggacgaagatgggactgtacttggggcgtcctctggggtctgctgcaagggcgtaacctatgggaggtgcccggcctctcgtttatc

SEQ ID NO: 17169 - DNA, 2300 bp, Homo sapien
ttaagggggaaatttggggaaggcatttggagagagagaaagaaatgagaaacaccaaggagagagatacagaagagaaagatgtaaaaagaccgagggtgagagactgaaggcaagagctggggcaagctggaagaggcccacaaaagatgctcccagggagcactacggagaggagagagatgggggggcctccagtgggagggaaggagggagcggagctggtgggaggaggccaggggcccagagtaccctcaagaggagagggtgactgaggcagatcttgttgtggggagggggagggggcagcaaggccatggtagctgagcccagtctggcacaggaaaaggagatcctgggggaatcagccccgagccacctccaggtgatggaggaatagaggagccttagagaagctgaaaggcagggggcatgactgggtgtgtgtggtaaggattcctgtgtcctcatctctggaataaattgacacctgcagagagccacccgcgggctggcgcctggctctgaaaaccccgcgtcagcaaacagctctggcggctggtgggggggcggggggggggcttgccgaaatgacctgggtgtctgcccctccggtctgatcttctcccttggctggcccctgctgccctgagcacccaggcatcagagcagcaactgtagggggggtggcaaggggaagggtaggtgaatggatgggttgggatgggaagagaagaaagctcagtgttgcccccaggacatgggtcacaatggcttgcaaagatgaaaaggtggtggggtccaaggttgcttgaaattgctggaggggggcagtcagtaggctcctgtgatgtctcttcaagcccacctcagcaccccctctcccaagccagaggcctggtcactaaggctaggctttgattggccaacaggcagggcttttagcgttcttggtgcccccaatctccccctcctctcaacatatatacttcttcctctatgttaaggttggggggaactcttgcattctgactcacgcctttgccctccccttcatgccctgaatggaccaccaaaccaagccagccccttcccgtcttcctccagaacccccctccagggttaaagctgcagcccgttgccgaggtaacattgcggggcagcatcccgtcacccggcaaccggctgcaggatcacgcatctgtccctggatttgcccctccagcgtcccctccctactctaaccccagcctcaaggtaccccaacttctgacggaggaaatggagagagtctggggagagaggggtcgcaggcagcacaaatccttagcgaatggtgtgttgaagtggggataaggtgctaggtttgtgcagtcccaagaaaggcctgagtctggcctggggtgggggttcagcgccatgaaattacagctcaggagtaattaacacatataaacaaacctgcctcttccagctaattaatgacttggtatttttgttttctcttccttgtctacctcattccctcccagggaggtgggagctgggactcctgagtccctgaggagaacctgcctgggagggatacatcagctggaagggagcatgctgggtctggagagctgacccgcctctcctctggctgggtcctggacttgaaccacatctgggccccacccccaacctaggcgtctgctgaggggagaagggctgctgggtgggagtggggaggtgtcagggggcctgtgggtgggagaagggggcaacttggtctgaattccaggtcactaaccacttgtctcttctgtttccccattcctttctgtctgccccatccaatttcccttgccctcttccacctctgtatttttctgtctgtccgtctgtctgtatcctgcctccctgcccctctcgctccaccccccgcaggtcgggcctgccttcaccttctcccatttccttccccttccccaccccgtgccccctccatggagaggaacagaccccttctctgtccagtctaacccaggtccctccccaaccccctcctccctcctttccccccgcccctcctccctcctggggcgaggggggcctccctccctctcccccccttctctctctctccgaggggggggggtcccagggagggagggggggtcccccgatcagcatgtggctcctggcgctgtgtctggtggggctggcgggggctcaacgcgggggagggggtcccggcggcggcgccccgggcggccccggcctgggcctcggcagcctcggcgaggagcgcttcccgg

SEQ ID NO: 17170 - DNA, 2300 bp, Homo sapien
cacatcctctggaattagtcacccttcagtccaatctggagcaactcaagggcctgatcacatgtggcagtgatcaggggatcctcagggggtatggcgggaaggagcccagtgcagaacccagggctcaggccagtttgggggtgtccaaaactaagctgcaccctggcttcattaagcaggctcttcctcctcctgccacagtaattaggctgggggttgccatggtgactggggaggtgacctagaaaggaattagggcggggaggagaccaagccccagggaccctaggcctggcacccctcacccacagaccagggaccctaggcctggcacccctcacccaccgaccagggtgccatgtggagtggaggcccaaggcctgagtcggaggagacaccaggaccctcccagcagctccagctccagttctagcctcgggagcttgctcttcccagggacaggaaggagatgtgctgtgtgcgggggtgctgggggttccctggatccagcagatgccctaaggagggccactgcccacccccagcctctacggggtttcttggaaagtctgcattggagaagtgccgcggggaaggctggcagagggtggggagggaatgtctgccagggctagctggggagggaggaggggaatccggtcttgccccccagggatgggagtgacatgtcccctgagctccaggccagtcctcagcaggcctgggagctgggcgctgctgcttccggtctgactgtgtccttgtccctgaccccctggcccacctgcccacccctccccacacagatatccgtgaccctgggaagaagcctgtgatgctgtttctccatggcggctcctacatggaggggaccggaaacatgttcgatggctcagtcctggctgcctatggcaacgtcattgtagccacgctcaactaccgtcttggggtgctcggtgagggtgggcagccaactctggggctcgggggagtctgggaggtgggcctggtgggcagggttcctccacatccagcagaatggcttctgggctggactgagctgcccagaaagggggcaggggcgctgtgacacctccagggagccctcttcttctctactcccaggttttctcagcaccggggaccaggctgcaaaaggcaactatgggctcctggaccagatccaggccctgcgctggctcagtgaaaacatcgcccactttgggggcgaccccgagcgtatcaccatctttggttccggggcaggggcctcctgcgtcaaccttctgatcctctcccaccattcagaaggtaccagcagtgtcccagcctgttccacccttcccaaccctgccaactcccccctctccttcaggccggtactcacagcctggcctgaggtctgcctgtcccgccagggctgttccagaaggccatcgcccagagtggcaccgccatttccagctggtctgtcaactaccagccgctcaagtacacgcggctgctggcagccaaggtgggctgtgaccgagaggacagcgctgaagctgtggagtgtctgcgccggaagccctcccgggagctggtggaccaggacgtgcagcctgcccggtatggggtgggagagggctgggtccaggccttcaaggttccaaggaggctgaggtgagaggtgcctgtgggcataccatttggcaaggagggatgggcttctggcccccagtaagtggcctcctcttgcaagccttccttcagtggaggtgctcaatcagagcaggtgagcacagggtgccatgaagtgctttgggatgacttccagagaggccagatctcccaaaggacccactggaggatttcaagtagggaagaagggtcttgcaggtagagggaagcatctgcgtgtgggcttagcaggccacaggccaagaggaggccagtgagcaggtggtgagaccctgaccccttctccccagctaccacatcgcctttgggcccgtggtggatggcgacgtggtccccgatgaccctgagatcctcatgcagcagggagaattcctcaactacgacatgctcatcggcgtcaaccagggagagggcctcaagttcgtggaggactctgcagagagcgaggacggtgtgtctgccagcgcctttgacttcactgtctccaactttgtggacaacctgtatggctacccggaaggcaaggatgtgcttcgggagaccatcaagtttatgtacacagactgggccgaccgggacaatggcgaaatgcgccgcaaaaccctgctggcgct

SEQ ID NO: 17171 - DNA, 2300 bp, Homo sapien
gaacaactggggggcgttttctcccccccattgggacaccagtcttcggtgtgtggaatgtggtattttcccgcgtggaggtgtgctttctcacaacggggtgtgttttcccatgtgcagggtgaggtttttttttgccaccctggacacatgttggccccctcaaagaatttctgtggggatttgtaccccagaatcctgttcccccatcccttctcccacctcctcccctctccctccccctggagaccctggaagtggtgtgttcacatacagtgacccttggccaccagaccacagaggatggagcctgggaagcagcgaggaaatcacagccccctcgcccctgcctcccttgcccctaccccggcgaagcatgttccccccgacgccccccttggcacaagtcagatgaagcacgttctgccggggaggccctcaccttccagagaggacagacacagatttcctgctgggggagggaggagtccacgcatcctgatgctgcctggaagcttattttcccgtggccaggacgcatttctctgagtggaaacaggttcttgcatgtggatgtgtgtttccccaggcagacggcccctctcttcccagcacttccctgcctcccccaggcctcaggcccagcacccagttcctcctcacatggcaggtgagcacagacttctagttggcaggagctgaggagggtgaacaaaccccgagggaggcccggcccttgctcccgagttggggggagggggtgtggcaacgtgccccccgcagaggccacgcatgtttgaccaaagccctcattgtggtccgaggacagccttttccccaggcctcagagcattgctcatccgtgccaaactgggtaggtggatttgagcggaaagactcccaaaatgtgccaagaatttcccagtcccaggcagggcaggggaaactaagggcaagcaggatacagggcgagggatgtggcaggtgagggggctcccgcctgtgccccttctcctcaccatgtctcccccaccctgcctcagttctccgttccccttcatctccgtccccctctttgaagctgtccccatctcagtgtcagaccagccttctcctcagctgaccaccctcctctgacccacgccccctccttgtctgaaagaaaggagccttgaatggtggagggaggcagtggggagaaaggtctcaccggacaggttgggagaatgaggtcagcggtgctggggaacagatggagggggcagtggggacagggcttgggcagacaccagcaggaataatttgaaatgtgtgaggtgactccccggagggccttgggcttgggcatttgggaaaagaatgatgtctggaagggcttaagggacacagtggacgaggggagagtcctcatctgctggcattttgtggggtgttagtgccaaacttgaataggggctggggtgctgtcttccactgacacccaaatccagaatccctggtcttgagtccccagaactttgcctcttgactgtcccttctcttcctacctccatccatggaaaattagttattttctgatcctttcccctgcctggtctagctcctctccaaacagccatgccctccaaatgctagagacctgggccctgaaccctgtagacagatgccctcagaattggggcatgggaggggggctgggggaccccatgattcagccacggactccaatgcccagctcctctccccaaaacaatcccgacaatcccttatccctaccccaaccctttgcggctctgtacacatttttaaacctggcaaaagatgaagagaatattgtaaatataaaagtttaactgttggttgtgcctgctctgttgtggggagggcggtctctaaagaaacaagccctggggaagtgacgagggaggaggggtcttttcagtgaccagctctgaggtctgagaggaagggggagtgtgtgctggggtctggttgccatggtaatgggtctgtttggcaaatgaatgtcaggacccgtgtctatgccgagactggagcctggtgtcgttctataatggaaggacaaaggctgatgggggcagatgtcaaacaggccagaggcccagtgggctggtgtaggcagctagctcagcagaggtatgtgaggtgagaggcatggcctctgccaaggcctggactcaggcgagagggtcagccacgggtccaggactcagggtagccccttggcacactggaagggagtggcctggcaccattgtgacccgttcactcccaagacc

SEQ ID NO: 17172 - DNA, 2300 bp, Homo sapien
caaaaaaaaaaaaaaagaagagaaatattggggcccccctcaagaggtacctcactgtaacatcacagctctctgtgacctcactcctttgattaactcaccatgtcaccagtgaggagactaagttcagagaagctaagggtcttgctcatggttacacagacactgaggatcaagctcatggcctcagatgctccatcccattgctgcagagccagcctgacccaccagaacctcccaccttccccagttcaccatgtgaactcagaaactgagaaacagagaaactcaggccctgcctttctgctacacaattgggatcatatgcacatgcacacacataccacttgagaacaagcagctgtgtgcgtgagcccaggctgagggagctggacttcaccttccactctagacagattcctggaatgtgagcagacggaccgtttacaaatggccctacttctctcattcaactaacgttactgatcattttcaatggattccattcagtggaatctgaatctactctgcatctactctgtgtttggaggctggatgggatatgatcactggcctttctttctgctgagtggttcactgtgtaaacaaatggcttgcagtctccagggcaccacagaccccagtgatgcacctgttttaagtcaaacactctttttggtatattaacaattacatgtattttgtgctttgttaatttcatgtggttttcttgttgttgttgttgttgttgttgggttgtttgtttgttttgagacagtctcactctgtcacccaggccggacttctgtggcgcgatcttggctcgctgcaacctccacctctcaggttcaagcaattctcctgcctcagcctcccaagtagctgggattacaggcgcccaccaacatgcccagctaatttttgtgtttttagtagaggtttcgccatgttggccaggctggtctcaaactcctgacctcaggtggtccacctgcctgggattataggcgtgagccactgcgcccagcaagtttccttccttccttccttccttccttccttccttccttccttccttccttccttccttccttcctttcttgtttttttggagacagattctcgatgtgtcacccaagctggagtacaatggcgagagctcagcttgctgcaacctccacctcctgggttcaaatgattcttctgcctcagcctcccgagtagctgggactacaggcgcgcatcaccacacccagctaatttttgtatttttaatacagacggggtttcactatgttggccaggttggaactcctgacctcaggtgatccagccacctcagcctcccaaagtgctgggattataggcatgagccaccgcgcccagctcgggttttcttcaggtagtagcttaaccgtttttcaccttggagtaagggtgggttggtgggagtgtaggtggttaggttggagaaaccatggctggggttggttcccagcagaggcagccacctcagtgagtcagatgtcagtgtgacgaagtggctggtgggctcaaggaccaccaacacctagggctggagtctggccaggaagaattgggcagagatgggagctagaggacttttgacagggaaatgggcagagtagggaggggctggtacagcagggtgatgcctgaggggacgcagtgtcacccgcccatctagtcaccctagatgctggccccaaagtaaccatggggcaaggcacgccaacaggctatgtaagttgccataatgtctcaaaagaacaatgaaacaggacatatctgatgcatgcttcaaccctgtgacgaccgtgtcagcctctaactaccctatcttcagctcaggaaccagctgtggggttaagcaaacctcgtggagatagaggaacagactgagatctgggatatgtggggaccaggctccaccaagtaggagccaagggtggagatggcggtagaaggggccagcagaatggataaaagctgccacctccacattgtgactctcgctagctcacctcattgtgacctggctcccttaccagcttgtagttatctccggggattggcatgagtgcagtgtgggttggggccgggggtggggggcagaggggggtggcccaggtggccctaggaccccccctccatggaaaaccagctatggcataacaccgtgagatgttgcaatcaataccaagaaagcccccacgatgccgaggacatcttactcctgctgctgggcctcatcgttcttgtcaacattggcatcaacg

SEQ ID NO: 17173 - DNA, 2300 bp, Homo sapien
attttgtttaattttaatttacattttctttttttctttttctttttttcttttttttgagacagagtctcgctctgtcacccaggctggagtgcaatggcgcgatctcggctcactgcaacctctgcctcccaggttcaagcaagcgattctcctgcctcagcctcctgagtagctgggattacatgcgtgcaccaccacgcccagctaatttttgtctttttagtagagatggggtttcaccatgttggccaggctagtctcgaactcctgacctcaagtgatccacccgcctcggcctcccaaagtgttgggattacaggcgtgagccagggcgcctggccacattatctacatttcaagtgctcaacagccacaggtggctgctggtggctactgtatcagacaggaccaactcaggacattgctatcgtcacagaaaattatattggagagccatgctttagagtttagaggaactattccttgtcacccattcttaacatcttcaaagcttccacagagtccagagaacttagttctttttagagtgcctcggaagccaccctctgggaaggaggtgagatgcagggatgtctgatgcctggttactccagactgtgagaaacagcccagtctccagttctcctgatctggcctcttgggtcacagccagatgtgtgtgtacgggaacctacttgcgcagttctgggctgctttggtgctctcgcttctcccagggaccccagctctggttgctgaaggagaaaactctctgtcagtgacgaggaacccctgagtcctgggcttgccaaattgatctctacagttggggagtctcttcttttacaggcctctaattttcctagatgtcctccttaattatcttatccatggacttaggcctatcccgtcctggagacagaccaagggcagaaggaatgtaagaagtcgtggcccaggccgggtgcagtggcgcgtgcctataatcccaacactttgggaggccgaggtgggaggatcacctgaggtcaggagttcaagaccagcctggccaacatggtgaaaccctgtctctactaaaaatacaaaaaattagccaggtatggtggcaggcgccgtaatcccagcttctcgggaggctgaggcaggagaactgcttgaacccgggaggtggaggttgcagtgagcggagattgcgccacagcactccagtctgggcaacagtgcgagactcagtctcaaaaacaaaacaaaacaaaacaaaaatttgagatcccaaagtgttttccctgccacgactcaggtagcagtgagctgaggtgggcatcactaacatgtatgtctctcctatgagtcaaacgtccatttctgggtcaccatctgtgtgctcctgcctaacactaccacttttgggattccaagatgcaccccccccaccccacccaggcaggggtccctatctctccccaggccctagggtggagtttcgctcttatcacccaggctggagtgcaatggcacaatctcagctcactgcaccctttccctcctaggttcaagtgattctcctgcctcagcctcctaagtagctgggattacaggcgtctgccaccacgcccggctaatttttgtatttttagtagagacagggtttcgcaatgttggccaggctggccttgaactcctgacctcaggtgattcacccgcctcagtctcccaaagtgctggggttacaggcgggagccaccgcgcccggcccatccctcattattttttgcgactcagagccatcctattacccctctcaaaccccaaggaatgtttgagtggggttgatatgggtgtgaaaagacacagaataatctgtctccagaggaactacaacttccatcaggcactacttcagcggaacaggaaaggatgtgggggcgtggctaccacgccctagtagagcgggaaactacaactcccaggataacgcgggatttcagcagggccaaaagagtgattgagctctgactggcgacccgacccggcggaaaccacctcgacagcctccagaaaggggcgtggctgaaaatgtaggggcgtggccacgtgggcatcaggaagaagtaacctgttgaatctatttctgctccccacccttactgcttcccataagggggaagccgcagactaataagcctcttccaaaaaagaggtaaagggaggtagacaaggggcggcagcggaggctggctactgcattccgtaggaggagccaacagttactttttacctgctgagtccggtga

SEQ ID NO: 17174 - DNA, 2300 bp, Homo sapien
ggcgcctgctgcctcgggctgctagacgagctcggccgagtgctcgaggccgggacgttgcctcactattttctgaacggccgacagctccgtacgggggacgactccgctgcgctgctcggagaattggcccggctccgcggggacccggcccgggccctccgtgccgcggtggaggaggccaaagtggcccgcaaggggggcggtttggcgggcgtggggggcggggcccattaaagacgctgttcctaccagtggaaagtgcctctgtgggcgagcgggacgtggggggccctgctcgcccctcgccagggggactgactgtgtgccctgggcctgaagccccccttctggaagacctccctgttggttcctcctctacgcccacccgcctgcccccgcacaagttgccccattccagcctcgctattctccacatctgtggccagcactccgcccaggggcagcttccagaaaccgtctgtccccagttcttttggtcatttctcttaagggccaatagaaatgggagaaacatatttgctgaccaaacgcgaaaaggagttatggagaccagggtctgatcaatttggctcacacaacggcagagatatgaaggaggccggatttcgcccaaggctggatctcaccaccccccatcctccatctctccagttcttcccccactttactcgtgcggttctttcttcactaacatcccggccagtagggtctctctcccttctcccagcgtccgccattccatctcccttaggcccaacctctccttcctacccaggggtgcgttcaggaggccttcctgtccctcctcctctgaaggctgagacgtgcggccttgcctcggctttgcctgcttgtaagacacagtccgcactctctacctccaaggaaccccggggttcctcctgcccggcttcaccctcctatttcccagcgtctccgccccctgccccgcccccgggccggctctccgaggagggggaactgctgtcgccgccgccgccgccgcctcagcttcccacagccgctgccgctgccgccgctctgcctggtccagccaccggcccagtgctctgacttcgccggaccggggagctctgcagagacaccctcactccttcccgagggtccgggacgcctagccgggcgtggggggaagctccgtttgcgggggacagggagggaggagcctggagccgaagccagcgccacccgtcgccggatcaacaggacaggacaggttgaggggcgtcgggaaaaggaagagggggtgctataggcaatcccggggaggacgaggaagccctgtagcaggaagctgtgatccgctctgacttgtagggggcctgttcacatctggggactggtgacaacgtgggtgcactcctctcttggggggctggttagattggagggcgtgggatctaaacagcaccagctgtccccaagaaaatttaaggggcagccaggggagaaaaaaacaaaaacaaaaacaaacacggatgctcctcattttgaggtggcggaaggccctccagtcaactacctggtgtatccactaggaagggtggatttggaggtgacttcaaaaggagcggagggtgtgaaggtgaagaaagggtcttggccgctagaattctatgctactagacatgggggggacttggtgaaaaaggtattatccagccagagggtctgggagccctgtcttactgaacctgggcaacctggatattctgagacatattttggggggatttcagtgaaaaaagtgggggatcccctccatttagagtgtagcaaaggaaaaaacaccaaggttgggttccttcctgacattggcagtgccccagtaggggtgggatgagcgaatattcccaaagctaaagtcccacaccctgtagattacaagagtggatttggcaggagtgtgccccaaaatacagtggaaaggtgcctgaagatatttaaaccacgtcttggaaatttagtgggtcttggctttgggataggtgaagtgaggacagacactggagaggagggaaaggggacgttttcaataggaggcaaaactcgagggtgggatccactgaggagtacataggctgctggatctggtggagccagcactgggcccacgggtggtaactggctgctgtggaggggggtacgtgagggggggggtctggggcttatcctcaggtcctgtgggtggggcagcgagtcggggcctgagcgtcaagagcatgccctagtgagcgggctcctctgggggagcc

SEQ ID NO: 17175 - DNA, 2300 bp, Homo sapien
taagggccaatagaaatgggagaaacatatttgctgaccaaacgcgaaaaggagttatggagaccagggtctgatcaatttggctcacacaacggcagagatatgaaggaggccggatttcgcccaaggctggatctcaccaccccccatcctccatctctccagttcttcccccactttactcgtgcggttctttcttcactaacatcccggccagtagggtctctctcccttctcccagcgtccgccattccatctcccttaggcccaacctctccttcctacccaggggtgcgttcaggaggccttcctgtccctcctcctctgaaggctgagacgtgcggccttgcctcggctttgcctgcttgtaagacacagtccgcactctctacctccaaggaaccccggggttcctcctgcccggcttcaccctcctatttcccagcgtctccgccccctgccccgcccccgggccggctctccgaggagggggaactgctgtcgccgccgccgccgccgcctcagcttcccacagccgctgccgctgccgccgctctgcctggtccagccaccggcccagtgctctgacttcgccggaccggggagctctgcagagacaccctcactccttcccgagggtccgggacgcctagccgggcgtggggggaagctccgtttgcgggggacagggagggaggagcctggagccgaagccagcgccacccgtcgccggatcaacaggacaggacaggttgaggggcgtcgggaaaaggaagagggggtgctataggcaatcccggggaggacgaggaagccctgtagcaggaagctgtgatccgctctgacttgtagggggcctgttcacatctggggactggtgacaacgtgggtgcactcctctcttggggggctggttagattggagggcgtgggatctaaacagcaccagctgtccccaagaaaatttaaggggcagccaggggagaaaaaaacaaaaacaaaaacaaacacggatgctcctcattttgaggtggcggaaggccctccagtcaactacctggtgtatccactaggaagggtggatttggaggtgacttcaaaaggagcggagggtgtgaaggtgaagaaagggtcttggccgctagaattctatgctactagacatgggggggacttggtgaaaaaggtattatccagccagagggtctgggagccctgtcttactgaacctgggcaacctggatattctgagacatattttggggggatttcagtgaaaaaagtgggggatcccctccatttagagtgtagcaaaggaaaaaacaccaaggttgggttccttcctgacattggcagtgccccagtaggggtgggatgagcgaatattcccaaagctaaagtcccacaccctgtagattacaagagtggatttggcaggagtgtgccccaaaatacagtggaaaggtgcctgaagatatttaaaccacgtcttggaaatttagtgggtcttggctttgggataggtgaagtgaggacagacactggagaggagggaaaggggacgttttcaataggaggcaaaactcgagggtgggatccactgaggagtacataggctgctggatctggtggagccagcactgggcccacgggtggtaactggctgctgtggaggggggtacgtgagggggggggtctggggcttatcctcaggtcctgtgggtggggcagcgagtcggggcctgagcgtcaagagcatgccctagtgagcgggctcctctgggggagcccagcgcgctccgggcgcctgccggtttgggggtgtctcctcccggggcgctatggcggcgctggccagtagcctgatccggcagaagcgggaggtccgcgagcccgggggcagccggccggtgtcggcgcagcggcgcgtgtgtccccgcggcaccaagtccctttgccagaagcagctcctcatcctgctgtccaaggtgcgactgtgcggggggcggcccgcgcggccggaccgcggcccgggtgagtgcggctggggcggggtctcccggccagaggtttctctgcctgggagattgaggccagggactctgaagaatagggcccggctgaggggctccccgaaagtggaagggggtgggccaggacgacaaagtccctgccagactgtgcctcagtttcccttctcttttgtccataacccggagtctccttattttcgaggtcaaggggaaggcttgaggggctgcctggcgccccgaaagcctcgtagttcctgctcgtccccc

SEQ ID NO: 17176 - DNA, 2300 bp, Homo sapien
ggaagggagcccttttggagcactggttctgcctgggtccctctgtgcctaactctccttccctgctcctctctttctccccttcacagtggccatgtaccaggagccttctctccacagtgtccccgaggcctccccttccagtccccctgccccctgaaatgtagtccctggactggaggttccctgcactcccagtgagccagccaccaccacaacctgtctcccagtcctgctctcacccctgctgccacacacatgccctgagcagccaggtcccactaggtgctctaccctgagggagcctaggggctgactgtgacttccgaggctgctgagacccttagatctttgggcctaggagggagtcagagagggggatgtctgaagatggtcctggctgatcacttctttctttccacactcacacaacgccatgccttttcctgagatggcgctgggagttcccacatggacagccagggcataaacacttcccaccccggctcagccagttcctggagtcctgtgccccttttcattgccactgagccatttctagattcactggagctcaggattcatgtgtccttctttccctactctaccttctaccttggtctggacacattctggaacactggacaccctcgccagggccacttctgcactagggctctgtgctggaacccaggcatgctgccagccttttctctggatctgtcaggcctctgtcattgactcagatggacccctggtttccaagtagaaagaggctagatttgggccttgtctagctgttggctttggcctgaaccggaaccagtctcagatgaccacgggtttaaccttcttatcccagagacacccaattctagagctttatggagccgtacttccccctgaatcctagctctaggacatagatcatgactctcagcccttttacccaggatggagctggggcctgtatagccatattattgttctaagtaagttctagccccaccctcccgccttcttgagtgatacctattacggatgagttctggaaaagacccagctatgattcataaaaacacttctggatgaatcaagaaccatttcttgtttttcctagataattctctaaaaatatgattcttccatatagaatgctaagcttatttttacatgcagtttctagctccttcaacccagctgaggtcgtgccagggagacagagtctggagaagggcagaggaattttggaaggatccctggctcatagtagggaagctgggatgggggaggggtcaaaattatggcatgactgaacctgcatctgtgttgggtggacatgaatacttagctacctcagcaggaattccttccaggtcccctttaaagctgaggtccttagagtaatatgtccttaataaaaaggacaaatggatacagccttgaccctcccagtgaggagaccccaattcagcaataagtctcacccttctcccctacaggtcaggccaagaagggtgaaggcctcttgcactccagacctcatacgccccaacagcttctaattggatagaacttgctttaccttacagctcacaacctcagctgggttttaggtacccaaaaagggcctgtctagattttttcagaaaaacgtggagtgctaggggcagcctggaaaagatggggaacctgctagtgaactaggagggagacttccatagcctcagacttggatagggtaggctgagggggccctaagggagggactaaggctccaaggcaggtcacttttccttaggctgttctacttctggcttgttgcaagaggagtagatgccccctcacccacacaaaccccactcagtctccacccaactcctggcactgctcccaggggatcgggtctccactccagctttctcaattaaagacgatttatacaactgaagtgctgtctgtcatctgtcggtggcgggcttggcagttgctcgaggcaggatcaagtcccgggggcggggcgggtgggctggcggctgtcctccagcaacaggtgcacattcccgggctcctcgtcacttcccctgtgctggcggtcccagcggctctctgagcgaagtcactgagcgagccgccaggctatgaccccaggggctctgctgatgctgctgggggcgctgggggcgccgctcgccccaggtaagtgtaggccccgaaggggcagtgacggggccagcggtcgtggccaggcaccagggctgcacttattctctcctcccccaggcgtccgcggctcggag

SEQ ID NO: 17177 - DNA, 2300 bp, Homo sapien
tgcctgcaggggaaggtggctgcgcggtgctttctctgctgctgactgcctgagcttgcgtttcagttgtctgctcttccctttgttttttggggggtttttttttgagacggagttttgctcttgttgcccaggctggagtgcagtggcgtgacctcgtctcactgcaacctccagctcccaggttcaagtgattctcctgcctcagcctcccaagtagctgggattacaggcacgtgccaccacgcccggctaattttttgtatttttagtagagatgtgggtttcaccatgttggtcaggctggtcttgaactcctgacctcaggtgatccacccctcttggcctcccaaactgctgggattacgggcgtgagcccccgcgcctggccttgctcttccctctggacgagtctcccagcaagaggtgaggtaggagttgtgattctgccgctttttaagtccagatccctagggcatcaggtctctgagtaaggcgtgggaccaggcctcctggtcttgtggcctttccagtgccctccagaggctggagcaagctggcagttgtgtatgggtcagtggtcttcaatggttgcctggcagctgcgccagaaacccccttctaagatttatggggctggaaggatgtgaggatgtcctctcctaatttgaatatctaccagcttaggtccaatttttaaaaactcacaaattattttgatatgtaaatgagaccattgtgataaatgacaacatgcaaatctttgacttcctctgagccctggagattgggccaaagggacttgagagtgctgtgacaggcttccctgaacctatggactggacctgtgctactatattgtttggaggtgaattgggaatatgcaaattatcttgtcactgtacttctctgggcccgcagaacaaggctctgcaataatctgcgtgacctcccaggtttgactggacacagctaaacaaataacctggcagaggctccggggaggggtctgggctcacccaggtgtcctctctggccacagtactgcacccctccccacttcctgggggcttttcctctcacttccctccttgaggaccctcttctgctcctcctctaggttcccctgacataatttctgtttctccgcagaaggaagaggcccagcagaagggactcgctgagccaccccccgccccactccatgttggctgtgctctcaggtgagaaggtacccagaggcctacagtgaggacaaagtagacccaaggcagcaggccagcaggggcggccattttgtctaggctggggagttctgtgaaatggctatcaggagttgtggagcttcctcctccttcccatgagagagatttgcctcacttacatctctagtctgtgacttcagaggtcatgaccccttgaccttcaccatgacctgaggtatctctggcctcttccagcctcagaagtgagttagacatactggtcttggatgctggccagacttgggtggctaagggccaacccctgacttctgtgaccagaagtgattcagccttccactagtttctgaccagcagctcctgatcctctctctgcctgattttagaagcccctgccctctgcccagcctctgagactctacccggcctcttctcccactgtctaggctggcaccatgcccccccctgcagaggtgacggacccgtcccatgcccccgccgtcctgcgccagctcaatgaacagcggctccgtggcctcttctgtgacgtcaccctcatagccggagacaccaagttccctgctcaccgcagcgtcctggctgcttcaagtcccttcttcagagaggccctgctcacttcagccccactaccccttccaccagctactgggggcgccgcacccaaccctgccaccaccacagctgcctcttcctcctcctcctcttcctcgtcttcttcctcttcttcctcctctgcttcttcttcttcttcctcttcctcttcctctccccctccagcctctccccctgcttcttccccaccccgggtcctggagttgccaggagtcccagcagctgcgttttctgatgtcctcaacttcatctacagcgcccggctcgcactgcctggtggtggaggggacggggcagctgtagcagagattggagctttggggcgccgtctgggcatctcccgccttcagggcctgggggagggaggtgatgcctgggtacctcctaccccagcccccatggccacctcgcagcctgaagaggacagctttgggcccgggccca

SEQ ID NO: 17178 - DNA, 2300 bp, Homo sapien
ggatgctctctcggattgaggaaggggaggaagcctcagatgctatgcatctgtatgatgccacaggttccagagacatctgggtacaccattatgaattctatttgtgggtatctctgagacagctaagttttaggaaaggaggggaaatggagcaaccaggagctatagggagggagtactaggcccctggcccccacactcaccatctttccttggactttctcctctcctcctggctcagggagcctgggcccctcagagctccagccattgtgacatggttggagtgggggtggggttcttccctggaactctcctgaggtggtagcacgcctattttcccgctgagtccaactctgcttcttttctttctttctttctttttttgtttgcgacgaagtttccactcttgttatccaggctggagtgcaatggtgtgatctcatctcactgcaacctccacctcccagattcaagcgattctcctgcctcagcctcccaagtagctgggattacaagaatgtgccactacacctggctaatttttttttttttttttgggacggagttttgctcttcttgcccaggctggagtgcagtggtgcgtgcaatctcggctcaccgcaacctccacctcctgggttcaagcaattctcctacctcatcctcccaagtacctgggattacaggcatgtgccaccacaccccgctaattttttatttttcgtagagatggggtttctccatgttggccatgctggtcttgaactccttacctcaagtgatccaccccaccaccccccgcctcccaaagtggtggaattacaggcatgagccaccgtgcccagcccaactctgcttcttttctatttatgtctccatgactccaaagtttgtctgattcttttattctttttatggctagctctgtggctttacattaatttgtttatttatatcttgcatggtttcagagaggtttttttgttgttgttttttttttgagacggagtctgtctctgtcgcccaggctggagtgcagtggcgagatctcggctcactgcaagctccgcctcccaggttcacgccattctcctgcctcagcctcccgagtagctgggaccacaggcgcccgccaccacgcccggctaatttttttgtatttttagtagagacagggtttcaccgtgttagccaggatggtctcgatctcctgacctcgtgatccgcccacctcggcctcccaaagtgctgggattacaggcgtgagccaccgcgcccagcctcagagaggttttaaggcaaggagctgtgaaccctggctcctccatctccttagtttttaattttccagcaccagggaggagttcttgggattgtccctgtggagtttcaggaatgtgttttttctgtgtgtgcttccacctggtgttttgttgatgctgtccccagaggccgacaccaaggcctctgcatttatgttcaagtatacagatgtggatctatctgctggtggggacaaagtacccagccagcttcatgtgttcatttgcgctggtggtcgttcgtgtgtgccccgtatgcagggccagggccttctttttccgcggcctgctgagctttcctgcgcattcctggagagggtgtgtgtgtgtgtccagggctggccctctttgagtgtgccgaccctgggtctgtgagtcccaccgggcctgattatgagtctgccatgtcatgtctgcaccctgagagcctgtgtgttatgctttcaggcagtgtgcaccgctgagtgaagggcgtgcaggaggaagggcggagggagccctttccctgggggtcggtggtcttgcgcccctgccgggatgctgcagcccggcccgcgccccgctcggtgtccacccgcccggtggcccagcgcggcgcagtgtcatgccgcgggggtcagtcctggggaaggccgtcgggcgctcggagctttgtgtcggtgtcggctgcgctgcgccggcctcctctcggcggcggcggcggcggcgctggggggggactgtttccgggggtgggggtgggggtaggaccggggcggggggagccgatgatgtcagcggcggcggcggcggcggcagcggggccgggccggggccaggcgctgggggggccagggccggagctggagccggagccggagctggaggcgggcaaaaccggagcggccgggggcggccacggtgatgagccgggcctggcggacgcggcgccatcgcagtcaggtgggccctggggcgaactgggcagggcca

SEQ ID NO: 17179 - DNA, 2300 bp, Homo sapien
gacatccgaggccgggcctacttctatgccctgctcaacgtcctcagcattggatgtgcctacagtgcggttcaggtggtgcccgctggcaacgctgccactgttcgcaaaggttcttccaccgtctgctccgccgtcctcaccctctgccttgagagccagggtctcagtggctacgactggtgtggactgttgggcagcatcctaggactaatcatcattgtgggacctggactctggacactacaggaggggatcacgggtgtctacaccgccctgggctatgggcaggctttcgtgggaggactggcgctgtccctggggcttctggtctatcgttctctgcactttccctcctgcctcccaacagtggccttcctatctggcttggtggggctgctgggctctgtgccaggcctctttgtgctgcagccccccgtgttgcccagtgatctcccgagttggagttgtgtgggggcagtggggatcctcgccttggtctccttcacatgtgtgagctatgcggtcaccaaggcccaccctgccctggtgtgcgctgtcctgcattccgaggtggtggtggcccttatactgcagtattatatgctccatgagactgtggcaccttctgacatcgtgggggcaggggttgtgctgggcagcattgccatcatcacagcctggaacctcagctgtgagagggaagggaaggtggaggagtgagatagaacttgggagcccgggggttgggagggacagggataaatagaggcaaagactgaagacaaacatgggaggagaagtgactggaaaagaactggtgtgggagagggatacctctcagagtcaagggtgacttggggacttggtggagagggactacctggaagacctggggccagcctgggaccaagggatgtggagaccaggctgggtcctggaatcagggcataactaaggggtaaagtctgaggagcagatccaaacggctgaggcagggaggccgtgggccacggggaggacttcactcagcagcaaagagaagagcattggggctggagtgttccggcaaagacagagccagcagctgcggtgggggaggggagcgtgcctccccacccctcccctcacggcaaaggtttcctttcctcgtgcttgtgccccccccttggggtggtgacgtgacattgacatcaaacaaggattactctgaatgtggcttgcagtggtgtcgtctctgctttggagggagagtggaaagtcctacgaccgttctcattggagaaccccttgggatccccgccccccattttattcctgaaatattctacaaagtggaggatttcctaatgttcagatgccttgaccccaaatcccccaggactttcgtggcccgccccatggctaatctgcttttctcggattgtcgcggtcccgtgatctctcccggacagtggccaccctccttccagagcaggcctcccagctgaagtctcttcgagaggctcaggccatggatctaggatcatggctcggtacagcgcggcattacaggccaggagatgcccacccgtctccgggggccgtttgacaaacatcggctacttccggacaagccactggtcctgccatcttggtttgttcatgcatattcagcaagagaactgcatattcatgagcaaccgcccttccccgggaggacccgccccgccccgccgccattaccgattcgcagagcagaccattttccagctggggggggctacgaatgagaggcttttgctgaagatgaaaccgttgtccaaactagaatgaaagcggcccaattttaccctcgagtcttcaaaccttaagcctcagtgcaaaagggagcagcgaggagaggcggtgggattaaagaaaaaaattcttctctccctgtcacttcaaaaggtcgcccaaccagcgagcggggggtttacccacgactctggctcgcaccccttgcgggcctgcgcaggcggccccgtagcgcaagggagggcgggaaaggaaggggcggggacgcgagggcgaatctataagaagcgtcgttcagcgagttcgctgctcagaagcgccgagagcgcggccgggacggttggagaagaaggcggctcccggaagggggagagacaaactgccgtaacctctgccgttcaggaacccggttacttatttattcgttaccctttttcttcttcctcccccaaaaaccttttccttttcccttctttttttttcctttttgggagctgaaaaatttccggtaagggaaagaa

SEQ ID NO: 17180 - DNA, 2300 bp, Homo sapien
atagctctcccctagggctgccctcctctctctggtctctcctcctctcgcatcagttcttcatagagcaactacagcagtagttttttcaaatgtgctgtcactctgtttataattgtcaacgactacctactgaaaatggaattaagtcctgactccttaccataatatacaatatcccatgcttctccagcctatttctgtaacactcttctctcatccactaaacctcagccacaccggccgcctttcaccctgtaggacaagcccaagttcatttctccctcaggccctttgcacttgctatttcctctgccggaaaagctctcgccatccaaactatggcttcgacgactggctgcctctcatcatttgggtaatgtcttctaagataggccttcccagaccctgacgccatcccatctaaagtagccccacctcgacgggcgcggtagctcacgcctgtaatcccagcactttgagaggccgaggcgggtggatcacctgaagtcaggagttcagccattgcactctggcctggggaataagagcgaaactccgtctcaaaaaaaaaaaaaaaaaaaaaaagacgggggagaatcacctcagggcaggcgttcgagaccagcctggccaacatggcaaaacccctcctctactaaaaatacaaaaattagcggggcatggtggcgcatgcctgtaatcccagctactcaggaggctaaggcaggagaatcgcttgaacccgggaggcggagattgcagtgagccgagatcgtgccattgcactccagcctgggcgacagagcaagactccgtctcaaaaaataaaataaaataaaaataaaaaaataaagtagccccagctcagtgactctccatgggattaccccttttcactctattcgagacaaatgccattaactgaattatctcattcattcattgtattcatgtttactgcttgccctttcccacagacagtgctcttgaaggtagggtcctggtctgtcgtgttcacctctgtaacccgagtctcctgtgtcttcaacagagcaggtgctcagttaacatttgtattacagaagaggaggaagctacccgggtttggcttcttaaccaaacttgtaaagactccctaggattcgtcggatcgcctttaacgtcggtaactctggagtgtgaaatcagtcatccttctctccctccttctcaccctccagccagccccccatctcggacaaagcgctacgcctgctcaactctttgcaaaatataactctgggaggcccgagactggcgcctacacggccttggcgctgctgagccatgctcctggcccgtcacccataagcagcgagaaagcgccaagtttccgcagcccccgtccggccccgcccgccaggggaggaggggggaaggggaggacagagccgcttaccagttcatccggactcaggactccgaactggactctcttgatggtgcgcagcgggcatgcgctgtcccccgagggggggccacccccgtgcatggcggaggcaggcgcgctgcgcaggcgcaaacctcactacaaaaagcctgcgccgcctccgcctaggtgctcagacctcgtcagggcggccaccgggaaggacctccccgagttgggaggaaaaagccggaggaggggaaggtgggggagggaaggaggcggggaaataaggagcgaaaggagcccttctttcccttaccggaaatttttcagctcccaaaaaggaaaaaaaaagaagggaaaaggaaaaggtttttgggggaggaagaagaaaaagggtaacgaataaataagtaaccgggttcctgaacggcagaggttacggcagtttgtctctcccccttccgggagccgccttcttctccaaccgtcccggccgcgctctcggcgcttctgagcagcgaactcgctgaacgacgcttcttatagattcgccctcgcgtccccgccccttcctttcccgccctcccttgcgctacggggccgcctgcgcaggcccgcaaggggtgcgagccagagtcgtgggtaaaccccccgctcgctggttgggcgaccttttgaagtgacagggagagaagaatttttttctttaatcccaccgcctctcctcgctgctcccttttgcactgaggcttaaggtttgaagactcgagggtaaaattgggccgctttcattctagtttggacaacggtttcatcttcagcaaaagcctctcattcgtagccccccccagctggaaaatggtctgctctgcgaatcggtaat

SEQ ID NO: 17181 - DNA, 2300 bp, Homo sapien
ttatttatttttattttattatttatttattatctttttttttttttgagacagggtcttcctctgcagcccaagctggagttcagtgcccagatcatagctcatggcaacctggaattcctgggctcaagcgatcctcctgcctcagtttccccagtagctgggactacaggtgcacaccatgatgcccagcctgttttgttgcttttttttttttttttttttttttttttgagatggagtcttgctctgtcgcccaggctggagtgcagtcatgcgatctcggctcattgcaacctccacctcccgggttcaagcaattctctgcctcagcctcccgagtagctgagattacaggtgcccgccaccgtgcccagctaatttttgtttttttagtagagacagggtttcaccatcttggccaggctagtcttgaactcctgaccttgtgatccaccgaccttggcctcccaaagtgctgggattacaggcgtgagccaccacaactggccccagctgtttcttatttacattgtgatttcagttttgaaaattttctggagattctaactgcttttctttctttgcatactcttttttttttttttttttttgacagggtcttactctgttgctcgtgttggaatgcagtggtgtgatcacagctcactgcagcctcaacctcccaggctcaggtgatcctcccatctcaacctcctgagtagctgggactacaggcatgcaccaccatgcccagctctatggatgctttttcttgactctctttaagtatattaggtagtactctttgtatcctgaattatctctgtttcctccaatgtcaaattttgtttgttaattttggtctttctttctttttttttttttttgagatagggtcttgctgtgttgcccaggctggagtgtggtggcgtgatctcagctctctgcaacctctgtctcctgggttcaagcaattctctgcctcagcttcccgagtagctgggaactacaggcgcctgccaccacgtccggctaatttttttgtatttttattagagacagggtttcaccatcttggccaggcaggtctcgatctcctgacctcgtgatccacccgcctcagcctcccaaagtgctgcgattacaggcgtgaaccatcgcgcccagccaattttggtccttccttccttccttccttccttccttccttccttccttccttccctccttccctccctccctccctccctcctttctttctttcttcctttctttctttctttttgagacaaggtctgttgcccaggctggagtgtagtggtgcaatcacagctcactgcagcctcaaactcctgggctcaaacaatcctcctacctcggcctcctgagtagctgggactacaggcgtgggctaattttttaaaacttttctgtagagatggggtcttgctcttgcccaggctgatcttgaactcctggcccccagccttggccttctgggattacaggcgtaagccacctgccggaccaattttggtgtttcttttgcatgctgctggtcctcctcagatgcttggcaatcattggtaatgatgggcttcagaacgtgctaccggcacagtgagtgttttaagctgaaggaatttgagaaaaccgcagaagccgaaggatctttcttaccttctcctgcccttcttccctgaaccaggtcatacaacctggaactccctgcccttttcctgaagaagcaaataacagcctcctgcgagaggcgccctccctgcacctgggggaaaggagggtccttatctctgaagacacagggacacagaagaatctgaaccaacaggccttcctgagttccccacctccccgcaggaggtgcccgcacacgcatagccccgtcgctcccgcggccgcacgcaacggacctcgccctggtggtgcacgcccgggctgggcgctcagaggtcgggtgggcgcccactccgttcgctgcgcgcacagcgcccggcgagaggctcggagtttgatcacacacagcgtccggcttcctgtccccagcgccccctcccgccccgtttcccttgcccctccctctccccggcccgatccgcccgccggctccccctcccccgatccctcgggtcccgggatgggggggcggtgaggcaggcacagccccccgcccccatggccgcccgtcggagccagaggcggagggggcgccggggggagccgggcaccgccctgctggtcccgctcgcgctgggcctgggcctggcgctggcctgcct

SEQ ID NO: 17182 - DNA, 2300 bp, Homo sapien
tcgaactcccgacctcaggtgatccgcccaccttggcctctcaaaatgccgggatgacaggcgtgagccactgcacctggctgagcatgatgttttcaaggcacatctgtgccatagtgtgtatcagtacttcactctttttatggccaaataatattccattatatggatagacattttgttgatggacaattgggtttcattttattatttttagttgtactaattcagataatgtatgtttacatcctccatataaaagaagcaaataatatagatatccatgaagtaaaacattaaatcccctcacgcttctccttcagttctactcttctccccagaagtgactgcaggtgacaatctgccctgaatgtctctggccatatacattagattttttcacataacttcctagtcaactatgggcatcataggggatgggtcctcccttgcccggggtgatctatgtgtcttctgggtaaagtgggcgccgaatgttcatatgctcaatggatccctggggagtgtgggggagtcctgtagagagacgtttccttatctctgagcatccgtgttcaggtgtggacgggacagtgagtggctgggaggaagccagaatcaacagctccagccctctgcgctacaaccgccagatcggggagtttatagtcacccgggctgggctctactacctgtactgtcaggtaagccccatctggctgcatgggtaacgcagtaagagagtggcgaagggtttgccaggagagtgggggacaagctacagggctgggagggtgagttggggtttgggtgggatgggatgcctgcgtcgctgaggaaattggaaattgaggcgagggcaggcagaggcctggactcggcctgttgtccccaccccaggtgcactttgatgaggggaaggctgtctacctgaagctggacttgctggtggatggtgtgctggccctgcgctgcctggaggaattctcagccactgcggcgagttccctcgggccccagctccgcctctgccaggtgtctggtctgttggccctgcggccagggtcctccctgcggatccgcaccctcccctgggcccatctcaaggctgcccccttcctcacctacttcggactcttccaggttcactgaggggccctggtctccccgcagtcgtcccaggctgccggctcccctcgacagctctctgggcacccggtcccctctgccccaccctcagccgctctttgctccagacctgcccctccctctagaggctgcctgggcctgttcacgtgttttccatcccacataaatacagtattcccactcttatcttacaactcccccaccgcccactctccacctcactagctccccaatccctgaccctttgaggcccccagtgatctcgactcccccctggccacagacccccagggcattgtgttcactgtactctgtgggcaaggatgggtccagaagaccccacttcaggcactaagaggggctggacctggcggcaggaagccaaagagactgggcctaggccaggagttcccaaatgtgaggggcgagaaacaagacaagctcctcccttgagaattccctgtggatttttaaaacagatattatttttattattattgtgacaaaatgttgataaatggatattaaatagaataagtcatagtctctctctttattggggctcaggggacactctcagggtagctgggggccacgtgaaggggggcgttgcggagcggcacagctggaactccgggatgatgttcaggcttgggggcggggacctccatgcctccagcccccaggtgggagcagaggtaggaaggcacactgcccaggaaaaaaatcaatcctccgcccaaggtacagcagaagcggcctccttggcctaggaggcagacttcctcctgcggggaaatcccttcctggctgggaggagcaggggcccttcctcttggtggcctcggacattcagcaggtgctggcacaggccctggctgggaggtggggcgggcaggagccagcctggaggaggggctgagagtcagcaggcacacgggaacccggaaccctgtgtgctggggaggaatcccgcagtggccggggggcttgaggccgctgctttgtctcttcgtccagagccttatgtaagagcttttctcgggaaacaggaagtcctgcttgccaatttcagcacagggagtagtgcaggccttattccaacacacccggcccagccttaaccccagaactcagccagtttcttgctt

SEQ ID NO: 17183 - DNA, 2300 bp, Homo sapien
cgctacaaccgccagatcggggagtttatagtcacccgggctgggctctactacctgtactgtcaggtaagccccatctggctgcatgggtaacgcagtaagagagtggcgaagggtttgccaggagagtgggggacaagctacagggctgggagggtgagttggggtttgggtgggatgggatgcctgcgtcgctgaggaaattggaaattgaggcgagggcaggcagaggcctggactcggcctgttgtccccaccccaggtgcactttgatgaggggaaggctgtctacctgaagctggacttgctggtggatggtgtgctggccctgcgctgcctggaggaattctcagccactgcggcgagttccctcgggccccagctccgcctctgccaggtgtctggtctgttggccctgcggccagggtcctccctgcggatccgcaccctcccctgggcccatctcaaggctgcccccttcctcacctacttcggactcttccaggttcactgaggggccctggtctccccgcagtcgtcccaggctgccggctcccctcgacagctctctgggcacccggtcccctctgccccaccctcagccgctctttgctccagacctgcccctccctctagaggctgcctgggcctgttcacgtgttttccatcccacataaatacagtattcccactcttatcttacaactcccccaccgcccactctccacctcactagctccccaatccctgaccctttgaggcccccagtgatctcgactcccccctggccacagacccccagggcattgtgttcactgtactctgtgggcaaggatgggtccagaagaccccacttcaggcactaagaggggctggacctggcggcaggaagccaaagagactgggcctaggccaggagttcccaaatgtgaggggcgagaaacaagacaagctcctcccttgagaattccctgtggatttttaaaacagatattatttttattattattgtgacaaaatgttgataaatggatattaaatagaataagtcatagtctctctctttattggggctcaggggacactctcagggtagctgggggccacgtgaaggggggcgttgcggagcggcacagctggaactccgggatgatgttcaggcttgggggcggggacctccatgcctccagcccccaggtgggagcagaggtaggaaggcacactgcccaggaaaaaaatcaatcctccgcccaaggtacagcagaagcggcctccttggcctaggaggcagacttcctcctgcggggaaatcccttcctggctgggaggagcaggggcccttcctcttggtggcctcggacattcagcaggtgctggcacaggccctggctgggaggtggggcgggcaggagccagcctggaggaggggctgagagtcagcaggcacacgggaacccggaaccctgtgtgctggggaggaatcccgcagtggccggggggcttgaggccgctgctttgtctcttcgtccagagccttatgtaagagcttttctcgggaaacaggaagtcctgcttgccaatttcagcacagggagtagtgcaggccttattccaacacacccggcccagccttaaccccagaactcagccagtttcttgcttccgtgcccctggttctcctccccatcgagcccacccctcctttcccaccttcagtcacccctagtgaactgccccagcgatctctgctgtgcttgaccccgagggtcttccaccctcgccctgaccctggacactgcccagcttggccccccatcctgctcctggcacaatgccctctagccagccaaccttccctcccccaaccctggggccgccccagggttcctgcgcactgcctgttcctcctgggtgtcactggcagccctgtccttcctagagggactggaacctaattctcctgaggctgagggagggtggagggtctcaaggcaacgctggccccacgacggagtgccaggagcactaacagtacccttagcttgctttcctcctccctcctttttattttcaagttcctttttatttctccttgcgtaacaaccttcttcccttctgcaccactgcccgtacccttacccgccccgccacctccttgctaccccactcttgaaaccacagctgttggcagggtccccagctcatgccagcctcatctcctttcttgctagcccccaaagggcctccaggcaacatggggggcccagtcagagagccggcactctcagttgccctctggt

SEQ ID NO: 17184 - DNA, 2300 bp, Homo sapien
ctgtcctgcacctggttcccattaacgccacctccaagggtgagcactattttaaataatggctttggggaggggcaataaccaggaactcgggctggcacttgggctcaaggggtccttataggtgaaagggaaagaaccaaaaagcacctgagagtgccaagaagtcctgaccgacacactctcacctccagatgactccgatgtgacagaggtgatgtggcaaccagctcttaggcgtgggagaggcctacaggcccaaggatatggtgtccgaatccaggatgctggagtttatctgctgtatagccaggtaaccccagccacactctgagcttcacagagggcctctttggccccctactgagggttcctgacccctctattcataccaaacccagcagacccttctttcttccctcgttagcgctcctgaggcctcccagaactgagccaggccatcctgttttcttcaacatctcccttccctgccaggtcctgtttcaagacgtgactttcaccatgggtcaggtggtgtctcgagaaggccaaggaaggcaggagactctattccgatgtataagaagtatgccctcccacccggaccgggcctacaacagctgctatagcgcaggtgagagccgtgtgggcagccgaaagcaggacgtctctgaccgggggtagcagtgcagggagctaccgctaggagggaggttggaaacctaaacagaggcgggtctgaggagtgaagtgcagaatgccgggtccttacaggaggcagaggaacggtggagctggagaaggcagggggaaacagggcatctggatggctgtgcttcactgcgaatctactttctctcttttctcaggtgtcttccatttacaccaaggggatattctgagtgtcataattccccgggcaagggcgaaacttaacctctctccacatggaaccttcctggggtttgtgaaactgtgattgtgttataaaaagtggctcccagcttggaagaccagggtgggtacatactggagacagccaagagctgagtatataaaggagagggaatgtgcaggaacagaggcgtcttcctgggtttggctccccgttcctcacttttcccttttcattcccaccccctagactttgattttacggatatcttgcttctgttccccatggagctccgaattcttgcgtgtgtgtagatgaggggcgggggacgggcgccaggcattgtccagacctggtcggggcccactggaagcatccagaacagcaccaccatctagcggccgctcgagggaagcacccgccggttggccgaagtccacgaagccgccctctgctagggaaaacccctggttctccatgccacacctctctccaggtgccctctgcctcttcaccccacaagaagccttatcctacgtccttctctccatctatcggaccccagtttccatcactatctccagagatgtagctattatgcgcccgtctacagggggtgcccgacgatgacggtgccttcgcagtcaaattactcttcgggtcccaaggtttggctttcacgcgctccattgccccggcgtggcaggccattccaagcccttccgggctggaactggtgtcggaggagcctcgggtgtatcgtacgccctggtgttggtgttgcctcactcctctgagctcttctttctgatcaagccctgcttaaagttaaataaaatagaatgaatgataccccggctccatttcccccactgcctcgcctcagcccggtcctcgtacggggatctcccgccctcctggctctcctgtggcgcgccccccgccggatcaaggtactggggatgccgctagggtcaggcccgcgagcgcggagaagacagagcgcggcgcaaaagggaaagtggcggggccgccacgcgcggccgggcggcggatgtgcgcaggcgcagcctcgcgtagcgctctgggctggccagtcccgtggcgccggcgtcctcgggtagacgggaccgcgcgcttggtggccgcgccggcgctcttcgccgggtgtgacgtactaatcgtgcgccaccgctgccggtgggcccggggctcgcgggaggggaaggaggagggggggaggagtggcggcggcggcggtggcgctggtggcggcggtggcggaggtggaggtggaggtggaagctgaagctgaagcagagccagaggcggcgcggcggggtgctcggcggcgcggcacgcggcccagaagcgttggaatcctgaattgagacggctgcgccta

SEQ ID NO: 17185 - DNA, 2300 bp, Homo sapien
attccaagcccttccgggctggaactggtgtcggaggagcctcgggtgtatcgtacgccctggtgttggtgttgcctcactcctctgagctcttctttctgatcaagccctgcttaaagttaaataaaatagaatgaatgataccccggctccatttcccccactgcctcgcctcagcccggtcctcgtacggggatctcccgccctcctggctctcctgtggcgcgccccccgccggatcaaggtactggggatgccgctagggtcaggcccgcgagcgcggagaagacagagcgcggcgcaaaagggaaagtggcggggccgccacgcgcggccgggcggcggatgtgcgcaggcgcagcctcgcgtagcgctctgggctggccagtcccgtggcgccggcgtcctcgggtagacgggaccgcgcgcttggtggccgcgccggcgctcttcgccgggtgtgacgtactaatcgtgcgccaccgctgccggtgggcccggggctcgcgggaggggaaggaggagggggggaggagtggcggcggcggcggtggcgctggtggcggcggtggcggaggtggaggtggaggtggaagctgaagctgaagcagagccagaggcggcgcggcggggtgctcggcggcgcggcacgcggcccagaagcgttggaatcctgaattgagacggctgcgcctaaagacagcaggagtggcggggccgccgccgtcgccggagagatgagccgggaagcttgaggccggagacgcccgccttcgggcccgtccgcccggcttccccgctcccggtgaggacgccccctcccctccccccagccctgccttggcctctcccattcctgggcctcgctcccaccgaaccggggcccagaggcccgcataggggcttcttaaggcccgtgtgcgccgagccatccaagctcgtgggaccggactggtgccgggttgcattctggtccccgaggatgaagtaggagggggctgggccggcctggcttgtgcgctccgttctgtcccagcgtcttgattcggttctctttaagtttccttcaaagttcttccccgtttatcagcctctgccccctgaaccatatccctggcatctgcacttgagatgaccgcagccttcccatgccccccgttcatccagggtgttagagaactgtctcccattccagtccagtttccacgtgcaagttgcattctcctcaagtaccacggttatcatgtccctgaggaaagaaactgcccttgttgggccctcaaaggacagccctggtggtattaaaataaagacgtagaacctggcagtgctattgggtttggcctggtgatcttagaaataagatctctgaggcctgctgcttagccattttcccttgtctctggactggggagagatgatggcacagaccctgaagggccccttgtggaccgcgttaaccgggaagatcttaagttaggagttttgcgttttttcctcttttctttatttgcatctgaatccagaggaggcatggccaggaagagaggcaggatctgcggtggggtgatgcttagattttgataccctgatcttttgtttttcagggtactggaagatgaaagagactatacaagggaccgggtcctgggggcctgagcctcctggacccggcatacccccagcttactcaagtcccaggcgggagcgtcttcgttggcccccacctcccaaaccccgactcaagtcaggtggagggtttgggccagatcctgggtcagggaccacagtgccagccagacgcctccctgtcccccgaccctcttttgatgcctcagcaagtgaagaggaggaagaagaggaggaggaggaggatgaagatgaagaggaggaagtggcagcttggaggctgcccccaagatggagtcagctgggaacctcccagcggccccgcccttcccgccccactcatcgaaaaacctgctcacagcgccgccgccgagccatgagagccttccggatgctgctctactcaaaaagcacctcgctgacattccactggaagctttgggggcgccaccggggccggcggcggggcctcgcacaccccaagaaccatctttcaccccagcaagggggtgcgacgccacaggtgccatccccctgttgtcgttttgactccccccgggggccacctccaccccggctgggtctgctaggtgctctcatggctgaggatggggtgagagggtctccaccagtgccctctgggccccccatggaggaagatggactcaggt

SEQ ID NO: 17186 - DNA, 2300 bp, Homo sapien
cggtgaggacgccccctcccctccccccagccctgccttggcctctcccattcctgggcctcgctcccaccgaaccggggcccagaggcccgcataggggcttcttaaggcccgtgtgcgccgagccatccaagctcgtgggaccggactggtgccgggttgcattctggtccccgaggatgaagtaggagggggctgggccggcctggcttgtgcgctccgttctgtcccagcgtcttgattcggttctctttaagtttccttcaaagttcttccccgtttatcagcctctgccccctgaaccatatccctggcatctgcacttgagatgaccgcagccttcccatgccccccgttcatccagggtgttagagaactgtctcccattccagtccagtttccacgtgcaagttgcattctcctcaagtaccacggttatcatgtccctgaggaaagaaactgcccttgttgggccctcaaaggacagccctggtggtattaaaataaagacgtagaacctggcagtgctattgggtttggcctggtgatcttagaaataagatctctgaggcctgctgcttagccattttcccttgtctctggactggggagagatgatggcacagaccctgaagggccccttgtggaccgcgttaaccgggaagatcttaagttaggagttttgcgttttttcctcttttctttatttgcatctgaatccagaggaggcatggccaggaagagaggcaggatctgcggtggggtgatgcttagattttgataccctgatcttttgtttttcagggtactggaagatgaaagagactatacaagggaccgggtcctgggggcctgagcctcctggacccggcatacccccagcttactcaagtcccaggcgggagcgtcttcgttggcccccacctcccaaaccccgactcaagtcaggtggagggtttgggccagatcctgggtcagggaccacagtgccagccagacgcctccctgtcccccgaccctcttttgatgcctcagcaagtgaagaggaggaagaagaggaggaggaggaggatgaagatgaagaggaggaagtggcagcttggaggctgcccccaagatggagtcagctgggaacctcccagcggccccgcccttcccgccccactcatcgaaaaacctgctcacagcgccgccgccgagccatgagagccttccggatgctgctctactcaaaaagcacctcgctgacattccactggaagctttgggggcgccaccggggccggcggcggggcctcgcacaccccaagaaccatctttcaccccagcaagggggtgcgacgccacaggtgccatccccctgttgtcgttttgactccccccgggggccacctccaccccggctgggtctgctaggtgctctcatggctgaggatggggtgagagggtctccaccagtgccctctgggccccccatggaggaagatggactcaggtggactccaaagtctcctctggaccctgactcgggtaaggtgggaaaggggtgtggggttgcgggggaggggttagggagggttaagagcctggagcaccaggagcctgttgccatggtgagagctgggcttaaggaaagtaggatggaagagtgccggctccagaagagctgcgaaatgtctccattaagccccactttgagcagaaagtaagcctgggagtgagcctggcagtttcccaggcagagctaggaaacagatgccctaagtaggtatcccgtggtcttgagcgcagatgagaaagggagatgtggtttacaaaaatcctgtccacacgaaatcccttgtcggcctctcagtataagaacccccgtgtatacatctccagagggtaccattcccaaagtgacgggatgggatctctcccagtagtggagtacatcatcttacagttgtgaaagaatatttccctttcggagaactccagccaaacagtttcaggctctctaggtctttattacatattctagtattcattgagcctttacaatatgctgggtactatgctgggtgtttggcatatagtggtgacaaatatcccgaagttttcatttctaaatgctaatcctttttctttcttcctgtctatgagtaggaactctctctccatccctgtagaatctcttggacatgtttatctcatgcttatggggtccccatttcttggagtgggattgacattggtggattctgcttcagtgtatccttcttgcggtcttatttgcatgcatgagtcaactgtgt

SEQ ID NO: 17187 - DNA, 2300 bp, Homo sapien
ctggatttccaccagggctggaaaggttacttcaaaatggtgagtttcctgagggaggggtatagggtgttggtggggacagtggtagaaggcagaaattgaagtcctacccctgggagtctccatgtgaagggcctgctttctttctcttctctagaatgtggccaggcagaataatgacagtgactgtggtgcttttgtgttgcaggtaagcagatgatggggccacctcccctagctctgaagtcagttgggttaaagggtcgggaggctgttatgcatcccctcatttggctcatagtcagttgtggagcaggaagtaatctgttttagaacaccaaaacactggcttcactggttctcttctggacttctccatcccacattgggactgggtctctagtcttgggcctctggccttcatagagctccctgctaacctccaactcagtgtattttctccatctaaaacattctatcaagtaagaacactagctttagagtcaggctgtttttgaaccccaggctgtgggaccctggctccctttggggatgttctctgaaggatggagacacatctcatatgaaatgtgtagcacaggtcctgacacggggggtttctcatggcttgctttgttaacacccagtactgcaagcatctggccctgtctcagccattcagcttcacccagcaggacatgcccaaacttcgtcggcagatctacaaggagctgtgtcactgcaaactcactgtgtgagcctcgtaccccagaccccaagcccataaatgggaagggagacatgggagtcccttcccaagaaactccagttcctttcctctcttgcctcttcccactcacttccctttggtttttcatatttaaatgtttcaatttctgtatttttttttctttgagagaatacttgttgatttctgatgtgcagggggtggctacagaaaagcccctttcttcctctgtttgcaggggagtgtggccctgtggcctgggtggagcagtcatcctcccccttccccgtgcagggagcaggaaatcagtgctgggggtggtgggcggacaataggatcactgcctgccagatcttcaaacttttatatatatatatatatatatatatatatatatatatatatatatatatatatatatatatatatatatataaaaatatataaatgccacggtcctgctctggtcaataaaggatcctttgttgatacgtaagtggtggtcttccttaaggggcttcaaattagtggatatgcttagctcagaccttccagccagtctcttgagactaaagggttcagctttccatccctggctcaggcactgccaacaccttgtcttcacccaaacaaatccccgagatgggagcagagagcaggaaggagggaaagtagataagcctcaagaataagggcatccgagagggaagctggggaactggacacaagggactggggaggggaccaaccaggattcatgatagtaccccaaagccctttacagttttcttccatccctccaccatccagccaggggaatcctcccatccctacgatatcgctgttgattccttcatccctggcacacgtccaggcagtgtcgaatccatctctgctacaggggaaaacaaataacatttgagtccagtggagaccgggagcagaagtaaagggaagtgataacccccagagcccggaagcctctggaggctgagacctcgccccccttgcgtgatagggcctacggagccacatgaccaaggcactgtcgcctccgcacgtgtgagagtgcagggccccaagatggctgccaggcctcgaggcctgactcttctatgtcacttccgtaccggcgagaaaggcgggccctccagccaatgaggctgcggggcgggccttcaccttgataggcactcgagttatccaatggtgcctgcgggccggagcgactaggaactaacgtcatgccgagttgctgagcgccggcaggcggggccggggcggccaaaccaatgcgatggccggggcggagtcgggcgctctataagttgtcgataggcgggcactccgccctagtttctaaggatcatgtctgcgagccaggattcccggtaagaaaggcatttgcaagagattgtggctgcttattttgccgcccccttccgacgggcccgccgggggtagctgagaggcccaccagggttgcgggagaaaccgaaccgggtggggggagggtccgacttggaggggcgagggggaagacccacggccg

SEQ ID NO: 17188 - DNA, 2300 bp, Homo sapien
ggtagtgagttgttgggtatagcccctgactgatttttgtcccccaacctccaggagtggaagctggacacactatgtgacttgtatgaaaccctgaccatcacccaggcagtcatcttcatcaacacccggaggaaggtggactggctcaccgagaagatgcatgctcgagatttcactgtatccgccatggtgtgtttgcccgctgccagcctgttgtgggtctgcccgtcagaagtgtcctacttgaagccagggttcctggaacccaggtgcctacctggtctgctgcatatttgttttctcttccagcatggagatatggaccaaaaggaacgagacgtgattatgagggagtttcgttctggctctagcagagttttgattaccactgacctgctggtgagtagagggaactgatagcaaaggcagaagggaggatccaaggtgattccctctccaaggggacatcagtgcctctcaggaaagtagcagcttggaatagaatctggcatgcctaaggcctttggggaactgggatgcttatttcctctgccttccttggctgcccacatggatgcctaagtgtcttccctccgggatagagtgtcctccgtgcacatgctgaagagttgtctttcttgacgtaggccagaggcattgatgtgcagcaggtttctttagtcatcaactatgaccttcccaccaacagggaaaactatatccacaggtaagcgtagatctggaacactcccctaccccttcacacctggccctccctgggcttaaagctcctgatattcctcatccccttccttgttttccagaatcggtcgaggtggacggtttggccgtaaaggtgtggctattaacatggtgacagaagaagacaagaggactcttcgagacattgagaccttctacaacacctccattgaggaaatgcccctcaatgttgctgacctcatctgaggggctgtcctgccacccagccccagccagggctcaatctctgggggctgaggagcagcaggaggggggagggaagggagccaagggatggacatcttgtcattttttttctttgaataaatgtcactttttgaggcaaaagaaggaaccgtgaacattttagacacccttttctttggggtaggctcttgccccaggcgccggctcttctcccaaaaaaaaaaaaaaaacactaatccatttccctaacctagtaacctccagatcccagaggctctcctcacctcagctgagctcctttgaaagtgattcaagggactatgtcactcagcctcatttgctggaccaaatctggagggagaacccctaaaacccctaagtgaggttgcccagggggttgtccccaggtggggggaagcaggggagagaaaatggtagccatttttacattgttttgtatagtatttattgattcaggaaacaaacacaaaattctgaataaaatgacttggaaactgcctgtttgggcttctcatttcttacctccccttccctctcccacctgctactgggtgcatctctgctccccccttccccagcagatggttacctttgggctgttgctttcttgtcaccatctgagttctcagacgctggaaagccatgttctcggctctgtgaatgacaatgctgactggagtgctgcccctctgtaaagggctgggtgtggatggtcacaagcccctcacatgcctcagccaagaggaagtagtacaggggtcagcccagaggtccaggggaaaggagtggaaaccgatttccccaccaagggaggggcctgtacctcagctgttcccatagctacttgccacaactgccaagcaagtttcgctgagtttgacacatggatccctgtggatcaactgccctaggactccgtttgcacccatgtgacactgttgactttgccctgatgaagcagggccaacagtcccctaacttaattacaaaaactaatgactaagagagaggtggctagagctgaggcccctgagtcaggctgtgggtgggatcatctccagtacaggaagtgagactttcatttcctcctttccaagagagggctgagggagcagggttgagcaactggtgcagacagcctagctggactttgggtgaggcggttcagccatgaggctggctgtgcttttctcgggggccctgctggggctactggcaggtaaggaggaaggaggctgaggggagggggcccctgggagggagcctgccctgggttgctaaccatctcctctctgccaaaagcccag

SEQ ID NO: 17189 - DNA, 2300 bp, Homo sapien
ggtcaggagtttgagaccagcctggccaacatggtgaaaccctgtctctactaaaaatacaattagccaggtgtggcggcgtaatcccagctggcctgtaatcccagctacttgggaggctgaggcagaactgcttgaacccaggaggtggaggttgcagtgagccgtcatcgcgccactaagccaagatcgcgccactgcactccagcctgggcgacagagccagactgtctcaaataaataaatatgagataatgcagtcgggagaagggagggagagaattttattaaatgtgacgaactgccccccccccccccccagcaggagagcagcaaaatttatgcaaatctttgacggggttttccttgtcctgccaggattaaaagccatgagtttcttgtcacatgcctttctatgccttccatggctgggtctcagggagccggaagcagctgctgaggagggatgaaaatgtcagtgtgtgacgatgcctcatgggttcaccccccaaagcctggcacagctggtgttgggtctgccgtgcctcccttccttcctcctcttggggccactggctgctccagttccccatccgtggcaagccggtagagccattcatccccgcagccttcttcctgaccctcgtacagtttcaaatgcagcagacagccaaagcaatgagtggggggctgtggaacttcattcccaaaggcagcgccagtggctcctgagcaatgagaatgtcctgtcctgtccaccatattcaaggccagcagaagagcccgattaaaccctcgcagcacctggcatgctcctatcccacctacaaggggttgaatcaagaaggagcagtgggtactctgacctccactgggggctcctgggaacagcatgccccccacacggggccacctgccaagcctaacttcatgcccccagtacttgagatgaggagtgtcactctcaggacagccaaggtccagattccagaaaggacctcccagatggccacagcctgcaccagcagtgagcgccagtcccacccattacagctggctacggcgcaatccctgggagccaggatgagcagcaccccccagccgtaggagccccaggaggcttccggcctccaaggcccagagactgccccacaagggcagccctcacctggcagggccccagcagccccacctctgcctgcagacatccgtgtgaccttgtagactttggaggggggccgccaaagggctgatccacagcggaatgacgcacgggtgggcaccgtgggttggcgtcccggcggtcggtaacgaagcacaacgcccccaccaggtagtccaaggtgccctttcccaagcagcgctgcagggtccactcggcctcgccgaagtctctgcccagcacgtggtgcgccctcgggccagcggggagggggcgaatcccgggactgcctcgccaggcctcggctccccggagactcttgggggtctgggccccaagggtgattcaggtgctgcccttccccgacctgggctcgcctcccccacctcctcctctgcttcactgtcccgggcccagcagttgccggcgcactcatgctccgaggcctgagccaaccggaggcgagacaagcacagggccctgcgcgcaacccggcacctaaggaggcctgcccggtgcagactctcctgctcccaccggcgcccttccctctagagacgctgagagaacgggagctagtagcgcccccacccaacgccacctcggagactccggctccttctctctcaacttcgaacaatacaaagtgtgctaggagaagacaagatggcgcccagcaggaggagcggagaaaggcaggggtgtaaatctggcttccaaactggaagcgtcaacaaaggcgtgggaggtctaaccgcgcaggcgtgcagcttcggcaagctttacaattccaacagcgcgtccaaaacgtggtccctgactgagacttattttacgccactagagtgagggtgggtagcgtcagaaagagcggggcacggggcgggccagcttcgccgcgggaaaagaacgggaggcggagtgtccgcagcgcgcacgcgcaacgaaagtcaatggcggtctggagagactggcggaagctagctttgcaatatggcggccgaggcggacggaccgcttaaacggctgctcgtgccgattcttttacctgagaaatgctacgaccaacttttcgttcagtgggacttgcttcacggtgagttttattcagcatccgatccaagtcctactcgagtga

SEQ ID NO: 17190 - DNA, 2300 bp, Homo sapien
tctttcaggacagaaggtaggcaggcaagatgtgctttaccccatcccttttttgttgttactctggggcagggggcacaaaaaatttcacaaatctcctactgaattgcagaggcagctgtgtctgatggagtttagaccagtgtaaactttgaataggatagagaagaaagtgtggttcacattttctggatcccaagtaagagagactggatcatgagatcagggaaccaacctctggatcaccaaatgccaggagggcttggatggtagggaatgtctcccacctgaatttctactcaccgcttcttgcttttctgttttctttcccactttcccctcagggtgactctgtcagcaagcttcctaagggcccctcggagaatggggagctctccgcccccttggagttgggtagtatggtggaatggggtttcataaaacctccaacctgcacccctcccttctccatctcgcttgctgcccaacaccatggccctcacaggcccaactgacctgcgctggagctgctcttatctaggggggaggggggtggcacagcagcttgggtaccccccaacctccaggagctagtggaggggtgtgtaacagggtcataccccctccctcttgtccaccctacccccagggtaaggggagcctctctccttccccatcagactggatgtgcctttatcctctaatgccccaatctctctctgaacacccccattctccacctgttggtggggggtgctcctcgacccacccagatttgaccgttcagggggcctcccctgctatccctcctcccatcctgtaccccccatttctggggcctcatcactgtggaagacggggatagtaagagataagtgggtgggaggcacggggaaggttttggagtagaaccaggggtgtgtatgaaggggggtgacaaggtccccctggggaggggaccaaccttgtctggtggatgagaaggcgtatttatttttcactgtacagtatttaaaaagagaataaaaaaatccaaatggctgtctggctcctgtgccttctttgtccccagtttggtccatttgtttctctaggactgacctgccctggcccctggctcttgttttctgttcctccacatctgacttctcttcattgtctcttgtcccaaagatggtcttacttctgggaattcctgacattcctaaactccccaggcccaggttctccctcctggttcagaggaggggggcttgtgccttgttgcttctcccctcccccaagtttgctggtagagggagttgggccactcctataccctgagtcacagcacaggctaggcagggctgctcagagctggagctgttcctgtagaagctgagagccaaggcaggctgcttaatccgattacctgaggcctggggcttgggctgggccgttgggcagagtggggagcagggttccctcacagcagcctctggagcccggggtccggccttcttggtggtgttctgttctggctccaggctttttctccggcatgcgcatcacagacctcttaacttggggagttgtcctgggtttcctggctcccccctcatgacttggacgactgaagctaaaacttgccataattcaatagcagtggagaaatataggtttagggactggagttgggagggcttaagttttctcacttgggaaaggggttgaatcacggcccaagcacctgctggaatgactcaggaaacaaaaatggtctccctcctcggcctttcttgccccaggggcagttctgggatttgaggagcaacaggcaccaggaaaggggttggggtggtggtccgggatgctcccaagctcctctcagcacaactcgggccctgagggcacttcatccccctgtgtttgatcccattgtggaaagaattggctttaaattgcctgtgcttcagggaggggaggcaatcagcaacgggctggaaggcctgacatcaggtcttgggtggggggggcggggggcgtggcaccctgagggtgttgggggctgggacaaacaggacacctgggtttacctacgggctgaggatgttggcgcccttaaggaggtgcagtcttatgggagggacaggggcggagtcagtctttaaaagctgttcccaggtctggcccgcctgccacaaacgctgagcccaggtgggagaggtctggcctatccgcgcctggcagctgtcggaactccggagaccacaaaggggtttatggtttaccccctccacggaaggtcggtctgatcgcag

SEQ ID NO: 17191 - DNA, 2300 bp, Homo sapien
ttattactattttttgagacagagtgtcgctctttttgcccaggctggagtgcaatggcacaatctgggctcactgcaacctctgcctcccaggttcaagcaattctcttgcctcagcctcccaagtagctgggtttacaggcatgcaccaccatgcccagctaatttttgtatttttagtagagatggggtttcaccatgttggccaggctggtcttgaactcctgaccttgtgatccacccatcttggcctcccaaagtgctgggattacaggcgtgagccaccgcgccgggccactattattattatttgttgttgttgttgttgagatggagtctcgctctgtcgccccagctggagtgcagtggcacgatctccgctcactgcaacctccgcctcctgggttcacgccattctcctgcctcagcctcccgagtagctgggactacaggcgcccgccaccacgcccagctaattttttttttttttttttttttttgtatttttagttgagatggggtttcaccgtgttagccaggatggtctcgatctcctgacctcgtgatccgcccgtctcggcctcccaaagtgttgggattataggcatgagccaccgcgccctgccattattattatttttaaagaagaaatttcactcattgcccaggctggagtgtggtggcatgatatccactcactgcaacctccaccttcctaggttcaagcgattctcctgcctcagcctcctgagtagctgggactccttccgagtagctggaactaccacggctaattttttgtattttagtagagacgaggtttcaccatgttggccagaatggtctccatctcctgacctcgtgatccgcccgcccgtgatctcggcctcccaaagtgctgggattacaggcctgagccaccgcgcccgtcctaatttttgtatttttagtagaaacagggtttcgccctgttgaggctggtgtcaaacttttgggctcaagtgatccaccgcctgagcctcctaaagtgctgggattacaggagtgagccacagcgcccgtctgaaactattcttaaagctttctttctattctttctttcttttttttttttttttgagactgagtcttgctctgtcgcccaggctggagtgcaatggtgcgatcttggctcactgcaacttctgcctcccaggttcaaggtagtctcctgcctcagcctcccgagtatctgggattacaggcgcgtgtcaccacgcccggctaatttttgtattttattagatgcggggtgggggggggggtgggtttcaccattttggccacgctggtctcgaacccctgacctcaggtgatccgaggacctcaggtgatccacctgcctcggcctcccagagcgctgggattacaggcgtgagccaccgcgcccggccaaaactttcattgtatcacaatctcttcaaggtaagagccatgactgttaaatctactacagtagagagttacagattcttaaaatatcggcgatgcatacgcgaagagggtaaagctcagcgcgtgcgcaccaagcacctttttccttgcggcgactcctcttcttttttttttctttttggagcgtgcgcaccaagaaagacaaaggtggggaaagtgaccaagcagtcgttcaggcgcatgcccatccctaacttgtccaagcccggtggggccagcggcggcggagtgggtgtggcctgagcgctgtgtgactgtgcggacgccgcccaatcggactgagcgagcccggcccctccctccccctgattggttggttctcagtgttgtggggcggggaaaggaagagacggggtggctgggcggtggagcggtgaagaaagaaggctaatcttgttctgcgcaagcgctagcaagcgaccaggagggggagtgagagagtgaaagggaatgtggaagccccgatgcgctagctggcgctagctggggctctaaccttgacgcctgcgcggtggccctcggggccccgcgcgcagcgggcgggtgcccggtgcgcctgcgcagtaggcggcggtggcagggggaggtggaggctgtggagcggcagcggcagcagcgggtcccgggactgaggcagcagcgggggcggcggcgggcggaagctgaggtgacgaaggcagcggcggcggcggccgtttccctcacggtggcggagaccaaggcggcggcggcggacggggagcggcccggccccggccccctgctcgttggctgtggcagggccgccgtggggccggcccggctcc

SEQ ID NO: 17192 - DNA, 2300 bp, Homo sapien
cacttttcgaggccgaggcggacggatcacgagatcaggagttggagaccagcctggccagtatggtgaaacaccgtctctactaaaaattagccgggcatggtggtgcgcacccgtagtcccagctactcgggaggctgaggcaggataattgcttgaacccgtgaggcagaggttgcagtgagcggagttcgcaccactgcactccagcgtgcgcgacagagactctgtctcaaaaaaaaaaaaaaaaagaaataaaagaaagacccaacaccacatcaggacatgtaattcttatttatttttcaccctcaacaaggaagaaaggtctctccctcaattctgctcttccaatacttgaggataggcacccctaaccctccttcctccagggaggcctcagcatcagtgtctgtggacgtagtctctgaagagtgcttcagctgatggggaaggagaaactcaagacagagatcctcctagggatggcgtcactttcctgccaactttctcgttgcctctccttgaaagcagaagaagtgccagccctcagcttccgtcagatcttgggctcctagggccttgtacaagtccatggccctctggttccagtccaggacggccaggcggaattgggagcagcccttatccaaggccacctgtgggagaagacaacactaacttttctggggtcaaaaaagaaaaaggttttctcactccctctttcaacccgggtcccccctccatatacccttgcttcttcaggtcctcacttgtcgccccacccatctcctcacctcagccacctttttgattattttggaaccaatcccttgacctgttgtggagagaaagaggcaaaaaatagctattgtttgagctgaaggggatcagaaaatgacaccggctgggctctggggacaggggataacagtggggtctgtggggtgctttgctcccaccccagcctcagcttctgcccagtaccccgatattccggcatcacatagatatcctccagataaatggtgcgtcccttccatgtactgtagatgaaatagtatatcccatagcccaccacgcagggccctgagagagagaaaaggggagtaaggcttctggaagcctgtggggagacctctgaggccggctggagaggtggacttctaagggccaggtgctcttacccagtagcttcccgggcgctggaagaatctctgctaccaaacagtgatagaaaggattgtctccaaagccatctgctctcagggctgccgagattggagttgtgacaaagagatagagaaagaggacgtgggtgtatgcccagcctggagctgtcgcctggggaacccatccctcatttcctccccagcctccgccagaacctgggcgctgagcccccaccttcttcactgatcttcacctgatccgagagtttttcgaattcggctagctcctaaggcgtgggtacggaagctagattagagcagaagggccccgctgctccccgagcaggttcccaaggcgagcccctccccctgcccccgcctcctacgaccccgctctggccgcgccactctgacccccgggttaccggcctgcagtcttcacccgaatcagcctcaggatatctccacagtctccctccttggcctctcggatccgcacggaagccatccggatccccgctgtctgggaccaaagtcccagggcctcgcaaacggcaactagaccccttaaagggcctacggacttggatcctgaagagcctgagagagcggggtggcgggagtcgggggggacggcggggtagccgcggcctggtaagtggagctgggattccggcgccgtacgggaggagagagtaggccagcgaggcgatcctctgtccgggcatagccccaccccctcgaattctgtcgcagcagggggcacaactgtcagccaatcagcttggagaacaggcacggccgcgtcccccccaagccccacccccgacagctggatcttgtgactgggctcctgggtagagttcaaggttggagtgaagcggcttccttgcggttgtgtgggtgtcccaacctgggtcgagataccccgcggttcaaaggctcccccgcagtgctttttaaattgacatatgcagtgataacctgctttagcctcaggctcactcacccgcccagaccctgggtaagccttaagaccctcagctctgaaagctgtttcctgcagctcttgagtagcatgaagtgttacctcttgggggcatttgcattttttaaatgttttatttt

SEQ ID NO: 17193 - DNA, 2300 bp, Homo sapien
cactatcatcctccactgccgagaaagtttctgaactgggagaggatattccatctcccctctcctcctctagggcctgatctaggtcctccaagatttctgtccactcggggagcctgcattcacaggcctgaggtctagaaacagtcctcccctgcgtcccaagtagcatcctgtatcaggactagaaatgagataatggaatcctaaatttctagctgagtgaccttgggcaagtcacttcacctctgtgcttcagtgtccttgtctgtaaaatgaggaaaataatactttacggggtgactgtgaaagagggttcattgagaaaatgcaggcacagtgcctggcatctggtctgaactcctcccccagtcttttcccaggcctctgaggcctgtctcccaagaaggtattgtctgtgtgtatgattcagtgaatattaagaagggacctgccccccgcctctcagttatcttcccttatccatttattacagggcctaaacagtctagcagtagaaatcacccactccctgacccattttattttattttattttattttattttattttattttagacagagtcttgctctatcacccaggctggagtgcagtggcgtgatctcggctcactgctgcctctgcctctcgagttcaagcgatcctcctgtctcagcctccttagtagttgggactacaggtgcacgcaccaccacgcccagcaaatttttttgtgtttttagtagagacggggatttcaccacgttgcccaggctgatctcgaacctctgacctgaaatgatccgcccacctcagcctcccaaagtacctggattacaggcattagccacaaggcccgaccctccctgacgcattttattttatttatttattttgagatggagtttcgcttttgttgcccaggctggagtgcaatggcacgatctcggctcactgtaacctccacctcccaggttcaagcgattctcctgtctcagcctcccgagtagctgggagtaaaggcatgcgccaccacacctgtctaatttttgtatttttagtagagacggggtttcaccatgttggtcaggctggtctcaaattcctgatctcaggtgatccgcctgcctctgcctcccaaaatgctgggattacaggtgtgagccactgtgcccaccccatgacccattttaaaatgcaaatgacagaccgggcttggtgggtcacatctgtaatcccagcactttagaaggctgaggcgggcagatcacttgaggtcaggagttccagaccagcctggccaacatagtgaaaccccgtctctactaaaaatacaaaaattagccaggtatggttgcccatgcctgtaatcccagctactccgagggtgaggcaggagaatcgcttgaacccaggagggagaggttgcagtgagccgagatcgcgccactgcactccagcctgagtgacagagtgagaatccgttaaaacaaaaaaaaagagaagaaaaaagaaaaaaaaattagccgggcgtgccggtgcgcgactgtagttccagctactccggaggctgagacaggaggatcgcttgaactcgggaggtggaggctgcagtgagcagagatcgcgccactacaccccagcctgggcgacaaagcaatacaccatctccaaaaataaataaataaataaatataaaaataaaacatttaaaaaatgcaaatgcccccaagaggtaacacttcatgctactcaagagctgcaggaaacagctttcagagctgagggtcttaaggcttacccagggtctgggcgggtgagtgagcctgaggctaaagcaggttatcactgcatatgtcaatttaaaaagcactgcgggggagcctttgaaccgcggggtatctcgacccaggttgggacacccacacaaccgcaaggaagccgcttcactccaaccttgaactctacccaggagcccagtcacaagatccagctgtcgggggtggggcttgggggggacgcggccgtgcctgttctccaagctgattggctgacagttgtgccccctgctgcgacagaattcgagggggtggggctatgcccggacagaggatcgcctcgctggcctactctctcctcccgtacggcgccggaatcccagctccacttaccaggccgcggctaccccgccgtcccccccgactcccgccaccccgctctctcaggctcttcaggatccaagtccgtaggccctttaaggggtctagttgccgtttgcgaggccctgggactttggt

SEQ ID NO: 17194 - DNA, 2300 bp, Homo sapien
ccccgcagtgctttttaaattgacatatgcagtgataacctgctttagcctcaggctcactcacccgcccagaccctgggtaagccttaagaccctcagctctgaaagctgtttcctgcagctcttgagtagcatgaagtgttacctcttgggggcatttgcattttttaaatgttttatttttatatttatttatttatttatttttggagatggtgtattgctttgtcgcccaggctggggtgtagtggcgcgatctctgctcactgcagcctccacctcccgagttcaagcgatcctcctgtctcagcctccggagtagctggaactacagtcgcgcaccggcacgcccggctaatttttttttcttttttcttctctttttttttgttttaacggattctcactctgtcactcaggctggagtgcagtggcgcgatctcggctcactgcaacctctccctcctgggttcaagcgattctcctgcctcaccctcggagtagctgggattacaggcatgggcaaccatacctggctaatttttgtatttttagtagagacggggtttcactatgttggccaggctggtctggaactcctgacctcaagtgatctgcccgcctcagccttctaaagtgctgggattacagatgtgacccaccaagcccggtctgtcatttgcattttaaaatgggtcatggggtgggcacagtggctcacacctgtaatcccagcattttgggaggcagaggcaggcggatcacctgagatcaggaatttgagaccagcctgaccaacatggtgaaaccccgtctctactaaaaatacaaaaattagacaggtgtggtggcgcatgcctttactcccagctactcgggaggctgagacaggagaatcgcttgaacctgggaggtggaggttacagtgagccgagatcgtgccattgcactccagcctgggcaacaaaagcgaaactccatctcaaaataaataaataaaataaaatgcgtcagggagggtcgggccttgtggctaatgcctgtaatccaggtactttgggaggctgaggtgggcggatcatttcaggtcagaggttcgagatcagcctgggcaacgtggtgaaatccccgtctctactaaaaacacaaaaaaatttgctgggcgtggtggtgcgtgcacctgtagtcccaactactaaggaggctgagacaggaggatcgcttgaactcgagaggcagaggcagcagtgagccgagatcacgccactgcactccagcctgggtgatagagcaagactctgtctaaaataaaataaaataaaataaaataaaataaaataaaatgggtcagggagtgggtgatttctactgctagactgtttaggccctgtaataaatggataagggaagataactgagaggcggggggcaggtcccttcttaatattcactgaatcatacacacagacaataccttcttgggagacaggcctcagaggcctgggaaaagactgggggaggagttcagaccagatgccaggcactgtgcctgcattttctcaatgaaccctctttcacagtcaccccgtaaagtattattttcctcattttacagacaaggacactgaagcacagaggtgaagtgacttgcccaaggtcactcagctagaaatttaggattccattatctcatttctagtcctgatacaggatgctacttgggacgcaggggaggactgtttctagacctcaggcctgtgaatgcaggctccccgagtggacagaaatcttggaggacctagatcaggccctagaggaggagaggggagatggaatatcctctcccagttcagaaactttctcggcagtggaggatgatagtggaggggactctgtccttcaccccattgatccccagaggggtgatagctgagtcttgtgactgggcccctgggcaggggtcaagggtcagtgcccctgtttcctttaccccctcctccccgggcaacctttaaccctccaccgcccacacgcaaggctgcctgcctctacacattctcccaagagttgtctgagccgccgagtggacagtggctgattatggagagcagaggcccactggctacctcgcgcctgctgctgttgctgctgttgctactactgcgtcacacccgccagggatgggccctgagacctgttctccccacccaggtgcaggagcgggacagggcactcagctcatgcagtcttcccttctctcctctggccctgtagcagggcctctccctctgtctgtctct

SEQ ID NO: 17195 - DNA, 2300 bp, Homo sapien
aacctgcagggtactccgcaatccacacccatgctgtgtccccaacctcctttcccactagtctccgactagttctctcctggagccaagccagccactcctggggtagactgtgcttactcctgacttcacacctctgtgcctttcattcctttgtcctggaagactacctacccttcagaggccagccccaactcccattcattcattcattcattcaatgcataccatttttttgagatggagttttgctcttgtccaggctggagtgcagtgacacaatctcggctcactgcaacctccaccttccaggttcaagcaattctcttgcctcagcctcctgagtagctgggattacaggctcccaccaccgcacccggctaatttttttagttttagtagagacgcagtttcaccatgttggccaggctggtcttgaactcctgacctctggtctcgaactcccttgctcaggtgatccattggcctcggcctcctatagagctgggattacaggcatgagccactgggcctggccgagataatgattttttttttctctctttttttgagacgaagtctcactctattgcccaagctggagtgcaatggcgtgatctcagctcactgcaagctccgcctcccgggttcaagcaattctcctgcttcagcctcctgagtagctgggactacaggcacccaccaccatgcccagctaatttttttttttttttttattgagacggaagctctgttgcccaggctggagtgcagtggagcgatctcggctcactgcaagctccgcctcccgggttcatgccattctcctgcctcagcctcccaagtagctgggactacaagctcccgccacgacgcccagctaattttttttttttgtatttttagtagggacggggtttcactgtgttatccaggatggtctcgatctcctgacctcgtgatccacccacctcggcctcccaaagtgctgggattactggcgtgagccaccgcgcctggcctaattttgcatttttaagtagagacggggtttcaccatgtgggcaaggctagtctcgaactcctgacttcgtgatctgcccgcctcggcctcccaaaatgctgggattacaggcataagccaccgtgcccggcttgagataatgattcttaacatgtggtatgtagagcaagtgtactcccgccctagactgtgagccccgtgagagatgtggcttcagtgtaacctctctggcctccccagggctacagcacacagtctatagaggtgctcaataaatgtttgttgacccaagtagacacataaggaggtgagttccgacgtgggggtgggggtgccaggaggcagagaaccgaagtagacctggctgcagggctgggatctcagggcagtgctggggactgggaatgtggtgttgagagggcttcagggagacgtgatgggaagatggggaagcctctgcacgtggacagagccaggtggtgtggacaggggctgtgagattggagaaggaggcgtctgggggactggtagcggctcccaacaggggaacgtccctctgggggtggcctttatccatctctgcggggcctgtcctagcttccctcctggctcggccagcctcccggctggtctcttcgctctctttcttgatctctagctctttattcctctgacattctgccccatctgctcccggactcttccgccgcatctgtatcttagtctctttctaactccctgcctggggcccccacctttgagcatatatcggcttctctctctgccgttgtgtttctctggggttatctttccctctactccgcccggacacgccctctatctcttcctcccaccctgtcccagtctagtacctggggtgggggtaatggagagacagctaggtccctaagagaagtcaggggggcgggcccaacctctccatatttacatatgtatgaggtcgcctgggccagtggcgaggaggcggagcttctgggggtgggaagggggcgggcacccccagagccgcagagtataaagaccgcgctcggcgaccgcgggcctcgcactgctgaggagcggagcctccgcctggggggccccccatccctggctgtcccccagctgcgcgtccccgccccacccccgcggctgagccaccaccggtgcagtggtctccgcttggcggagcgagccttgagcttcgttccacagcttctttgcatcttggatttcggggcggccccctcccccacctctctctgcctttttgtac

SEQ ID NO: 17196 - DNA, 2300 bp, Homo sapien
acctggagggctggggacctggagggctggggggctggggggctgaggacctggtcctctgactgctcttttcacccatctacagtcccccttgccgtcccaagcaatggatgatttgatgctgtccccggacgatattgaacaatggttcactgaagacccaggtccagatgaagctcccagaatgccagaggctgctccccccgtggcccctgcaccagcagctcctacaccggcggcccctgcaccagccccctcctggcccctgtcatcttctgtcccttcccagaaaacctaccagggcagctacggtttccgtctgggcttcttgcattctgggacagccaagtctgtgacttgcacggtcagttgccctgaggggctggcttccatgagacttcaatgcctggccgtatccccctgcatttcttttgtttggaactttgggattcctcttcaccctttggcttcctgtcagtgtttttttatagtttacccacttaatgtgtgatctctgactcctgtcccaaagttgaatattccccccttgaatttgggcttttatccatcccatcacaccctcagcatctctcctggggatgcagaacttttctttttcttcatccacgtgtattccttggcttttgaaaataagctcctgaccaggcttggtggctcacacctgcaatcccagcactctcaaagaggccaaggcaggcagatcacctgagcccaggagttcaagaccagcctgggtaacatgatgaaacctcgtctctacaaaaaaatacaaaaaattagccaggcatggtggtgcacacctatagtcccagccacttaggaggctgaggtgggaagatcacttgaggccaggagatggaggctgcagtgagctgtgatcacaccactgtgctccagcctgagtgacagagcaagaccctatctcaaaaaaaaaaaaaaaaaagaaaagctcctgaggtgtagacgccaactctctctagctcgctagtgggttgcaggaggtgcttacgcatgtttgtttctttgctgccgtcttccagttgctttatctgttcacttgtgccctgactttcaactctgtctccttcctcttcctacagtactcccctgccctcaacaagatgttttgccaactggccaagacctgccctgtgcagctgtgggttgattccacacccccgcccggcacccgcgtccgcgccatggccatctacaagcagtcacagcacatgacggaggttgtgaggcgctgcccccaccatgagcgctgctcagatagcgatggtgagcagctggggctggagagacgacagggctggttgcccagggtccccaggcctctgattcctcactgattgctcttaggtctggcccctcctcagcatcttatccgagtggaaggaaatttgcgtgtggagtatttggatgacagaaacacttttcgacatagtgtggtggtgccctatgagccgcctgaggtctggtttgcaactggggtctctgggaggaggggttaagggtggttgtcagtggccctccaggtgagcagtaggggggctttctcctgctgcttatttgacctccctataaccccatgagatgtgcaaagtaaatgggtttaactattgcacagttgaaaaaactgaagcttacagaggctaagggcctcccctgcttggctgggcgcagtggctcatgcctgtaatcccagcactttgggaggccaaggcaggcggatcacgaggttgggagatcgagaccatcctggctaacggtgaaaccccgtctctactgaaaaatacaaaaaaaaattagccgggcgtggtgctgggcacctgtagtcccagctactcgggaggctgaggaaggagaatggcgtgaacctgggcggtggagcttgcagtgagctgagatcacgccactgcactccagcctgggcgacagagcgagattccatctcaaaaaaaaaaaaaaaaggcctcccctgcttgccacaggtctccccaaggcgcactggcctcatcttgggcctgtgttatctcctaggttggctctgactgtaccaccatccactacaactacatgtgtaacagttcctgcatgggcggcatgaaccggaggcccatcctcaccatcatcacactggaagactccaggtcaggagccacttgccaccctgcacactggcctgctgtgccccagcctctgcttgcctctgacccctgggcccacctcttaccgatttcttccatactactacccatccacctctcatcaca

SEQ ID NO: 17197 - DNA, 2300 bp, Homo sapien
attttaagaattaattaatggctcaaggaccttactgtaaaacttacaaccataaaggtcctaaaagaaaatgtaagataatatcttcatgaccctggggttaaaaaaaaaaaaaaagatgtcctaaacaggacaaggcaaatactgaacataaaaaagataaatccactcctcttaagatactgtaaactctgtaaagcaaacaaataggcaagcaacagatcagaagaaaacattcacgacacatggatctgataaaggacttgtatccagaatgtataaagcagtcccacaactgaacaataaaaacaaacaaaaaaccaaaataacaggtaaaagactcgaagagctactttacaaacaaaatacgaatggccaataggcacatgaaaaaatgctgaacatccttagtcaatagagaactgtaaattacaaccacaaggatataccacattagaaagactgacaatacctaatgtccggaaggctgtggcacaaccataataactcccataccttgctagttggagtgtaaaatggtacaaccgctctggaaaactcagagcttctgaaaaagttcaaaatacagctactttttacttccaaactcgcaattcccctcctaagtatttctccaagaaacacgaaaacatatgatcacaaaaagaattgtacaagaatgtttatagcagctttatttcataaccgcaaatgggaaacaactcaaaaggccatcaaaaggacggatatacaatcgatggactatactaaatgaaaaggagcaaaatactgatatatacaacatgaacgaatgtcagacagtacattgaaggacagaagcccgacaaaaatgagcacataatgtatgattccccccttttttttgagacggagtttcgttcttgtcgcccaggctggagtgtagtggcacgatcttggctcactgcaacctctgcctcccgggttcaagcgattctcctgcctcaccctcccgaatagctgggattacaggcacccaccacgcccagctaatttttgtattttttagtagagacggggattcaccacgttggccacgctggtctggaactcctatcctcaagtaatccgcccgcctcggcctcccaaagtgcaggcgtgagccacagcgcccagcctgattccattctatatgaagttctccaacaggcaaaatggttatggagatcaaaataaaggtggggtcgggaatcgactgggaagagacgtgatgaaacgtttctgggacgatgaaaagggtctgtgacttggtaggcatcacggagcggttaggggccaaaactcatcttcctgtgcacttgctgtgtgcactggcgctgtgtgtaaatgccacctcgatttaggaaaaagatgacgtaagtacggcacaaagtggccggtacgcggcaggtgcatgggaagaaactgcggaatgaaacaaccgcgagctaagagatggggcagcgggagaaatgaattcgagttccgcctcctaccaggaagaaccggctcgggccggagggctgcacggaggaccacacggacgcctgcgggcccgccccttccgcttcacgacgttcagcctgcgtctggaactggaatggcctagcccaaagctagataacaggtagattgtttttccgacaaattatcaaacgacccatcattgcactctttcaaaatttgattctcagacgtacccattctttttttttttcctccgggaagatgagatatactcattcttgaaaatacctccgggcttgccttctgcacacttctttccctccctgtctcacgccatggtagcgtccgcctaggttgcaggcgacccgcggggtggggcacaccattcaaagaaggggagggattgaggtttgcatcaaaacaaatacccctgcctttgcaaaggccataactaagtaatccagaaaaagaaatgcaggcggagaatagcagcctccctctgccaagtaagaggaaccggcctaaaggacattttctctctctctcctcccctctcatcgggtgaatagtgagctgctccggcaaaaagaaaccggaaatgctgctgcaagaggcagaaatgtaaatgtggagccaaacaataacagggctgccgggcctctcagattgcgacggtcctcctcggcctggcgggcaaacccctggtttagcacttctcacttccacgactgacagccttcaattggattttctccatctagcggagccgggggctgcctggaaagatcgctccaggaaggacaaaggtccggaag

SEQ ID NO: 17198 - DNA, 2300 bp, Homo sapien
tgtagtggcacgatcttggctcactgcaacctctgcctcccgggttcaagcgattctcctgcctcaccctcccgaatagctgggattacaggcacccaccacgcccagctaatttttgtattttttagtagagacggggattcaccacgttggccacgctggtctggaactcctatcctcaagtaatccgcccgcctcggcctcccaaagtgcaggcgtgagccacagcgcccagcctgattccattctatatgaagttctccaacaggcaaaatggttatggagatcaaaataaaggtggggtcgggaatcgactgggaagagacgtgatgaaacgtttctgggacgatgaaaagggtctgtgacttggtaggcatcacggagcggttaggggccaaaactcatcttcctgtgcacttgctgtgtgcactggcgctgtgtgtaaatgccacctcgatttaggaaaaagatgacgtaagtacggcacaaagtggccggtacgcggcaggtgcatgggaagaaactgcggaatgaaacaaccgcgagctaagagatggggcagcgggagaaatgaattcgagttccgcctcctaccaggaagaaccggctcgggccggagggctgcacggaggaccacacggacgcctgcgggcccgccccttccgcttcacgacgttcagcctgcgtctggaactggaatggcctagcccaaagctagataacaggtagattgtttttccgacaaattatcaaacgacccatcattgcactctttcaaaatttgattctcagacgtacccattctttttttttttcctccgggaagatgagatatactcattcttgaaaatacctccgggcttgccttctgcacacttctttccctccctgtctcacgccatggtagcgtccgcctaggttgcaggcgacccgcggggtggggcacaccattcaaagaaggggagggattgaggtttgcatcaaaacaaatacccctgcctttgcaaaggccataactaagtaatccagaaaaagaaatgcaggcggagaatagcagcctccctctgccaagtaagaggaaccggcctaaaggacattttctctctctctcctcccctctcatcgggtgaatagtgagctgctccggcaaaaagaaaccggaaatgctgctgcaagaggcagaaatgtaaatgtggagccaaacaataacagggctgccgggcctctcagattgcgacggtcctcctcggcctggcgggcaaacccctggtttagcacttctcacttccacgactgacagccttcaattggattttctccatctagcggagccgggggctgcctggaaagatcgctccaggaaggacaaaggtccggaagttgtgggaccttagcagcttgggctccccggatcacccccaaatgatcatttcggaatggagccccagttttcactaggatgccatgggctctaaaatatacagctatgagttctcaatgtttcgagatccaaaagtctcagacctcaatgctttgtgcatcttttatttcagggattccctacgcccagcaccgggtggatgtgcaaagaagtacgctttaggccggctcaaggttccccaaagctccactcctctgcctaggcgttcaactttgagttcggatggtcctaacatccccatcatctacacccaggtctcccaacaatgcaactcctatgatgatccctctagccaagcttccatcccactcacccccaaactcgctaagtccccactgccccacccccagccccagcgattttcccgagctgaaaatacacggagccgagagcccgtgactcagagaggactcatcaagttcagtcaggagcttacccaatccagggaagcgtgtcaccgtcgtggaaagcacgctcccagcccgaacgcaaagtgtccccggagcccagcagctacctgctccctggacggtggctctagacttttgagaagctcaaaacttttagcgccagtcttgagcacatgggaggggaaaaccccaatcccatcaacccctgcgaggctcctggcacaaagctggacagtcgccatgacaagtaagggcaagtaatccgcctgccggaggaagcaaaggaaatggagttggggaggagggtgcagagtcaggattctcgccgacctggtgccgtagatactaacattttggggtggaaaattctgcaagccagagctgtgagggcagaattggtggaaatcattttggaggaatcctgcattgtgtcaaatatgaagggtgga

SEQ ID NO: 17199 - DNA, 2300 bp, Homo sapien
tgagtctccaaagtcttcatactgcagaggaagcacagcggagattagcctcagccaggatggcttcgaagttctcagggatccgacgcagagctaaagaaacccacctgtgcttccctcctcttctgggagtaggcagaagactcccgggaggagaggcgaacagcggacgccaattcttttgaaagcactgtgttccttagcaccgcgggtcgctacgggcctcttgctgtcgcgggatttcggtccaccttccgattgggccgccgcatcccggatcagatttcgcgggcgacccacggaacccgcggagccgggacgtgaaaggttagaaggtttcccgttcccatcaagccctagggctcctcgtggctgctgggagttgtagtctgaacgcttctatcttggcgagaagcgcctacgctccccctaccgagtcccgcggtaattcttaaagcacctgcaccgcccccccgccgcctgcagagggcgcagcaggtcttgcacctcttctgcatctcattctccaggcttcagacctgtctccctcattcaaaaaatatttattatcgagctcttacttgctacccagcactgatataggcactcaggaatacaacaatgaataagatagtagaaaaattctatatcctcataaggcttacgtttccatgtactgaaagcaatgaacaaataaatcttatcagagtgataagggttgtgaaggagattaaataagatggtgtgatataaagtatctgggagaaaacgttagggtgtgatattacggaaagccttcctaaaaaatgacattttaactgatgagaagaaaggatccagctgagagcaaacgcaaaagctttcttccttccacccttcatatttgacacaatgcaggattcctccaaaatgatttccaccaattctgccctcacagctctggcttgcagaattttccaccccaaaatgttagtatctacggcaccaggtcggcgagaatcctgactctgcaccctcctccccaactccatttcctttgcttcctccggcaggcggattacttgcccttacttgtcatggcgactgtccagctttgtgccaggagcctcgcaggggttgatgggattggggttttcccctcccatgtgctcaagactggcgctaaaagttttgagcttctcaaaagtctagagccaccgtccagggagcaggtagctgctgggctccggggacactttgcgttcgggctgggagcgtgctttccacgacggtgacacgcttccctggattgggtaagctcctgactgaacttgatgagtcctctctgagtcacgggctctcggctccgtgtattttcagctcgggaaaatcgctggggctgggggtggggcagtggggacttagcgagtttgggggtgagtgggatggaagcttggctagagggatcatcataggagttgcattgttgggagacctgggtgtagatgatggggatgttaggaccatccgaactcaaagttgaacgcctaggcagaggagtggagctttggggaaccttgagccggcctaaagcgtacttctttgcacatccacccggtgctgggcgtagggaatccctgaaataaaagatgcacaaagcattgaggtctgagacttttggatctcgaaacattgagaactcatagctgtatattttagagcccatggcatcctagtgaaaactggggctccattccgaaatgatcatttgggggtgatccggggagcccaagctgctaaggtcccacaacttccggacctttgtccttcctggagcgatctttccaggcagcccccggctccgctagatggagaaaatccaattgaaggctgtcagtcgtggaagtgagaagtgctaaaccaggggtttgcccgccaggccgaggaggaccgtcgcaatctgagaggcccggcagccctgttattgtttggctccacatttacatttctgcctcttgcagcagcatttccggtttctttttgccggagcagctcactattcacccgatgagaggggaggagagagagagaaaatgtcctttaggccggttcctcttacttggcagagggaggctgctattctccgcctgcatttctttttctggattacttagttatggcctttgcaaaggcaggggtatttgttttgatgcaaacctcaatccctccccttctttgaatggtgtgccccaccccgcgggtcgcctgcaacctaggcggacgctaccatggcgtgagacagggagggaaagaagtgtgca

SEQ ID NO: 17200 - DNA, 2300 bp, Homo sapien
tctttccctccctgtctcacgccatggtagcgtccgcctaggttgcaggcgacccgcggggtggggcacaccattcaaagaaggggagggattgaggtttgcatcaaaacaaatacccctgcctttgcaaaggccataactaagtaatccagaaaaagaaatgcaggcggagaatagcagcctccctctgccaagtaagaggaaccggcctaaaggacattttctctctctctcctcccctctcatcgggtgaatagtgagctgctccggcaaaaagaaaccggaaatgctgctgcaagaggcagaaatgtaaatgtggagccaaacaataacagggctgccgggcctctcagattgcgacggtcctcctcggcctggcgggcaaacccctggtttagcacttctcacttccacgactgacagccttcaattggattttctccatctagcggagccgggggctgcctggaaagatcgctccaggaaggacaaaggtccggaagttgtgggaccttagcagcttgggctccccggatcacccccaaatgatcatttcggaatggagccccagttttcactaggatgccatgggctctaaaatatacagctatgagttctcaatgtttcgagatccaaaagtctcagacctcaatgctttgtgcatcttttatttcagggattccctacgcccagcaccgggtggatgtgcaaagaagtacgctttaggccggctcaaggttccccaaagctccactcctctgcctaggcgttcaactttgagttcggatggtcctaacatccccatcatctacacccaggtctcccaacaatgcaactcctatgatgatccctctagccaagcttccatcccactcacccccaaactcgctaagtccccactgccccacccccagccccagcgattttcccgagctgaaaatacacggagccgagagcccgtgactcagagaggactcatcaagttcagtcaggagcttacccaatccagggaagcgtgtcaccgtcgtggaaagcacgctcccagcccgaacgcaaagtgtccccggagcccagcagctacctgctccctggacggtggctctagacttttgagaagctcaaaacttttagcgccagtcttgagcacatgggaggggaaaaccccaatcccatcaacccctgcgaggctcctggcacaaagctggacagtcgccatgacaagtaagggcaagtaatccgcctgccggaggaagcaaaggaaatggagttggggaggagggtgcagagtcaggattctcgccgacctggtgccgtagatactaacattttggggtggaaaattctgcaagccagagctgtgagggcagaattggtggaaatcattttggaggaatcctgcattgtgtcaaatatgaagggtggaaggaagaaagcttttgcgtttgctctcagctggatcctttcttctcatcagttaaaatgtcattttttaggaaggctttccgtaatatcacaccctaacgttttctcccagatactttatatcacaccatcttatttaatctccttcacaacccttatcactctgataagatttatttgttcattgctttcagtacatggaaacgtaagccttatgaggatatagaatttttctactatcttattcattgttgtattcctgagtgcctatatcagtgctgggtagcaagtaagagctcgataataaatattttttgaatgagggagacaggtctgaagcctggagaatgagatgcagaagaggtgcaagacctgctgcgccctctgcaggcggcgggggggcggtgcaggtgctttaagaattaccgcgggactcggtagggggagcgtaggcgcttctcgccaagatagaagcgttcagactacaactcccagcagccacgaggagccctagggcttgatgggaacgggaaaccttctaacctttcacgtcccggctccgcgggttccgtgggtcgcccgcgaaatctgatccgggatgcggcggcccaatcggaaggtggaccgaaatcccgcgacagcaagaggcccgtagcgacccgcggtgctaaggaacacagtgctttcaaaagaattggcgtccgctgttcgcctctcctcccgggagtcttctgcctactcccagaagaggagggaagcacaggtgggtttctttagctctgcgtcggatccctgagaacttcgaagccatcctggctgaggctaatctccgctgtgcttcctctgcagtatgaagactttggagactcaaccgttag

SEQ ID NO: 17201 - DNA, 2300 bp, Homo sapien
tttctgcatattccacctgctccccctcatggtacagctctgggggcaggttataaattcgcaagatgttatcagcactattggtcaagatgcaggaaccgtcaggagccctagaaacaggggagagttagaaagctggccagacctatgcttttcaagtgtagggctagggctgagcctgcctctggggtaggtaagcccccctgaatccttgagggaagtagaagacacaaactgctagataaaatgtaagctcagtctaaaagggctacgtgccgcttctcccagctctggggcatccctctcctagaaaactggactgttttacagtgaaaatctcgggggtggtcagctccctgccccgttgttatccttaccacttacagcctttcaagaagttctcaggttgggtgctgaactctgaccaggaaccactgagaaatcgaggcagctgggagaagctgtagttccaagcgctgaaaggaagatgggggacaataaacctgggtcgccaagcaaagggggcagaggcctggagaagtgggtctcaggaccagaggacagatcgacctcacacttcatctccccagactccacactccactgccatcaccacttacgtgtctccctcgtcctctgcagcgggttccccagaggtatcttccatggcttttccagaccccaactctggcccgttcgcttcttcttcagaaaggctcccgtttgcttcttctgcaggaaggcttgtattttcagaaagttcttgctcctcgattcgaggactcaactcactaggggaaccaaactctgtttccaggggagtggagagagaaactgggtccccctcccgtagctcctgggacacagctgagccagccacaggatctggggacaaccggggcggatcccccctttcgggaggcggtggcatcagttcagagtccgcatttttattcatcggggaagcgtggggagaaggatgggctggagctgggtcctggtctgaaggacagcagtccggagctaacggttgagtctccaaagtcttcatactgcagaggaagcacagcggagattagcctcagccaggatggcttcgaagttctcagggatccgacgcagagctaaagaaacccacctgtgcttccctcctcttctgggagtaggcagaagactcccgggaggagaggcgaacagcggacgccaattcttttgaaagcactgtgttccttagcaccgcgggtcgctacgggcctcttgctgtcgcgggatttcggtccaccttccgattgggccgccgcatcccggatcagatttcgcgggcgacccacggaacccgcggagccgggacgtgaaaggttagaaggtttcccgttcccatcaagccctagggctcctcgtggctgctgggagttgtagtctgaacgcttctatcttggcgagaagcgcctacgctccccctaccgagtcccgcggtaattcttaaagcacctgcaccgcccccccgccgcctgcagagggcgcagcaggtcttgcacctcttctgcatctcattctccaggcttcagacctgtctccctcattcaaaaaatatttattatcgagctcttacttgctacccagcactgatataggcactcaggaatacaacaatgaataagatagtagaaaaattctatatcctcataaggcttacgtttccatgtactgaaagcaatgaacaaataaatcttatcagagtgataagggttgtgaaggagattaaataagatggtgtgatataaagtatctgggagaaaacgttagggtgtgatattacggaaagccttcctaaaaaatgacattttaactgatgagaagaaaggatccagctgagagcaaacgcaaaagctttcttccttccacccttcatatttgacacaatgcaggattcctccaaaatgatttccaccaattctgccctcacagctctggcttgcagaattttccaccccaaaatgttagtatctacggcaccaggtcggcgagaatcctgactctgcaccctcctccccaactccatttcctttgcttcctccggcaggcggattacttgcccttacttgtcatggcgactgtccagctttgtgccaggagcctcgcaggggttgatgggattggggttttcccctcccatgtgctcaagactggcgctaaaagttttgagcttctcaaaagtctagagccaccgtccagggagcaggtagctgctgggctccggggacactttgcgttcgggctgggagcgtgctttccacgac

SEQ ID NO: 17202 - DNA, 2300 bp, Homo sapien
cagaaggactgcaccaatggcgtgaggtcctcagttcaattccagagatgttggggcttgggttggggagggaggtgaatcccagagggagcaagtgtcctcactgaaggcactgatagaccctccccatctctccctcagcctgcaccctagcctgcctctcctggccactgcctccggtcagcgtgtgtttcctgagcccacagagagtggggacgaaggagaggagctgggccttcccttgctctccacgcgccacgtccaccttgaatgtcggcttcagctctggtggtgtgggggggcgccagactccagcatccctgatgatcaccagggcgagaaagggcagggaggaacggagggaggtgtgggtgagctgatataaaaaggtttttatgatactagagtcttcgtgtctgttttgggggggcatatgagtgaggtgggggaccaggcagggggactggcgggctccctggtccagcagcagtgggtatggcatattggtcctgaaaccaggcgttgagaggtgggaccaggcaggagccaatggggcggctgagcttggtgtgaagtcaagtgggtgggggtggggcttcatgccattgactggttggttgctaggcaacttggtaaactgaagggggaaacctgtttgaaatctcactcccaaggtgggggcggcaggggtcagggtgagcggggctgagcaggagctgggtcagactgttgggtgtgaccgtgtgagactgtgcagacagtgacagggcgcctgtcgcccacactccacactgtttgccattctccagcagcatggggaccattactcagctctgaggggagcaggagcactctcctccgctccccggggctccccaggaggcagacaacccagttgccagagtcaaggacacacataaaagagtaaaggtgttgaaaaatacagtcgtcacctttgatattgctgttccatgcggggcgcggcgagggtcttattcattcagcggctgtcgctgggcttgtttctccatttgtctgctctgtctttgggggtgggggacgagtgtgtcatttgaagcagtgactcctccctcctccccccaacaccttcccaaacactgagaatggggggactttgaagaaatactgccagcaggggatgtgattttggacctcacaatcaaagggaagggacgaaaggcctggggaggcttgagagggagaggaatgtcacccctgcccagaggtgctgaaagccagggctcttacacccgaaaaggcaactcctcccttcccccaggataattggaaacagcccttcctgcgcagcgccggtttggggttgtaggtacgccccttcttctcccagccccgcttctccccccagccatctaggaaagacccaagtgtatcccctaaactcttgtttttcactaacccccaggtaacaacagcacttggtccatggagcagtgacaaaagagaccccaagagtgggaggtgcgcagcctgggtttggtttctagctttatcccagacttcctgtgtgaccttgggcaagtcacggggcctccctgagcctcagtttcctcatctctgcaatgggatcgttagctctgcccctcccacttcacacaggtagtcgtgacgatcagctccgccgcactttgtaaagcgccaagccttcaaggttattattattctctccaaacctgccgggagcagcggtgttgttttgggatggaggaggaggctgcgggagcgaaaggggtgggttcctcggggtggagagggcgagagcctttctggattcgagagaggaagattccagcagcttgggcgatcggagggcaggaggggagccgggcagaactcagccggagccagaggctcggagagacaaagggggcgtgacagcccgcgccgggggctgaggcggggcggcgggcgggaggtgcgcgaggtgagggaggtgtggggggcgtgggccgcgggatgctgccgcccgctccgcctcgagctccagctccggtttttccctccaccatcctctgcccctccccgcctctcctttaactcccccctcctgggctcgggactggtttcctcccttagcccgctgccctcaatcccagcgaggctggggctccggctcggcgcccccttcctcgctccctggtccggcgccccatgccgcccccgcccggtccccggctcccccagtcccccacttaggcgggctcacagatcccggggtgctggcgcgtgggccgggggcgcgtagggcgcctgcagacggc

SEQ ID NO: 17203 - DNA, 2300 bp, Homo sapien
agctggatgcgggtggtgctatggatgtcaggagtttggagaccccaaaggggcaaggagaagaaagttcatgggtagccgggagggcagtgaggtgggtatttggatctgtgggaggcctgcgtcgggggctgggcttggagggagcctggttactgtcagctctcaggagagagctgcagattaggtgctgcgagtcgctgaggggaaggcagggcagggtgcctccctcccccagagggactgcgcatccgagatgggaggcaagggggttccgtttgggggctctggggacaacttccccaaggctccttgactctcttcacagtctgtctcccaactcttccccacagccagagggtcagtgaactgttggctgaacgatttcccagccagaacatattcctgccttcctggcttgccggcatcttgctggaagaagcctggagccccctgaaccctccttccttcccttttgcatctggaggactccattgccccctcccccaatctttgctgcaaactcttccatcagaccctctgttccatggcatgccagctttgctctgaaaagaggccaggggtcagatgaaacttcaagccacgctgggtaggacagaaccttcgggaggtcacctgggtcccttgcctacatgcggatcccacttcccgctcataaaagagttctgtgttttgaaaaattcctacttccctggggagactgtgtgaggccatgggaagggggtgggctttggagctcatcaaatctttggtcttaatcctagctctgccgctttcagctgtgtggccttgggcatgtcacttaacctttctgagtttgtatcctcaatccttacagctattatgaggattagcggtaaggtgtttgaatgtattatgtgctcattaaaggagagctaggattattgttcctctctttacttcccagcctccctcacacttctctgctctgccatccctccctctcttttccctggatctctttgggtataatctcaatgtcttttctgtactcagtcacccacctgccaactcccagctgcaatgtgagtatcaggtgtgtagcttgagaacataagcttgttttcacagggtagagaaaagggagttagggtgtcctgggggctctttcggatgtggggtgggagtgggacacttgggagtctgggaagatatcaagtagcagtcccctgggacccagtcctgagaccctgtctcagcagctattgatgtccaggaaggggctgcaggggttggcaagttgtggctgtgctgggacagtggatgcctgggtgcactggccaaggagatggtgaagtgtgttggttgtggttagaaaagtcaactcctttcctttccaaagcaatagagcacttgccccagaagtctaagacccagtgtgggattctgagtgggagaatgactcaggcagcaggttcctagaccctggttcccatcagccccaatgatggtcgtggccaaaccaggcatttgccttctgtgctattagctggctaacttaggacactggtctggaccaccctccacacagcccctccctgaaccgccgccccctttgcccggaaatccctgaaattcagtggtggcctgaaggaggggaggctctgcccgcatggttggctgccatggaatagtgaaatcacctgggaggggtgggctgtgtggttccagagaggccagctccttggtaactggcatcctgttgccatggcaacggggctggtgatggagcgggagatggcggtgtgcatgtggtgagggcgggctgaagagtggagtgcatttgggcacaccaaggggcaggagacccctgagcctggcttcctgctgcttccaatgtgaatgcacagagtccttggtgcctgctctataagaagagactttccactcagacaaaggcgggcaagcgtgagctgagaattgctgtcctggaaggttgtggggtgagggaaggaaagttctgggggccaggcctctgacatctcttccttgtccaccttaccctcctccccataggttccaggcagagggtggttatgtgctgtaccctcagatcggggaccggctagacctgctctgcccccgggcccggcctcctggccctcactcctctcctaattatgagttctacaagctgtacctggtagggggtgctcagggccggcgctgtgaggcaccccctgccccaaacctccttctcacttgtgatcgcccagacctggatctccgcttcaccatcaagttccaggagtatagcc

SEQ ID NO: 17204 - DNA, 2300 bp, Homo sapien
ggggctgctgggggagaaggatgagtcaggctgtagagtaatctactctggttctcacgggaccagcccagggcacagccggcagggaggctgctggcatagaggccctgtctcccctggcctctgtctctgatgaatgatccggacagcaggccgagaccctgacccctggaatggacctctctttccaccttctcctagcccccagtcctcatcccctgcttccagccaagatccagaggtctggcccccagctcaccccaaatctgctgttccccactagggactggggtctctagaccttagcctctggctccctttccccctcctcagcctttgctcccctccgggacccaggcgtcctgcccactcccttcaccataacaaccattcttttggagttgcttaagactttaatatcatttcattaagtcagcaagttcagagaaggttgggggcacaaagagactgggggtgggcaaaagagggccaaagtaggggggaggcaaggaaagatcccccacccccctctccgtggagatggctctgagaaatcaaatattgacaatgagggaacagaacttattaaatctgggacagggatgtgtgtggggagctgtgggaatggccggatgcctgggttcggagggtaatgaaggttctgggaggaggaaaagggccgtggctgggaggtgcagcaaggctgaggctcgaggtcacaactcttctgccctttcctttgggatgtacacggtcttgcaaccctggctgtttctctagccccgaagagcccctggggaaaagacccccatcatagctagctgtggttgccccgccttcgtcccttccccctacctccacctctgttgatgagcttcagcagcgtttaatcggattgagcagtaattagcaaagcgagatgtttgattacctatttagcataatgtggggggctgggatccgtaggcacagccacagttggggaggggggtttaagaaaagaaatggggtctgtgcaaagttcctttccccgagggacccatgaaccttgcccctgaggctccccaccccacgcctccagcaaattttcactcctttgggacttttccctaggggttctggccaaccacatcacctctgtctgccacccatggcctatctggctagaggaacacctccacgttccatcttagctgtgctagctgtgcagctggttttggggtgggcggtactcctctccttccattcctgctgtcagcaacaggagtctggctgggcaggaggaattattgggggtcggggggagggaaagggttgacacttctgggaataaagatacggtaggtgggagggtgaggtcagcgctgggatagggtgtggttaatccacttgctcttcaggagtaccagggactgccactcctggtagtgccaggctggcataatgagatctgttaggtgtgaacgccaaacagaaaatgggggaactgaggtgccagcttctcttctcctcatccagcaaagaaaatgtcataaatttcgctcctcatggaaatgtaatcagtgggctcgctgctggctttgtcttaattaggcactattgatggaaacagggagggcgccttcccatccccccactcggcttcctccctgtatttcccaggtctccccaaagctcctcccggcaccaggtacagcggtcttccaggcgccttctagcagccccggcccgcagcgccccctggcaccctcggagatgtaccccggccctcatagccctcccctctcgcctcctctctcacgacgcagcctttgttcctatggagagcgaagcccctcccaggcccggtcaccttccccagggagtccccgcctctcatcccccccaaaaaccagcgatgccttcgaaagccaatcctcagattcccaaaactccagttcccgtcttccctccctttccccgccccgcgccgcccccccgcaatcctagaccccaatccgaactaagaagggggaaggagcaggagggcaagggtgctccaggcccggtttttcccccggatccagctgcacccacggctgcctggaaatcctggaacgccttctacatcgcgaatatccctcgccggcctggcgcccggcgccatctgctggacccgttccggctggggcgcacagacctgggcgcggggtcgggcgattgggttctccctgccttttcaatgtcctgcggggcggtggctcactgtctctcgccccagcccttccagctgggtcctgacaccaggccccccgcaccct

SEQ ID NO: 17205 - DNA, 2300 bp, Homo sapien
ccagcaaggtgggccatggtccttagaccctaaaggtctgcaaggctgatgggtcatttatacctgagtgttgcatagagattgggaaacctgggggtagtgtaaaaagaattaagtttgcttggggaaggacttttttgtgtgtcatccagtctagctggagaacaagtgggagggtagaatgaggtccagatggtctcttcccgagctgaaactcccccatgacggggcctgactctaggtgcagatgattgtgaatgagttcaaggcatccactctgaccattggctggcgagcccaagagatgtcagagaagctgctggtacgcattagtggcaaacgggtatacagggacctggaatttgaagaggaccaaagagagcatcgggcagctgtacagcagaaattgatgaacctgcaccaggatgtggtgaccatcatgaccaactcctatgaggtcttcaagaatgatggtcctgaggtagggttcctgtggccaggatgttgtggttggaaaaaccacagtcccccagttccatcaggccattctcttgctccccgacccttttttcttttttaccagtgtgtacttctcaaacatcgtgctctagtcttggactcagccaaccttcagtcctcacacctcttcctccaggactcagcgtcctgcgtttccattaaaccaacttgtttccttccctgttggctggttctcacttcccaggatgtgccctgtcttccctgaaaagttctctttttcctccctccatcccatcagattcagcagcagtggatgctgtacatgattcggctggaccgcatgatggaggatgccctgcgcctgaatgtgaagtggtcactgctagaactatccaaggctatcaacggggatggaaagaccagcccaaacccactcttccaagtccttgtcattttgaagaatgatctgcaaggaagtgtggcacaggtaagaaccactttgcccccaacatctcaaaaccattgcatcttatttgtcagtttcccttaattcctaaacttggtccttggccttgactttatcctatggccttcagacctgctgctgaagtgtgtgaccttcccagtcctaaggcttttctctccatctccactgggttcctcacaggtggaattctcacccactctgcagactttggcaggtgtggtcaatgacattggcaaccacctcttttccaccatctctgtcttctgccacctccctgacattctcaccaagcgcaagttacatcgtgaacccatccaaacagttgtgggtgagtgggcaacggggagggcacaaggcacagggtttcagaggctgtcgagtgggccaggccaggaggagagaccagggctatttccaggcatactgggccagtcacctccctgacctggggaaaactcaggtcaaggggccagatcggctggcacagtggcttgtgcctgtaatcccagcactttgggaggctgaggcaggcaggtcatttgaggtcaggagttcgagactagcctggccaacatggcaaaaccccatctctactaaaaatccaaaaattagccaggcatggtggcgggtgcctataatcccaactactcaggaggctgaggcaaagaatcaccccggaggcggaggttgcagtgagcggagatcatgccactgcattccagcctgggtgacagagtgagactccatctaaaaaaaaaaacaaaaacaggggggccagactggggaagggagcaggggcttggatgggggttgagattaggtgactgatgctcatgggttttgggatttgggatgggagatgaggaaagacaagcttgggactgggactgggactggcctgtaagaggcctagataccaacagacaagacatcacatcctatgaaggagacactaagagtcacattttcactttctgcctactcctttaccttctaatgtgcatgtttgagctgtatttctctgggaagctggttttagagtggaaggtctggagcagtgggcagggctcaggcagaagttgggttggggtggaagtcagtgagaagcatctttcttggtcctttgaagagcaagatgaggacatcaagaagatccagacccaaatcagcagcggcatgactaacaacgcaagcctgctgcagaactacctcaagacctgggacatgtaccgggagatctgggagatcaacaaggactccttcattcatcgctaccagcgcctcaaccctcctgtctcttcttttgttgccgacattgcccggtgagtggtga

SEQ ID NO: 17206 - DNA, 2300 bp, Homo sapien
accctcttggcccttattttctggcatgaagtttctctgtctttttctgaccataatataactggaacattgccataatatacccagtcctttcctgtctgcctttaatgtcttctagactttctacctgtatgagatagaaaaagcaaagtgttttccctactctctcactcaacacagtacagtccctcagcatccgtgggggattggttccaggacctcccacggataccaaaatccacagatgctccagtccctgatatagaatggagtatctgcatgtaacttatgcacgttcctcccatatactttgaatcctctctagatgagttataatacctaatacaatgtaaatgctatgtaaatagttgttatactgtattgtttagggaataatgacaagaagaaaaagtctgtacatgttcagtgcagatgcaaatttttttgcaatttttttttttttagacggagtctcgctctgttgcccaggctggagtgcagtggcgcagtcttggctcactgcaacctctgcctcccgggttcaagtgactctcctgcctcagcctacctagtagctgggattacaggcacgcgccaccatgcccagctatttttttttttttttgtatttttagtagagacagggtttcaccatgttggccaggctgttcttgaactcctgacctcaggtgatcctccggccttggcctcccaaagtgctgggattacaggcatgagccaccgtgcccagacttttttcaaatatttttgatcctctgttggttgaatccacggatgtggatacggaaggctggctgtacttcacttctgacaccagatgtggtggggattttccccacccaagcagttctccaggggacactggctgggtgtcctatgatataactcaagtctgaaatggtctacctggagttagagtcagatcgcacaggtggagggctcagtcccacaatacacccgccgcttctgatgctaaccgaaagcccagtgttttacctgtgtttctgcctggccggttataaatcaagggttcccaccacccccttgtcaggttcagttaatttgctagagtggctcacagaactcaggaaacacttcacctactattgctgatttattgcaaaggatattttaaaagatacaaataaggctgggcacggtgactcacgcctgtaatcccagcactttgggaggccaaggtgggccgatcacttgaggtcaggagttcaagaacagcctggccaacatggtgaaaccctgtctctacaaaaatacaaaaattagccaggcatgatggcgggtgcctgtaatgccagctactggggaggctgaggcgggagaatcatttgaacccgggaggtggaggttgcagtgagctgagattgcatcattgcactccagcctgggtgacagatcgagactccgtctcaaaaaaaaaaatcagaaattgtggggcaggtgcagtggctcatgcctgtaatcccagcacgttgggaggctgaggtgggaggatcacttgaggtcaggagtttgagaccagcctgggcaaaataacaagacgccatctctacaaaaaaagaaagagagagagagagcaataaattgttgcaatactgggcccacattcattcccatagggaaaaaaaaccaggctggagctgagggacggctgcctgccctgggccagcccacctgcctgttccacagtgggaaacagaggaagattctcatgtaggggaggtggtgtgatggagactgtttaacaagctgattctggtagtggtgtgtagaacaaaccagaggaatgagagcctgaaatcaagaagagcccttgggaagctgttggcaatgacccaggcaggaagtgatagaatcccgaccaggatggtgggggtagtgttggtggcaacagaaaggaaggcggactcgagacacacggggaaggtggaccttacaggacaccgcgctttccggaagccccgcctctccacaccctgtcctattctttcccccaggttgctgggagaaaaacggcaggagctgctggcccaagccaataaactgcggacaggcttgttcaagatcgacgaaactagggaaaaggtgcaagtgatgtcgttggagctggaggatgccaagaagaaggtggctgagttccagaagcagtgtgaggagtacctggtcatcattgtgcagcagaagcgggaggcagatgagcagcagaaggtccagggcccacgcccaccccccgtgccccactcccaccagtgccggctact

SEQ ID NO: 17207 - DNA, 2300 bp, Homo sapien
cccggcgttctttgcacctccctcggctcctttcgggctgtctgtccctgtctccactcgtccttcttcgcttctcccggttatataactcttcctctcgccgtgtcctggtttcaactccacagactccgccctggaacagcgcggggaggggcgggagagttggggacccagacagattccggctggcggccggctggggcacgggggatcctgcagatggaagacggagccccgcgggacccggtgcccccgtccccgcctgccggcccccaccgagatctcgcccaggagagagaaggcacagtatctccgaggggcgtgtcgggccgactcccgtcagaaatgtgggttgggaggtcagggctgcaggcggagaggaggagacaggcaagaggcctgagtccctgggattggagtcgtattaggggtaaaagagataaggacgcctgggtttcttcttatgtctcctttttgggttcccagaattcctaagggtgtttccagtgtttccaggaagcttagccagcacacccactccgccccgtaggggtcaaaggtctgtgttagaggtggcctgggatgatgtcactagtgcacgtgccccgggatggttgccaggcaatgaggcttcctcccccttctattccctcccacctctgccccgagtccagttccagtcccgtgccatctctttcccctctcccttcccgtggtcttagcatcctgcaggtgggaaaccccggcctggagttttgtgagggggaggggcacgggtgtggtgtggctgaaagactttgcccctttgctgggctgagggagccttgggtcacttttccctagattggcacagaagagcttcccctccaaggctccgcccccatagaaaaagctacctagccgtcattttactttcccacctgctgcatggccaagtgtcctattgcccccttccccagattgatttgaagtgggagtggttgaaagacggaagagttgtgtgtagtatgggggggggttcactacacaccagcttatccctgaaatccccataatggcacacccccatctgcaaacaatgaaaggaaaagggtcaagaaacagtattaggctgaaaagtcagggtctttattgtgtgtatgcgggtgaatcggtttgtagcctctcacttggtggagggggactcagttgattgctatggttgttcttctctattaagtcccagggttggtgatggtattggaatgaatcggtttgtgcttttatgtaccttagagcttgggctgtcagatcagacctggattctaattctagctctgtcacttagtggctactaggacttggagaggtcagaacctctctgagcctcgtatgttaatcttgaacatttaaatatcaacacctaccttgaaggccgctgggaggaaaaaaatgagataatttatgcaaatcacttagcacagtgcctggcacagaatgaacacagaatgagtgcttgttgttatgaaatacttttattattaaatggtgttagttactagtttattattattgctgtgggtctgctccaaaccagcggtaaccgtaggagtttgttaaggggtagtggatagtttgtgttaatttggagattggggttagggggctggggattagcttcaactgctttgtgcattttatttgatgaaggctttaggcagatttgtattgctttctttaggattatttttttttctcttggacaagaaatagctaagactattccgtgggccttgaaaataaaataattgtattatggttcttgattttgaagcaagaccccagccccctcccgtgttgatctctggagcctttcgttttgcagagggactccacagtttctctagtggggacagggctaggctgaggggtgtgtaaaaggttggggtgggtgggtggagagagactagtgctgggggctgggggggcgggtagttaaaggaagagaccggaagggaggaggagggagcctgctggtggggagggagggaggggaggaggaggtggaggaggaggaggaggaggagggagggggttggggagagcctgctacagttctttgtttgactccgggactcagggacggggaggaggagggagggaatagaagggggaggaagcccccccccccacacacacacaaacacacacaccccagctgttggacagatgaattacagcctccggcttggggccagggctggtgagggattaaagctctggggctggccctttaaatggctgttagcccctcccccact

SEQ ID NO: 17208 - DNA, 2300 bp, Homo sapien
tcccggctgctcccccaggcccaggcccccgccccccaggagcagagagccatggctgcctgcctgccacccgtccccccggaagtgaccttagagagagcagagttcagaggtcgcggatggactccagcgtttcaccagcagcaaccaccgcctgcgtgccttacgccccttcccggccccctggcctccccggcaccaccaccagcagcagcagtagcagcagcagcaacactggtctccggggcgtggagccgaacccaggcattgtgagtgacaactgagggtggagggggggatgggtggagcttgtcttgaggcagcccgagcaatgctcctaccacctgcttctacacttgcagcccggcgctgaccattaccaaactcccgcgctggaggtctctcaccatggccgcctggggccctcggcacacagcagtcggaaaccgttcttgggggctcccgctgccactccccacctatccctgccacctggaccttcctcaccccctccacccccctgtccccgcctcttacgccccccaccaccccctgcctggttgaagggtccggcctgccgggcagcccgagaggatggagagatcttagaagagctcttctttgggactgagggacccccccgccctgccccaccacccctcccccatcgcgagggcttcttggggcctccggcctcccgcttttctgtgggcactcaggattctcacacccctcccactcccccaaccccaaccaccagcagtagcaacagcaacagtggcagccacagcagcagccctgctgggcctgtgtcctttcccccaccaccctatctggccagaagtatagacccccttccccggcctcccagcccagcacagaacccccaggacccacctcttgtacccctgactcttgccctgcctccagcccctccttcctcctgccaccaaaatacctcaggaagcttcaggcgcccggagagcccccggcccagggtctccttcccaaagacccccgaggtggggccggggccacccccaggccccctgagtaaagccccccagcctgtgccgcccggggttggggagctgcctgcccgaggccctcgactctttgattttccccccactccgctggaggaccagtttgaggagccagccgaattcaagatcctacctgatgggctggccaacatcatgaagatgctggacgaatccattcgcaaggaagaggaacagcaacaacacgaagcaggcgtggccccccaacccccgctgaaggagccctttgcatctctgcagtctcctttccccaccgacacagcccccaccactactgctcctgctgtcgccgtcaccaccaccaccaccaccaccaccaccaccacggccacccaggaagaggagaagaagccaccaccagccctaccaccaccaccgcctctagccaagttccctccaccctctcagccacagccaccaccacccccaccccccagcccggccagcctgctcaaatccttggcctccgtgctggagggacaaaagtactgttatcgggggactggagcagctgtttccacccggcctgggcccttgcccaccactcagtattcccctggccccccatcaggtgctaccgccctgccgcccacctcagcggcccctagcgcccagggctccccacagccctctgcttcctcgtcatctcagttctctacctcaggcgggccctgggcccgggagcgcagggcgggcgaagagccagtcccgggccccatgacccccacccaaccgcccccacccctatctctgccccctgctcgctctgagtctgaggtgctagaagagatcagccgggcttgcgagacccttgtggagcgggtgggccggagtgccactgacccagccgacccagtggacacagcagagccagcggacagtgggactgagcgactgctgccccccgcacaggccaaggaggaggctggcggggtggcggcagtgtcaggcagctgtaagcggcgacagaaggagcatcagaaggagcatcggcggcacaggcgggcctgtaaggacagtgtgggtcgtcggccccgtgagggcagggcaaaggccaaggccaaggtccccaaagaaaagagccgccgggtgctggggaacctggacctgcagagcgaggagatccagggtcgtgagaagtcccggcccgatcttggcggggcctccaaggccaagccacccacagctccagcccctccatcagctcctgcaccttctgcccagcccacacccccg

SEQ ID NO: 17209 - DNA, 2300 bp, Homo sapien
gaataatacagattttagaaaacccctgaaaatctgtgatgttggggctctctctcagtcttttattgcgcagaatttcaaacacatacaaaattagagaaagctgtatagaaatacaaaggtcaatcttgtctcctttatacctgtatgttctcccttccccacactgagttatttgaagcacatttcaggctttcacttgactgaatctttaatctttaattggatccaatggtaactcaaagaagctgctgttttgactagactccaaatggggaaaaaagaagctgccattcattgagcacctactatgtgtctgtcaggtgcggtgcacatggccacgcacacatctgggaacactggtctaggggctgagtccttgagcagctgcaggagaaagagggctggtgaggatgcagatagaggccagcactcccagcttcctgtggggctagggctcctgcctatttcttctgggctgagctctgctaaacctatgaccaccctgtcagagccagaggagtaggaagggaaagggtcgattgggtcctcggtccctatcctctgcctctgccccgacaccctgctcggccctcccttccagacttgggcctcttctccaccaagaccctggtggaagcgagtggcgaacacaccgtggaagttcgcacccaggtgcagcagccctcagatgagaactgggatctgacaggcactcggcagatctggccttgtgagagctcccgttcccacaccaccattgccaagtacgcacagtaccaggcctcatccttccaggagtctctgcaggtgagatgagaacgtggccagaggcaggtcctgggacggggctgcggtgggagggctctcgaaaggtctctgacccaggcctgcctaccctctggctgaacaggaggagaaggagagtgaggatgaggagtcagaggagccagacagcaccactggaacccctcctaggtactgtgcaggtgtgccccttctgttcctgcttccttcccctccctctgctctccaccaacctgtgctcttcgccccagcagcagcgcaccagacccgaagaaccatcacatcatcaagtttggcaccaacatcgacttgtctgatgctaagcggtcagtggggctgaggccagggaagttggggcaggagtgctgctaggacctcgtggcgggggcggggtgtagcctctcgtcgcacttccgcaccgcaggtggaagccccagctgcaggagctgctgaagctgcccgccttcatgcgggtaacatccacgggcaacatgctgagccacgtgggccacaccatcctgggcatgaacacggtgcagctgtacatgaaggtgcccggcagccgaacgccaggtgcgctccacgcctgtgcgcgctgatgctggaagcgcgagaggaggggctggcggcggcgctcagccgtcagccaatgagggcagagggcggggctatcggggatcgcagttccgacctggccagccatgccgttctctgtcgacccctgcaggccaccaggagaataacaacttctgctccgtcaacatcaacattggcccaggcgactgcgagtggttcgcggtgcacgagcactactgggagaccatcagcgctttctgtgatcggtgcgtgccgtcctgcgcaagtcagactgccgcgtccccgccctcggtccccagttcccacctgacctgtggccaccccgcaggcacggcgtggactacttgacgggttcctggtggccaatcctggatgatctctatgcatccaatattcctgtgtaccgcttcgtgcagcgacccggagacctcgtgtggattaatgcggggactgtgcactgggtgcaggccaccggctggtgcaacaacattgcctggaacgtggggcccctcaccggtgagagggtggggcaggtgttggcgtggtgtggcgcctcagcggcaagggcctgggaggctggggcttggagagccgccagcagtgagggaaggggcttgggcctaggtgtctgggggctgtttgagagtcctgttgtgatcgcctttggcccgcagcctatcagtaccagctggccctggaacgatacgagtggaatgaggtgaagaacgtcaaatccatcgtgcccatgattcacgtgtcatggaacgtggctcgcacggtcaaaatcagcgaccccgacttgttcaagatgatcaagtgaggaccctatttgggtgggagcccacctccactgactggtcccttttcttgttcttcctgtctgactccaccccatt

SEQ ID NO: 17210 - DNA, 2300 bp, Homo sapien
cctccttgccggtggtctcaacacaaccccactgctccccaggttctgcctgctgcagtccatgaagcactgccaggtgcaacgcgagagcctggtgcgggcagggaagaaaatcgcttaccagggccgtgtcaaggacgagccagcctactactgcaacgagtgcgatgtgagtgggccggctctgctgctctccctgagtgtccacagtggccctccctccccctgactgcactgtcctccctgccccaggtggaggtgtttaacatcctgttcgtgacaagtgagaatggcagccgcaacacgtacctggtacactgcgagggctgtgcccggcgccgcagcgcaggcctgcagggcgtggtggtgctggagcagtaccgcactgaggagctggctcaggcctacgacgccttcacgctggtgagggcccggcgggcgcgcgggcagcggaggagggcactggggcaggctgcagggacgggcttcgggagcccggccgcgcctttccctgagcccccgccggctttctccccccaggccccagccagcacgtcgcgatgaggccggacgccccgcccgcctgcctgcccgcgcaaggcgccgcggggccaccagcacatgcctgggctggacctaggtcccgcctgtggccgagaagggggtcgggcccagcccttccaccccattggcagctcccctcacttaatttattaagaaaaactttttttttttttttagcaaatatgaggaaaaaaggaaaaaaaatgggagacgggggagggggctggcagcccctcgcccaccagcgcctcccctcaccgactttggcctttttagcaacagacacaaggaccaggctccggcggcggcgggggtcacatacgggttccctcaccctgccagccgcccgcccgcccggcgcagatgcacgcggctcgtgtatgtacatagacgttacggcagccgaggtttttaatgagattctttctatgggctttacccctcccccggaacctccttttttacttccaatgctagctgtgacccctgtacatgtctctttattcacttggttatgatttgtattttttgttcttttcttgtttttttgtttttaatttataacagtcccactcacctctatttattcatttttgggaaaacccgacctcccacacccccaagccatcctgcccgcccctccagggaccgcccgtcgccgggctctccccgcgccccagtgtgtgtccgggcccggcccgaccgtctccacccgtccgcccgcggctccagccgggttctcatggtgctcaaacccgctcccctcccctacgtcctgcactttctcggaccagtccccccactcccgacccgaccccagccccacctgagggtgagcaactcctgtactgtaggggaagaagtgggaactgaaatggtattttgtaaaaaaaataaataaaataaaaaaattaaaggttttaaagaaagaactatgaggaaaaggaaccccgtccttcccagccccggccaactttaaaaaacacagaccttcacccccacccccttttctttttaagtgtgaaacaacccagggccagggcctcactggggcagggacaccccggggtgagtttctctggggctttattttcgttttgttggttgttttttctccacgctggggctgcggaggggtggggggtttacagtcccgcaccctcgcactgcactgtctctctgccccaggggcagaggggtcttcccaaccctacccctattttcggtgatttttgtgtgagaatattaatattaaaaataaacggagaaaaaaaatcctgtttcgctaacggctggtggtagcaggttgagtaccgggagggctgcaagaccgtgattgatggggaggactgcgcagaccctggcgagggtgagcccctccccggaggcgcctgtggaatgtccagggctctggtccgctcctcgggatggggggtgcctaatcctagagccgcattccaggataaggggggtggggagaggctgggccgggggaggggcaggaaagagggctataagggcagcggcccaggcgggcgggatccaggcgggccatggcggatgtccccggggcacagcgagcggttcctggtgacggcccagagccccgggaccccctggactgttgggcctgcgctgttcttgtaacagcccagaatctgctggtggctgccttcaatcttctcctgctggtgctggtgctagggaccatcttgctacccgctgtcaccatgctg

SEQ ID NO: 17211 - DNA, 2300 bp, Homo sapien
cagccgcggcaaatccgggcctcaccagggtcccaggccgttcccacatcaggaaaggtctgggtctaatgaccctcgagtcaagaacaaccctgacggctgccctccctcttattcggcccaaggacttgaagcccggcatcttccgacctgccctgcccccacccctgcctgagcggagtcctagcatccccttgggagcagcagcgtcagtggacccagtgctgagaaaagcccccacatcccggaaaacccactttcctttcacgacccacatctcaatcctgaacatctaggctggaacctgcacacctccccctcagctccgtcgtgaatgggacaacaatctcgtgccctcgttttatggtgcagcttctctagtatttctggggctggggggcggggctggaggggaaggagtgtccacgcatcaataaagatttaacgaactgaacgcgctctgcgaacagaggcgtggcacaagtactatcacccctgccctgtgccgaggaacaggaaacatgtgccagggctacaaatgagcagagaggagcatccttgagccccctggccttatcgcttttgtccgttcttcctggccagacctcagagatctgttcctgaccccaggcacctccccctcaatagagtggaggggcccagcctcggccgcctgccgctgctccccttggggacctgagcccgttctctgaccccagcttagaggaactcggtgttgccaggccggggtgggaaacaatgggccttccggagcaggatgacaccccctcccgccacaattctggagcagcagccgtgggagggaagatgcaggggcccaccctggggcctgttggtccgtcattcagccctgccccccatctctacccctgaacttgagagaacctttggcacccctggacatcttggttgggagaggagggttgagggtgctcccgacttcagatgagccctttcctctagggatggggtgtgctatcctgcaccggcatcccagctacacacagacacaggcccattcggtcataagtttaatgaagtctgaaaggtaagcgccatcgtggtcagagatacggaggcccggtcagactctccctctgcacctcaatggaaacgatgtggtgtccgggtaccatggccaggcccagcacacggggctccccggcagagaaggaatctggaaagaaggatcagagcatcaggaaagtaggccagaatcagtcccgcccctctgagccacgaaaacgagccccagaaaacaagggttgcagccaggcccttaaggggaaatgccttgcgtaaggttccgccacattaccaggcgggtgtgcattccccgggcactgacccgacggcttgaggaactcctgcgccgagcccaggatgacattgcagtcacggtcagtgcagaggaagcagccgaccagtgtccgtccatctgtcatgcgaatgcgcatagtcttgttgagcagcgcctctagctgctgtcgggcgcgctcagccgccgagtcctcgcgctctccgtccgaatcctgcgcggggtgtaacaagcgctcagaccgcgcagcccaggctgcccgcccgcggaaccacagctcccggcagcccgcggggcactcacacaaagcccagaggctgccgggagctgcagttccccaccccctccatcttgctgcttgactgcccctcagtcccagaaccagagcccgtgctaaccccagcactggagctgctctgacgccgactgcaacagccattctcttctcgtagcagcatggtcggtccagctccggccatttgcccggaggcctcctctgggcctttcaacttcctaagcacctttcaggttgggtggtccgagatctcgcgagcgctcccgacctctttcctttcgcgagatcccctctcctccccctcctagtctcctcggcaacggcacagatctcgcgagcttctcctacttctctagcgctgtggctcactgaagcgtactacgccggatgtcttaagatatcgcgagacctttacctctggtttcttacacatcctttagaaactggaatttagcgagaatacattctttcatactgcctcctcccttgtttttctgtctcagagagatagtctgtcctaaatatcccatgtagcccaggccactgaattaaaacggagcgtattcgttctctgccccaccccgcaactcctgaaagcggcgcaactcaattacttgatccttatatgccccacgcgggactcatactacgtttcccgtgaacacg

SEQ ID NO: 17212 - DNA, 2300 bp, Homo sapien
aaatcccatcttcctgcagacatctcatttccatcattgccaaaaaagtccttccatccctcacccctgtagaactactctctcttaactatcaaacagttctgcctgaactctgactatcctcttctacatctccctaaaccaaggtacttgatcttcttgtatcattcccaaagattaattcactaattttctcagagcaaactgtaatgaaggcagggaatagggcctttacacttcagaagggcacaggctagctcctggagaggagtggagatctgggtccaggcacccctcggccccaccacttttcctcaaggcacagaaaaagccaaactcgaaatacgtcttgagtctacacgagtgtacatctccttgcctacaactccgtgagatcatcattgaagtacagaagtattgcaggtgtgtgaagtgtaccgtccatactgagatagtcaaattcttcctcctcatcccggatcccattctcttccagggtaaaatccatgttcaggttcttcccttcatatttccacgtgtagctggcagcatgtgagttataggggagatagcggtgtaggatttcccatatggactccagaacccccacctggagaacacagaagcaccccacccccagaattctggatggagtatacatatacacacgctgggatcaaagtgcctcccttggcagatagcagcttcaggtactctacggccccgggaaaaaaaagctgaaactccagcatgcaatgagcagaccctaaagtcctacagatcttaatggcagccacttctaactaccggatggccataaagggtcaactgtcccctcactatatccatgcaacagagtagattaaaaagaaagtccaattgctgtccaaaacggcgtgtaagagcttcgaaggaccaccatcactaagatacatgaactgctgttcccaggcttataaaggagtctcttgtccccctgtgacccagacactcctagaattcccaaccctggggacctaggtgctgtgctttcctcagttgcctcaatgtaaaggacagaaaatacactcccaccggttatggaaaaaatgttgccctgaagatcggcctggagatttgctgggattccccattccttctaacctgctccttgtcaccagttctcacctccagtgtgtgctcctgcgacgtgagcgtgttaatgatgcggatgctccgggtcttggcagacagccgccccacctcataatacgacccctgccaccagggcttcccaaaatcgttggcccagtccgaacagggcagctgaggcggaacgtgcacaaagcggccccgcggggtgcagtacctcaggcagccggtcagcggatctatgtgcttgcggatctttaaaggagggtttggggcgagggtgtcagagcagccattaggctctggctagcctccgcctttccttcccatccccgctctccatttcctctacccacaatcccaggttccagcataactcacgtctctggtctttggatcaaaccagtggctgatatcctggcctgcaacttccacgatgggtttcagcagcaggttcccttgaaaagagcagcacagccactgtcaatgccagcccttcgagaaccaggcaaacgcgcgcgtgcacacacacacactccggccccggcccaacgtgtggcccttacccttgtattcctgtgccaatgacgttaggtcgtacacgcgtcccaggtaagatacccagaggtcttcgggcctgttatgttgggccacctccgccggcgtgaaatagcgacgctgaaaatactccaagtctggcccagccaccaggccccggcgcggcatggctcttgctctgtcggtcactggatctcttggttactcctttgctcctcagcacgtactcactactactacgacctccgtcgcgtccgggagccgaggggagagcgtttatccgctgacatggaaaccattgtccttttccggccaccgtccactgagataaatatcaggggcggggtttggactgcacgtgttcacgggaaacgtagtatgagtcccgcgtggggcatataaggatcaagtaattgagttgcgccgctttcaggagttgcggggtggggcagagaacgaatacgctccgttttaattcagtggcctgggctacatgggatatttaggacagactatctctctgagacagaaaaacaagggaggaggcagtatgaaagaatgtattctcgctaaattccagtttctaaaggatgtgtaagaaaccagaggta

SEQ ID NO: 17213 - DNA, 2300 bp, Homo sapien
ttttctccaagttaccatcacctcttgtctaaactgctacggaaacttcctaacctgttctcccatttccacttctgacttccatgctgcaatgagagtcagctatgaaaaacaaacctaaacatcgaactttccttagcttcttcagtggcttccaactgcttttggaataaagtcctaaattcaaagatcttgtataaatcaggctcatctcgcaacacccctctttgttctctatggcctagacacactggctttcagttcattacatgtcttgcctcagaccctcacacactgtcctctctgcctgcaacactcttcctttcactttccacctagctgatcctaaatgttccttcctcagggaggtcttttctgatttcttggtgggtcaagactttctgataaatcagttagcaccatgcattttccagagtttttattacaattgtaaaattatggctgtaataggctggctgcgctgctagattgtaagctcacgagggcagagatcttgttcacatcttgctcactgctatattctcattgctgagcacacagttgcagctcaataaattttgaatgaactccaatgttaagtgaactcatccgtctatacctagtgggggggatgttgtgtcctagtaggcaaggaaggaccaagaaataggatgtctggttcctgtgctatagtctctatccataggattcactttccttgcttccccaatatccaaaaccaaaagttattccatagagggtctctggccaggtgcagtgactcacgcctgtaatcccagaactttgggaggccgaggcatggggatcacctgaggtcaggagttcaagaccagcctggccaacctggcaaaagcctgtttctactaaaaatccaaaaaattagccgggcgtggtggcacacacctataatcccagctacttgggaggctgaggcaggagaatcgcttgaacccgggagatggaggttgcattgagctgagatagtgccattgcactccagcctgggcaacaagaacgaaactccatctaaaaaaaaaaaaaaaaaagttaaaaaaaaaaaagagggtctcaccagatttttgggggccaatccatctgtcatttccccatatggccaccaggtggctgtaattacctatagagtcagggagacaagcctggagggaaaacccttccaaagttaggatgggaaggtggcctttggagatttataagggggagggaaggacaagaaaacaaggaaaaaccacatggccaccgttctattagcattaggtttatgcctgcttttttttctctcacaagcacatggcaggaaaggagtgcagttaggaattcatgggctagaacaaaaaggaggtcctgattacaggtatgggagtgtatggggcaaagtatggagctgacaaagggataaagacatcacaaatttttaaaataatagaatgcattcacttattaatacttaaaaaaaatctttccagtaggcactgctttgttctctaaatagccaagtggatatttgcatgaggagtatgtaaataatgctttagcctaaaacccagaaagcaaacagaacatgagtgtagggtccaagtcctcttgtggtaatctcttttgtgttagagggtggtgggtgaaggatggaatgctgaagggaaggctgccgtcctcagtgaatcacagcagcttcaaaggactcaactggcaagatttcccacaggtgaggtccctacatgcccacattactgggggtcataaagaggcatatgttccttgtaggaagcttgcctgctcactgggataaagcatgcacacatgaaaagataaatgaacatagtacatgataaaggcttaagttatggtatagaaaagtttctacccttacagcaagtcacaggtggattactaacctggccatcctgaaactgtttctaaatactctgtgtgtgtgtgtctgtggatgtgtattatttttggaaaatggtgctataatttccatcagattctccaaatagcccaaccccctactcctactcctgaaatagcacgcacacacacacatacacaacaatactttaaacagcctcaaaagtaaaatatcaaaagttataatacaatgtggtcccaatattctggcatctgtctcaatggtctgcctcagcctgtggcagaaccatggcaacccatggcagaaattcctaaagctctaacctttggggctaaatttatgacgagtctcaagtgttttactactgtaccaaatgttaatctggctg

SEQ ID NO: 17214 - DNA, 2300 bp, Homo sapien
gaatgggagggactgctaatggatatggggtttcttttgggggtgatggaaatgtctggaattctggataatggtgatagttgcacagccttgtgaatatactaaaaacccctgaattcactttaaaatggtgaataaggtatattaattctatctgaatttctttttaatacaaaccagccaatacagtgactcacacctgtaatcccagtgcactttgggaggccaagagaggaggatcgcttgaggccaggagtttaagaccagcctgagcaacatagcaagactatctctacaaaaaaagtttaaaaattagccaggcatggtggctcatgcctgtagtcctacctactcaggaaactgaagcaggaggagagctcagcccaggagctggagcctgcagtgagctatgattacaccactgcactgcagcctgggcaacacagtgagactctgtctctaaaaaaaaaacagtacaaaccaagaaaagtattgtacttgtcatttggtcacctttaaagccagttttagtgaggaagttaaatatcaattaaagattgtgagaaaccattaaaatattacttatggagggttttttgttttgttttgttttgttttagagacagggtcttgctttgtcacccaggctggagtgcagtggcgtgatcacagctcactgcagcctcgaactcctaggctcaagctttcctcctccctcatcctcccaagtagctggactacaggcacacaccaccacaaccggatagttttaaaattttttgtagagatgggatctcgctgtgtcgttcaaattggtcttaaactcttggcctcaagcgatcctcccaccagtggccttctgaagtgttgggattacaggtgtgagccaccacacccgacctaattttttttttttttttttttttttgagatggagttttgctcttattgccgaggctggagtgcagtggcacaatcttggttcactgcaacctccacctcctggttcaagcgattctcctgcctcagcctcctaggtagctaggattacaggcgcccgccaccacacccagctaatttttgtatttttagtagagatggggtttcaccatgttggccaggctggtctcaaactcctgacctcaagtgatccacccaccttggcctcccaaagtgctgggattacaggtgtgagccactgcacctggctaattctttatctctactgttgcctccagattccctcatcttgtgtaagaagcccctatttctttaaggctgcagcagtcttgctgtgtgctccttaccttctcttcctcagtgttttctacttatctcctgacatttccttcattcattgaagactgacatctggcttagtcctgccatcatcttgggtgaccttaggatccacatgaatgatctattcatcacccagactttttggtcccttgatccccttatttccagagacctttctagccatcccacttctggccccatctctggacttccttttgaagtattaaattcaaacccccaacttgggccacaactttctatccttctagccccctcatttacttctactctgttcttggacccaccatgagacaatgtagtcccttagctcctcattttctcctaatcagctataccatcttcacctcttttcctatccagcttaagttccatggtctatcattttaaccatgctcctgccactgtcttggtgccctcttcttattttccttcctgcaaacccctggccttgtatcactttggttgcttgtttacacccaggatgcaaagggctgctgaagaaaacaccatgaccattcagaccagtgtttctgttcaggaatcctttttcctagtcagctttcttttagttctccacagtgacttcctcaaaaccttctccttacactagttcattttaaagaaaaggatacctatgttcattttaatatcataatggatagaaaatcttatctacttccaggagatagattatcatatgagaactcccttgaaattccaatactcaactacatgtttaactctatccatatttgtccttttatcctgtcctcctgtcctgtctgaagctaatgcctatacttgggctcttagtctcacccctgccaccttctcagggactaatggttagcagcgatcctctaactcagtcctttatttccgattccacttgctctttcccagtcacattaaaatgtgctcaaatctccttatctttgaaagaaatactctggacccctttagctgccaccttaccg

SEQ ID NO: 17215 - DNA, 2300 bp, Homo sapien
accaacacccaataaagtgcattagtgtggggagtggaacattaataaagaacattttagcttcataaacaaaaatgtgcgtcatcttcccagtcactaatactttctggttgctgcccacctacccctccctctcagggtgctcctgagcaccgccgaagatgggtggccagcagttacactggagaggtagaggaataacccagagagaaatgattccacaggcatggaatgggaagcaagggaaggggcaaagggagatcaaaggaatgggaggaagctagagtaagaaagggtcaacaagaatgaaagagggtagaactgagctatttgccctccttcctttgctccatttggcaaggatcattttctgtctagacctctctgggcaaatctctgtatgagaaagctactttgggactcctttccaactgtccaattcctggtaccactttaccataaacactggggtacagttggaaatcacaggtcagaaagttagatgaaaacgcctgggtataacccctacctctgctttttctcagttccagctcctttctctttcacggtacctcagttgcttctactttatcggatagtgttggagatcatggagggaaggcaaatatactgaaacggaagaaaagagaacataatttcacgatcttcagatttgactctttcctctttatcctaaaaatttgttgtttaccccccaaattaatttctcaagtcagttgaattttacattctaacaattggaggaggggaaagcgagggaaaggggaaaagagtaaagataaaatttataacaattataaatcactgaaaaggctgggtaaaggggagaatcaaacatggactcctttgaaaaaaactcaatcatcgtatctattcatatctctcccccaaaagtcactaggatttctatcactttttttaaagaaagcagaaaaaaatccagtcccgcttctcatttaaaagatatgtacacaattaaatgcgttgtgacttcaatgaggtatgtagaaacagagttatatataaacatatatttcatctttttccttttcaatgcctgaaggggaaaaaaaccttcacatcaaaccactcccttctgaagtattcaaaaaaaaaaaagcttttctttagagaagggaggtggggaggaagagactagtaaagaaaataaaaaaaattaaatctagttggactagtatctaactagttaacctttaacaatttatgctgatgtcagactgagcatgagtactgattaatgccccccctcaaatattttttataaggggggagttagtcacagcagccatttttgttttatgcagaaatccttcatgcccccccaacacacacacacacacacacacacttcagtacacaaggaaaatatctctattaatctgtgcactaatcagttatgaaaaaggagaaatttgtgggtttctgggtaaaggcttggagatgggggtgtaacagggaggagaatgggggggtgaaaaatgaaatattaagccagccattttgtttgaaaaggggattttcccccctctccctttctttatggagggggtggcggtgctggagggggggttgttttaaaaataatttcaaggcggccatcttagtgcctcagctctgagaaatatttctgagcgcccccctcagaatttaaatatatttaaagcaacggagaggggggcagagagaagtcgaaaacttttatatatatacatatatatatatatatatatgtatatatatatatattttaaatccccctttcttgttctcttgggaggaaagagagaaggaaaaaaagtctttcctcaattttttccaagacaatttttgggggtggtttggcccccctcctcagacggcggccccgagggtgggggtttcggaggggggtggcccgggggtttggggggctgggggaggcggtgaggaggaggaggacgccgccgccgaggaggaggaggaggaggaggaggaggaggaggaggaggtggtggtggtagcggtgggggaggcgggcgggcggtgggtgggggggtggtgggggggccagagccacaggatggcttcccctctgagggacgaggaggaggaggaggaggagatggtggtgtcggaggaggaagaagaggaggaagaagagggcgacgaggaggaggaggaggaggtggaggcggccgacgaggacgatgaggaggacgacgacgagggagtactcgggcgcgggccgggccacgaccggggccgcgaccgccacagcc

SEQ ID NO: 17216 - DNA, 2300 bp, Homo sapien
gtggggagagggtgcctttggggttgcctccggcagaggcgctgaaaagagggaaagaaaggccgtcaggtcctgccaggggcttggcagcgctcacctatttgtattgggacttggagtctggggtggggtggtgtgggtcccggatctgggtacgttggggagagaagcgtgaaaggatccgaggttgagatgggtctttgtgtcaacccggcctcccctttccctcttggctttctgaatagaccagaagagacgtcagaggctgcttacattttacaactgaaatgaaaacccacctcccctctccccctgggcaatttttatctccctttcagccctccaagtcgaatgagtgacccagatacaccccctcagatgactttcggaggtaaaacttcgggaaattatttttagcacactcattatttctgtctacctaagtgtggggaaaagaaccctcctctaaggaaatttgttcaggctgccctcgctcttccttgtctagagtatgcatttgtgcacaggagagatttccattgttttccattccgactgctttgattctcaccattttgttttacattcttactcaagaccaattttatcccttccccctctctccagtctccttacattgttaaacgtttaaaataatagcagtcgtgttggtgggggaagggagcaggaagccaaaaactcatttcttctccctcccccttctggcaagtcgagagaaataatataacataatatatagatgtgattccttgggggtgggggtggggaatgattgtgggtggtgcggaaaattctggtagtttctttgcaaaaggtctgaaaatacaaacccaccccctgcctgcagtacgcatgtgcagcagacctattatggtggtgcgttgtgggggagggaggggaatttgagaaaaaataaatatatgtgtgagagattgatggtgagattagaagaagagaggggcgggcgggaggcgaggcttcggccgagactcctcccgcttgctcgggcggccaggctccgccctgcgccctccggcccccgcctctctcctccctgcctccctgagatccgagccggggatgtgggagagtctgggctccaggccagcattgagtggctgctgagaccgaggttgggacttagatttgctttattacccttccttgcttttccttgccgttctcgctttgcctctcccgccaccgacgcctgcccaagttcgggaacctcccgctggggtggggagtagagtgaaccggcttgtgcaccacccctggctggtggtggccgaggccgtgtccctgaaccttagccagttggcctgcccttgccactgcctcggcagcctgcgtttccatgttcaagtcaaccgaagtccctggggccagggggagccggctgctggggcatggcgccttccttgctgacttcctattacagtccccattccgtttcacacccgggctctggcagccacccccctgcacacacgcacacagtcctagagtgtcttcctgcacaaggggacacaggatgctggagttagcaggaaaggtggcactgaaggaaggcgaggcagcgactctgaggcagtggaaacggaggcctctggtgttaattgtggctaattttccgttggctgttgagggaaggagaaaggattgtgtgtcctagagctaggggctgggccaagcccaggctttcccatcttgcatcggctgcctctctctgtactagacaggtctggctggttagtctagtgcttggtaggggagggacgtgaaccagagccccagggccccaggtctgtggggcatcctgtcttcctttatgtggggtaactctccgttccgttccccaagccttcacagagtgacaccttcacagataatggggtggggggcctggggtcctctggcagagacatctggggagaaagccagggacctatccctgctgaagcaggtacaggccatcctctggatttgtgggcctgagagtgtgtgtgggtgtgggtgcgcgcgtgcgcgcgcgtgcttttgagaaggcatatgctgggtgtgtctgtctgtgcctatatctttgtttgggtctcccatactgcgtatagatgaatgggtcaggatatctggaacaaaatatggaggtgaagggtgagatcgggaaacaaagggtatggccccctagttcccaaagggagcagggagatgggaatagaattgaaggtaggttttaggctacttgggaggaggaatatttaggtaattgtggagacttt

SEQ ID NO: 17217 - DNA, 2300 bp, Homo sapien
tgatctgcccgcctcggtctcccaaagtgctgggattactgtatagcaagttcattcttggcctctgatgcctgttcttaaggttgctggaagttgaggtccagctctagttccttttcagctgcatgagggaagggggagggtgagccatctgcctccttagggactggtattatttcttcatcttattggcaggtgagggtgaagggcacagaccctttggaaatgtgatgaaagctctgggtctactcaccagaaaactgcacatacaatgacacaattttgtacggattttcagggggttcctggatttccctgaaaccttttcatgggtctcagagaacctctgccttaggagaaacaatcttaaatcaagagagtgtgacaagagggccagacgtggtggctcacacctgtaatcccagcactttgggaggccgaggcaggaagatcacttgaggtcaggagtttcaagaccagcctggccaacatggtgaaaccctgtctctacttaaaatacaaaaattagctgggcgtggtggcgcacacctgtagtcccagctactagggaggctgaggcggtaggatcacttgaacccaggagtggaggttgcagtgagcagagatggcaccactgcactccagctagggcaacagaatgagactccatctcaaaaaaaaataaaaataaataaaaataagaaaagagagtgtgacaagaaggtggaataatgaggagcttaagacagggcaggggttcaggtgtaaagattagggttgagtttgtgtaaaggagtagttagaataagcaagcatcccaccacctcattattgcagactccatccttttctcttgctctagatgaccaaaatgttagacttgcttgaggacttcttagactatgaaggctacaagtatgagcgcatcgatggtggtatcacgggtgccctgaggcaggaggccatcgatcggtttaatggtgagggagatacactggtccctggtgggtgtgggaggcctgagaaacctgtgataggtccctgggatgggagggggactggcttgggggacattggaaacttaggctttgagttgggggcatggttgtttgtcatcagagaacatctaggagcaggtggacagaactaccgggtacaagaaaaacctgatccaactctcacctcctagctcctggggcccaacaattctgcttcctcctgtccacccgagctgggggcctgggcatcaatctggccactgctgacactgtcatcatctttgattctgactggaacccccataatgacatccaggtgggaactcgcatcctagaacccctgcaccatttagcaaggagatgtgggttcatggaggagggtgtcatgttccggggtcagaaataaatctcttctgggaggagagaaggcccttcttcagcagccttctttcctgaggcagctctatgggcagcttctccccggccactcccctgacccacccgccactttctcttgcccctgcaggcctttagccgggctcatcggattggccaggccaacaaagtgatgatttaccggtttgtgactcgcgcgtcagtggaagagcgaatcacacaagtggccaagagaaagatgatgctgacacacctggttgtgcggcctgggctgggctccaaggcaggctccatgtccaagcaggagcttgacgacattctcaaatttggcactgaagagctattcaaggatgaaaacgagggtgagaaccttttctgcagctctgtgaaagcaggcccctgctctctcaggagtacttatcagccccctggggagagaaaaacaactcttctctgcagcctttgaaggaaggagagccttcttttagtagcccttggaggaaggttggcctctttctttgcctgtagggttaaaacaaacaaaacaaaaacctttcaacattggctcccggggaaaaagccttctctagggctcctgtgaaaaggacgcagagtagaagctttcccatcagcctttctaaactttggaacccaaagttcccgtttgttttccctctcaccaggggagaacaaggaggaggacagcagtgtgattcattatgacaatgaggccatcgctcggctgttggaccggaaccaggatgcaactgaggacactgacgtgcagaacatgaatgagtatctcagctccttcaaggtggcacagtacgtcgtgcgggaagaagacaaggtgagaggctttgggggccagacattatctatcccaggccatctccaaaaggcagt

SEQ ID NO: 17218 - DNA, 2300 bp, Homo sapien
aggaagattcctctagaggatgaggtgccaggggtgcctggagagatggagcctgaacctgggtaccgtggggacagagagaagtcaggtgggtgcatggccttaggagtgatgggggattagaatttgggatttccctcttctggggtcaggggatgagggtaacatcctcccttcctatcccctaccccctcccacagccacagagtcgacgccaggagaaaggggggaggagaagccgttggatggacaggaacacagggagaggccggagggggaaacaggggatttgggcaagagaggtaatgggtggaagggaccggacacctgggtcccagagggcatcaggggaggtggagtctggggaaccgaatgcttgggtcctgggcgggtagctgtttgaaaggccagtacagtacagtacagatagtagtcttgggacctgggaggagggtgtcctgaggtgtgagctttgacctgtctgtcctagcagaagatgtaaaaggtgaccgggagcttcgaccagggcctcgagatgagccacggtccaatgggcgacgagaggaaaagacagagaagccccggttcatgttcaatatcgccgatggtggcttcacaggttggggagactctcgctgctttctgctcctcaaggggatctgctcatcctcatggggtttctcgttttgcctgaggcttcctgctacctttaattccaagtaacttccaatgaagtatgttgcatgctgactccgatccttgctctaaatctttcttaagtatccctcttaactccaaagctggccctaatcccacctttattcttaattctaacgaacctggttagaactgagtttgttccaaacctaacctttacccattcctcttcaggagcccttagttccctttcattattcagtttctccatctctacctgtctgttggactgagtgcagtctgcaaaaccctgttacctcttctgtctgctgccttctttgcagagcttcacacactgtggcagaatgaggaacgggcagctatttcctcggggaaactcaatgagatctggcacagaagacatgactattggcttctggctgggattgtcctgtatcctttgatacacatgcaagaaggaaaaggttctctcaagctggcaaaaaaaaaaaagatgatttcacacccagggacagggctagtgccacactttggggagtcaagccaaaaggaagaagtgttcaaagccaagcccattcctgttaaattccttgatggttccttttccttcattggtagccatggctatgcacggtggcaggacatccagaatgatgctcaatttgccattatcaacgagccatttaaaactgaagccaataaggggaactttctggagatgaaaaataagttcctggcccggaggttcaaggtgggaatgagggaggaaaggagcgggttatagacgggcttgggtcagaagtgagaccagatctagttggaacctagggaaggttaacaccttcagggctgaggtgatacctggggccaagaccaaagtgtaaccttgtgcttgggagtgtgatctgggtcagggttgctgctaggttcgcagtcggtttggagctgggagtgccctgggccagcagtgagggcagggtgggtctcttgctatgtccgcccccccagcccctcacccactgctggcagagccctaccttcacctcccaactctgtgccctcagctcctggagcaggcgctggtgattgaggagcagctgcggcgggcggcctacctgaacctgtcgcaggagccggcgcaccccgccatggccctccacgcccgcttcgccgaggccgagtgcctggccgagagccaccagcacctctccaaggagtcgctggcggggaacaagccggccaacgccgtcctgcacaagggtaagggccgcggcggccccgcgcgggggagggcccacaacgctgcgtaagtcttcaccccgcacccctcaaaatcttcccaccccctgacccctctacctgctgaaccatccccctctgacctctaaccccactcctaccgacctggcacccccttggattttagcctctaggacttgtgcaagccaaccctcatccatgtctgatagcattcacatccgtgcccaatagagggacctgccccagcctctgtgtcccctccacacagtggggcctcttcactggcagtggaactgcatgcctgccatactgcttaacatcatccagttaggggccttggactgtgaatgcaccatacagat

SEQ ID NO: 17219 - DNA, 2300 bp, Homo sapien
cacctcggcctcccaaaatgctgggattacaggcaagagccaccatgcctggccctaccagtccttttttaagaccaaaaagttttgaattgtgacagcatcactgtaataagtagacagcttctcccatgatcacagacaataccattcaaaagttctgaaatgtttgcttaaaaatgatggtatacctcctcaaaagagattaccctctaggttttaacaatttaggtttaaaaaccagctttgcattgcctgtgatagctggtaaatgccatgggtgtggagaagctcatcatgcacatattggtcaagatggatgggtgttgaaaatgttgggtactggccgggcgcggtggctcacgcctgtaatcccagcactttgagaggccgaggcgggcggatcaccaggtcaggagatcgagaccatcctggctaacacattgaaaccccgtctctactaaaaatacaaaaaattagctgggcgtggtggtgggcgcctgtagtcccagctactcgggaggctgaggcaggagaatggcatgaacccgggaggcggagcttgcagtgagccgagatggtgccactgcactccagcctgggcaacccagcaagactccgtctcaaaaaaaaaaaaaaaagaaaaaaaagaaaatgttgggtactcagaagttaatgtgaattcagtataggctgggggcacaggataacaatagtagctaatatagtacttacctggtgttttactgtgtactggacaccatttgaagcaccttacacatataagttcattcagtcctcattattattatccacatttttaaaactaggaaaccaaggcccagagaaattaagtaacttgctcaaagtgtcacaactagtaagaggtggaagctaggatctgaactcaagccagctggctctagactgtgttatcaccctccataacagaacctgggctgcaggtccaggagaggagggtgaggaggcagctgtgtgtgggtgtggcaccatgaggggaatgtgggttgtgagtaccatgtcctgtttaccagtgggagaagtcagacccctgagtcagaacttatgctggggagctttgctggggccatcacgatgtgtgggtgtccaggcctccggaaggaaaggattcccagcattcctaaagccatggtcctggcatctaggtccctccttaggctgagataccagctgagagttaagcagtttggggagaatgaagtttaggaagccagccttacaaacaacacagagaggtcatctataatgagaattgagggcaaaatcgattcaaaggcccagggaccactaaaggttgggcagaacgggccgtgtttggaaactgggtgggattgtgaaactaactgcgagcaactgaataggcggagggggctttagagacttgtgccagtgactgagggctcaggcgcagagagagacccggggctttgtacatggtagaattaaggagcgctggcgttgcgttgggggaagaaggaaagccccaccccgctcccccgggagtagggaggaatgggtgctttggcccccagggctccggtcctggcatggcctgggccgcctccccgactccatcattgctgtcattcccggcctcaagcctccaccgcccccacacgtgccgccacagggagcggcccgatcaaggcgtgacgctccgaagggtggggcctcacttattcccctatttaaaggggaaagaggccgcggcgccggccccaggacccgacccggccccaggagagtgtgctcgttctgttcacggagctggccgcgttagcgacgtcctcgagtccgcggcgggcacgatgcagctcttggtgagggtaccctctcttccggagcggggcgagctggactgcaacatctgctaccgtcctttcaacctcgggtgccgcgcgccccgccgcctgcccggaacggcgcgcgcccgctgcggccacacgatctgcaccgcctgcctccgcgagctggcggcgcgcggggacggcggcggggcggccgcgcgcgtggtgcgcctgcgccgcgtggtcacgtgccccttctgccgcgcgccctcgcagctccctcgcggcggcctcacggagatggctcttgactcggacttgtggtcgcgattggaggaaaaagcgcgggccaagtgcgaacgagatgaggctgggaacccggccaaggaaagcagcgacgctgacggagaggcggaggaagaaggggagagcgagaagggggcggggcctaggagtgctgggtggcgcgcgctc

SEQ ID NO: 17220 - DNA, 2300 bp, Homo sapien
gtttgtcagcaagatgtccccgctagacatgtacgcggagtcagagaagatgttgggaggagggctagccttgggaatttggggatgggggaaactttctgaagtggaaggagcattggcctccagaggggggaaagggtacttaagagaggctgagtccggagcgagagtgctggagctggcaggagtgggggtggggagggtctgaaagtagagaagttggtgggggctaaattgaggggtgacgatgggcgatgtctttactcaaccaggcttctacaaaggatatgtttagataaagagggagtcgatgtttgcggggatcagaagtgtctctttgggagagattctgctcccattctttaacaccctcctcatctctgcaggaaggatggcttcctggccttccaaactagccgttacaaactccattactacgagacgcccactgggatcaaagttgtcatgaatactgacttgggcgtgggacccatccgagatgtgctgcaccacatctacagtgcggtcagtgccagccccagggacccatcccccagagctcttcagaaccccaagactccctcatctcccctgccccaatcctactatatgtttgctcaactcaagagttttctcaggggcccttaggttcttaactcccaccaccactttctcctcagagagggcttgccttccagcccttattccttgtgcattcacacacccctgaggttatacaaggtttggggctaaaaaccagaagtatccaaagcctggctctaacatcttccctttccatagctgtatgtggagctggtggtgaagaatcccctgtgcccgctgggccaaactgtgcaaagtgagctctttcgctcccgactggactcctatgttcgctctctgcccttcttctccgcccgggctggctgaagcaacctacctcaagtctcaggagaattcatgtctgcctggggcccttccgaacctgtgccaactaagggcccccactgtaagcccccgcacccccaccccctgcccagagcaacagcctaaaggcctgccctgatgctctcctcctaccagagtgaagcccacagagtccctccacctccacaccaggccctctctccagttttatcccctgcctaatgctgcgagaagcacagaataaactttttgtcactctctgcggcctgagcgtgttggtttgagggccctctcagtcctgccccacgcatgaaggtggaaagtagggcagccacaccccctggagggccacgaagtggctttgcggatgggtttctcaaccgtgggaatattgatgctttgagctggataattctttattgtggggaccgtcctgtgctttgtaggattttagcatccctggccaccacccactagatgctgatagcacaggcatgaaatcaaaaatatctccaaaccttgccgaaagtacgctgggagatacattccctcccgattgagaatcactgggccgggggaagcctgacagcccttgggtcccagagggtgcaggagccatcctccccaattccgctcagaaaatattcaagctgcagagccttcagcaggcggggcttatgcagatgagcggcaggtttggctgagaggagggcggctctatgcagatgaggaggcggtgcctgcatgctgatgagctgggcccgctgccgacgcggctgggagcccagcgggtcccgcagcggttcgcgctgaagtggcatctctctcccgccccgcttccccctgggtccttatcctccgagacctttacctcatcctcgacctttaccctcatccatttccccctcctaatccttgctcctgtgtcccccgtaactgaatatctccactcctggcgccccccacgtttcttccctcccgccgcaaacctcgcgacctccagcagcccgcccccgcgggcccgatcctgcctggcggctcccgccgcagcctcctcagccttcccgctctgccggggttcgccccactacgcccccggtcgtcagccctcgggcttccctgctcccccctcccgtcccctcggagccccctcccccgcctcggccagccagcatgcaggtgtctatcgcgtgtaccgagcagaaccttcgcagccggagcagtgaggaccgtctgtgtggaccccggccgggccccgggggcggtaatggtgggccggccggcggggggcacgggaatcctccggggggtggagggtctggccccaaggcccgagctgcactggttccccgacccccagcgcccgctggggc

SEQ ID NO: 17221 - DNA, 2300 bp, Homo sapien
gtgctatcagcatctagtgggtggtggccagggatgctaaaatcctacaaagcacaggacggtccccacaataaagaattatccagctcaaagcatcaatattcccacggttgagaaacccatccgcaaagccacttcgtggccctccagggggtgtggctgccctactttccaccttcatgcgtggggcaggactgagagggccctcaaaccaacacgctcaggccgcagagagtgacaaaaagtttattctgtgcttctcgcagcattaggcaggggataaaactggagagagggcctggtgtggaggtggagggactctgtgggcttcactctggtaggaggagagcatcagggcaggcctttaggctgttgctctgggcagggggtgggggtgcgggggcttacagtgggggcccttagttggcacaggttcggaagggccccaggcagacatgaattctcctgagacttgaggtaggttgcttcagccagcccgggcggagaagaagggcagagagcgaacataggagtccagtcgggagcgaaagagctcactttgcacagtttggcccagcgggcacaggggattcttcaccaccagctccacatacagctatggaaagggaagatgttagagccaggctttggatacttctggtttttagccccaaaccttgtataacctcaggggtgtgtgaatgcacaaggaataagggctggaaggcaagccctctctgaggagaaagtggtggtgggagttaagaacctaagggcccctgagaaaactcttgagttgagcaaacatatagtaggattggggcaggggagatgagggagtcttggggttctgaagagctctgggggatgggtccctggggctggcactgaccgcactgtagatgtggtgcagcacatctcggatgggtcccacgcccaagtcagtattcatgacaactttgatcccagtgggcgtctcgtagtaatggagtttgtaacggctagtttggaaggccaggaagccatccttcctgcagagatgaggagggtgttaaagaatgggagcagaatctctcccaaagagacacttctgatccccgcaaacatcgactccctctttatctaaacatatcctttgtagaagcctggttgagtaaagacatcgcccatcgtcacccctcaatttagcccccaccaacttctctactttcagaccctccccacccccactcctgccagctccagcactctcgctccggactcagcctctcttaagtaccctttcccccctctggaggccaatgctccttccacttcagaaagtttcccccatccccaaattcccaaggctagccctcctcccaacatcttctctgactccgcgtacatgtctagcggggacatcttgctgacaaacgagcggatagagaagagcatcccgtacatcagcttatactcctggagggagaggggcagagttagctctcggttgatgcgggagatggggtggggggtgggaacgagctggggtttggagaggaggggctgggttgggactataggtgtttggagatgagaggtcgcccgggctgcaccggggccctctcgtcacctcctccttgggaatccctgcttgcttcttgcggtgccattcgctgtagtgcagacacactccattccggtcaaacaggtacaggttgtggacagtcatctgcagggcagggagtgtgagcctcgctccggggccgcccccactccttgggctcgggttcccggacccacagccttccaaccaggtggggaccccacccacggactcaccggaactgctccgagtgcccgtcaagagttacttccggtttccacggagctccgccccttaggggggttctcgctcggccgcggctgggcattaactccgctccagtgctgcttgtcagactccgcctccctccctcagccaatctgtggccaccggagccgcgcacgcgcggccaggcgctcgggatacagaagtgatgtgagtgtctgcgagcgtggtctcgcgggcgggtgacgtcatcgaggcgagagaggcggagccgtggacagtgggcgggaggctgccaacggttttgagcgtagggggaggcgtgagagggggatctcaggggaggaggtcaatcgcttgccccccactttggcaaattggggactgaggactggaagggtggagagtaggcggaaccaggtggtcgtcggggcagaggatctcgggctaggcttgagggcggcgtgcttcttagggacgacttagggcg

SEQ ID NO: 17222 - DNA, 2300 bp, Homo sapien
acaagaaaaaccaaacggatccaataagggatgtcctaaacttgaatcagaaattcaaatactacagaagccagaaagagagtgtaaataaaataatcgaggaggtataagacaagagttgcggagattcttgccgattcaagaacaaatgtaaggactgtatggcttatggctatcattttcaaactctggaagacctaaccagtctgcaaattgactctgacaccttttctatacaatactaataactatcttctctgtaacatgttgtagttgactaagctatgtcttaatgatgtacatgccaaagttggaaccatactatcaacatagtgttgagctggaaggatcggagctgctatcctaagtccctagctccctcttgggatcaagaaaccttacccattcccagtgcacgggaaatagctcaccaacctaccccataggtttgctctatctactcggagcagagatgtctctcacaaaaaaacactgggaagtttcataattttcaaattatggtgtcccaggtcactccctcccttataagcatggctgcctatgcagttaaaaggaatatgaaatccaacaggaagagttcaaatctcatcaaagctttttatttttaccaaccccaatcccaagactctctggtgtctagtgccacagtggtctccaagacacacttccctcacctttttcttcaagttcttttccaatccgactgacaagcttcgactcaattcttgggcgaagccgtctaacccttcatgaggcggggaggtggagggtaaatacagctgggctcgggccgtggcctccgcctgccggctgaggcgcaaagaagcatagagctgggaggtcacttcagacgacacttggttgagcccagggggttctgatgaatcactcaggagatcctccgccccgaggggtgaactggggctgtcagctgatgttgccatgaatacagggaagagacaaccggagacagcaaagagctgggaggttctgctttagcaaagtccaggaggaaaagttcacggagaaagacttgggagaagggaggaagactccacgccaaggatccttggtgaattaaggatatcgaggctttctggttagaggaaaggtttccaccagttccaggggccatgggagtgggcaaaagcatccctttccccagctcctgggaacagcgttaagagggtgcagcgcagagcgggtgcggacagaagacctactgtgggacaacagcgctgctgaagctcctcttcccgactacgagtgctggaagctgcagatcaactccggcacaggctatccccggtcaactgagctcttaagttctcacacccaaaacgtcccaacggaaacggacccaaatccactaggagcccaatttctgtccccctgccctactagtccctcaattggttccagtctcaagagagggcggaacctcacgctcccccatcccttcacccgttctacccagggtcagctccagctcccttgtactttcccttcgacccctcctggcaagaaagccatagcgagcttccttgttccctagaatctctccctcccgaccaccccaaaagaaaccttgtgaaccctcagtcacgccctaagtcgtccctaagaagcacgccgccctcaagcctagcccgagatcctctgccccgacgaccacctggttccgcctactctccacccttccagtcctcagtccccaatttgccaaagtggggggcaagcgattgacctcctcccctgagatccccctctcacgcctccccctacgctcaaaaccgttggcagcctcccgcccactgtccacggctccgcctctctcgcctcgatgacgtcacccgcccgcgagaccacgctcgcagacactcacatcacttctgtatcccgagcgcctggccgcgcgtgcgcggctccggtggccacagattggctgagggagggaggcggagtctgacaagcagcactggagcggagttaatgcccagccgcggccgagcgagaacccccctaaggggcggagctccgtggaaaccggaagtaactcttgacgggcactcggagcagttccggtgagtccgtgggtggggtccccacctggttggaaggctgtgggtccgggaacccgagcccaaggagtgggggcggccccggagcgaggctcacactccctgccctgcagatgactgtccacaacctgtacctgtttgaccggaatggagtgtgtctgcactacagcgaatggcaccgcaagaagcaagcaggga

SEQ ID NO: 17223 - DNA, 2300 bp, Homo sapien
gcctccctccctcagccaatctgtggccaccggagccgcgcacgcgcggccaggcgctcgggatacagaagtgatgtgagtgtctgcgagcgtggtctcgcgggcgggtgacgtcatcgaggcgagagaggcggagccgtggacagtgggcgggaggctgccaacggttttgagcgtagggggaggcgtgagagggggatctcaggggaggaggtcaatcgcttgccccccactttggcaaattggggactgaggactggaagggtggagagtaggcggaaccaggtggtcgtcggggcagaggatctcgggctaggcttgagggcggcgtgcttcttagggacgacttagggcgtgactgagggttcacaaggtttcttttggggtggtcgggagggagagattctagggaacaaggaagctcgctatggctttcttgccaggaggggtcgaagggaaagtacaagggagctggagctgaccctgggtagaacgggtgaagggatgggggagcgtgaggttccgccctctcttgagactggaaccaattgagggactagtagggcagggggacagaaattgggctcctagtggatttgggtccgtttccgttgggacgttttgggtgtgagaacttaagagctcagttgaccggggatagcctgtgccggagttgatctgcagcttccagcactcgtagtcgggaagaggagcttcagcagcgctgttgtcccacagtaggtcttctgtccgcacccgctctgcgctgcaccctcttaacgctgttcccaggagctggggaaagggatgcttttgcccactcccatggcccctggaactggtggaaacctttcctctaaccagaaagcctcgatatccttaattcaccaaggatccttggcgtggagtcttcctcccttctcccaagtctttctccgtgaacttttcctcctggactttgctaaagcagaacctcccagctctttgctgtctccggttgtctcttccctgtattcatggcaacatcagctgacagccccagttcacccctcggggcggaggatctcctgagtgattcatcagaaccccctgggctcaaccaagtgtcgtctgaagtgacctcccagctctatgcttctttgcgcctcagccggcaggcggaggccacggcccgagcccagctgtatttaccctccacctccccgcctcatgaagggttagacggcttcgcccaagaattgagtcgaagcttgtcagtcggattggaaaagaacttgaagaaaaaggtgagggaagtgtgtcttggagaccactgtggcactagacaccagagagtcttgggattggggttggtaaaaataaaaagctttgatgagatttgaactcttcctgttggatttcatattccttttaactgcataggcagccatgcttataagggagggagtgacctgggacaccataatttgaaaattatgaaacttcccagtgtttttttgtgagagacatctctgctccgagtagatagagcaaacctatggggtaggttggtgagctatttcccgtgcactgggaatgggtaaggtttcttgatcccaagagggagctagggacttaggatagcagctccgatccttccagctcaacactatgttgatagtatggttccaactttggcatgtacatcattaagacatagcttagtcaactacaacatgttacagagaagatagttattagtattgtatagaaaaggtgtcagagtcaatttgcagactggttaggtcttccagagtttgaaaatgatagccataagccatacagtccttacatttgttcttgaatcggcaagaatctccgcaactcttgtcttatacctcctcgattattttatttacactctctttctggcttctgtagtatttgaatttctgattcaagtttaggacatcccttattggatccgtttggtttttcttgttttccaaagtgctggagtgaaaattctaccctggcaataggtaggagatagataacacagactgcatctgatttccatgtggcttttttccaggatggttctaagcatatctttgagatggaaagtgttcggggtcagctccagaccatgctccaaacctcacgtgatacagcctatcgtgagtaagccccttccctagaactatgaaggagaacctagatgtaaggggtgggagaaagtggacagaggaagcaggcaggaaaacctctgagcaagagatttcaggagaaaagtctcccgttctttgggagagggggtg

SEQ ID NO: 17224 - DNA, 2300 bp, Homo sapien
tcaggagtttgagaccagcctggccagcatggtgaaaccccgtctctactaaaaatacaaaaaactagctggacatggtggtgcatgcctgtagtcccagcgacttgggaggctgaggcaggagaattgcttgaacccagcaggcagaggttgcagtgagctgagatcaagccactgcactccagcctgggtgacagagtgagactccatctcaaaaaataaaaataaaaaataaaataaaataaagatttctgggactcacctgcagaggttttgattcagtagatatatggtggaactcaaatcttttcagaaatttcctgggtgatttttttcaatctggtttgggacctctggtgtagggcatggccaaaaaaggtatgaaattgactaactcaagtttcttttcgtgtttttttttttttttttttgagacagggtcgcgctctgttgtccaggctggagtgcagtggcacaatctcagctcactgcagcctctgccccctggattctagcgattctcccaccttagcctcccaagtagctgggactacaggcgtataccaccacgcctagctaatttttgtatttttttggtagagacggggtttcgccatgttggccaggctggtctcaaactcctgacctcaagtgatctgcccgccttggcctcccaaagtgctgggattacaggcataagccaccatacccagccacttcactcaagtctcttagagctgaaatgataaggtgattagccatatgaattagtagctgggattggaacttgttgcatgcataatgcatgcttgctacatgcatgctggtacttgtagtcttaacaggctatatctgacagtcctgatgatgatgggtgatggttcacgattataggctggatattctagtcttagtggaatttcttttgacgatgatggtggtaactattgtgtattgagtacttactatgtgcctgatgccgtgctaaatgccttacatatgctttttactttaatgctcagaaggcagaccctgttatgatctccagtttacagataagaatgtatgcctaagaacacatagtaaattccagaaccaggattcgaacctgagatttgaacccaggtctacctggctctggaacaggaactcttatctactatattataatcctatgagcttgtcaactattgtgtttgtttgttttgagatggagtctcgctctgttgcccaggctagggttcagtggcacaatcttggctcactgcaacctccgcctcccaggttcaagcaattctcctgcctcagcctcctgagtagctgggaatacaggtgtgcaccaccatgcccagctaatttttatatttttagtagagacatggtttcaccatgttggccaggctggtcccaaactcctgacctcagatgatctgcctgcctcagcctcccaaagtgctgggattacaggcatgagccactgcgcctgtcaactattgtggggtttcttttggttttatttgagatggagtcttgctcgatgtcgcctaggctggagtgcagttgtgtgatcccagctcactgcaacctccacctcccaggttagagcgattctcctgcctttgcctcccaagtagctggaattacaggcacccaccaccacgcctggctaatttttgtatttttagtagagatggggtttcaccatgttggaccaggctggtctcaaactcctgacctcaggtaatctgcctgccttggcctcccaaaatgctgggattacaggtgtgagccaccgcacccggcctaattattgtgtttttaatgagcataattctcagcaggcaccttgtatgagggtcagagggcagatcgctggtctctgaagagcctactaaggagcttggttttcttctgcggctgtaggaggaggaaaggcaagctctgactctgaggttggaggcagaacagcagcggtgctgtgtcctgcaggaagagcgggatgcagctcgggctgggcaactgagtgagcatcgagagttggagactcttcgggctgccctagaagaagaacggcagacctgggcccagcaagagcaccagcttaaggaacactaccaggcgctgcaggaggagagccaggctcagctggaaagggagaaggtaaaagtggcagttggaagagctgaggaactagggagtagatgaagggcaaaataattgaatgggatggaatgttagaatatgggggatacatataggcaggaatggagagtagagagccatgtgtgggagacaaggtt

SEQ ID NO: 17225 - DNA, 2300 bp, Homo sapien
agtggcgcgatattggctcactgcaaactctgcttcccaggttcaggtgattctcttgcctcagcctcctgagcagctgggattacaggtgcactccaccacccgcggctaatttttgtatttttagtagagacgggacttcaccatgttggccaggctggtctcaaactcctgacctcaagtgatccgcctgcctcggcctcccaaagtgctgggattataggcgtgagccacggtgcccggcctcaagccctataaccttatagcactttaaaaaaatccaatgatacagaatccaaactaagggcaggtgttgcatataattgtcatgtctttttaggtttctttaatctgaaacagttcctcaacctctatttgccttctatgacattgacatttttgaagaatgcagtcctccccacctttttaaatagaacgtttctcatttagtgtttatcttatgtttccttgtgattagatttgaaataatgctggaacattgccgagacgtattgtgcagcactgcataggtgtagtattatgtccttctcagggtatcacatctggaggcaaagaatgtctctctgcccctcatggttaattttgatcacttgcttaaagtattgccccatttctccactgtacaatgactgctttttattttattccccactcccttccaactcatggcaatctggagggagatactttcagaccctgcaaaagttctgctcctcatccaacatttcccccagctttagaatccactgatgattcttacctgatccaatctttgccaccaagtctgaaaatgattcatttaaaagtttttaagttttatttttcacatataggtctttgacctggaatagattttgtgtatggtgtgagatagggattgaattctattttccccccagatggctaatcagctccatttgttgaagtttattctttcccagttggtaagaaatgtccacgtcttcacacatttgctgtgtttgtttcagtactgtatattctatttcattggtccatttgtttatccttgtgccaaaactatgaagtctttattgccatagctttataatatatatttatataaatatataattgctgtcactacataatgtggatttatataaatatataatatataattgctatagctttatagtatatatttatataattgctgttttatatatcatataattatataaatatataattgctatgttttatatattatatatttatgtagatatataattgctatgttttatatattatatatttacataaatacataattgctattgctttataataaatttgtatatcttatagggcatcttccattatactcttctctaaaattgttagctattcttgccatccgggcaattatattcattttcacaacaaccctcagattaagcaattgcccaaggtccaaaaatcagcaagagggacttggaacccaggtctgtcggaggccaaagctcttttcattacttcctgagggtggttttctaggcatggagaagcagaggtcagggaatcaagtgtggcgagagagagaagagaagtgaaagaagaaaggcaggtgtcagcttggtgtgggtttggtctctgggatatagactttgccagccaaaggatggagcttgaacttagctggcagaactggaaacagaagattgtaaggaaagggactgggatcagtgtttcttctccaggacggattacccacagctgtccacgggcaggcacttgttactttctggctgagcagggcagtgtggccgacggctgaaaggggaagctgcggctgcttttgtgcaggggtggtggtgatgagggtgatgtggggggctggaaggcatggaggggaaaggatctggctgactacctggaagccaggacagatcccaccccagaaaggcgcagtaggggctctcatcctccactagcccgcccctccctacctaattaaggaccctaatcagcttggggagattaagggctctggccggctgtacccacgcccccgccctggcctgggctggcaaggaagacctgtgggcgggcgtcaaaagggggaccggccctgtgacccctcaccgggggccgtgggcccgagcccccggacttccctgtaaatgtcagaggcccctccgctgggatagggtcggtctgagggcgcaggcgagtccctgctgacccctgacgcctccgacggggggaggggcaggccgggtgggagcgggaagccggggcggcagaagggggcttcg

SEQ ID NO: 17226 - DNA, 2300 bp, Homo sapien
ttttgagacgaagtctcgctctatcaccagggctggagtgcagtggcacgatcttggctcactgcaacctccgcctcccgggttcaagtgattctcctgcctcagcctcctgagtagctggaattgcaacctctgcctcccgggttcaaatgattctcctgcctcagcctcctgagtagccggaattacaggcagtcaccaccacacccagctaatttttgtatttttagtagagatggggtttcaccatgttggtcaggctggtctcgaactcctgacctcgtgatctgcctgcctcagcctcccaaagttctgagattacaggtgtgagacaccatgcctgaccatgatctcattctttttcatggctgtatagtattccatggtatatatggaatatacatgataagtcactctcacttcagttggctttcatgaaacactgtgacaggcacaagaggacaaagtgtctgccggcatcgttctcctcctacctcattgactgaactttgctgcttccactcctttgcatgacttccaaatatcagaggaccttagggcacagcttgtgcctcttctcttctctacttataggatattctctgcctagtgatctccaccagcctgtggtatagatgtacctgtgtgcttgtgactcaaagatgcacacctgcagtcctgagctctatgcccagacgtgggttctccacttggatgtctaatggccatctcaaacttagcatctccagaccgaaaaccccaaatctgttatgttattcccccaaagcccaaatccataacttccccttggcatctctcccccaaatccctccctcactgcactcttgcctttccctcctccaacaagccaagcttttcctaaccacagggcctcttcaggaacagtttcctctgcacaaaactctgttccccagacagatcctttcacctcctctgaggctctgaacgcctcccttcccacctctgcttctcactccttcacattagtctgtttcatttccttcattgcacttattatcatctgaaattatgtgttggtttacttattttctctcacacttgattttttttttttagaccgagatttgctctgtcgcccatgctggagtgcaatggcacaacttcacctcactgaaacctccgccttccgggttcaagctattctcctgcctcagcctcctgagtagctgggactacaggcgcccgccaccacgcttggctaatttttttgtatttttagtagagatggggtttcaccatgttggccagcaactgtgcctggcctcacacttgatttttaatctccatgagagcaagcactaggtcttgcctgggcctttatcaatagcagtgagcatagcacctggcacagaggtagttctgaacattaattattgaatgaaataaaataatgaatgtaggctgggcgcggtggctcacgcctgtaatcccagcactttgggaggccgaggcaggcggatcatgaggtcaagagatcaagatcatcctggcctacatggtggaaccccgtctctactaaaatacaaaaattagctgggcatggtggcactcgcctgttgtctcagctactggggaggctgaggtaggagaatcacttgaacccaggaggaggaggttccagtgagccgagatcatgctgctgcactccagcctggcgacagagcaagcctctgtctcaaaaataaataaataaataaattttaaaaataatgaacgcaggcccaagaagagttgtgggaaatggggtgatatttttgcatagacttctaaggctaagaaggaaaacaaacagacgtggtgggcacaaatctacccccaccccaactgggtcccaactctaggctctctggcctggcaccaccactgaaaggccccgttccccaaacctcagggtattcttagtccctcctgttcccagcgctgccaatcccccgcccacccccactttagttgcgtgttccagcctctccgccccgcccctccccgccctgaaacggacgtgctttttagaggagtccactgggcttggagtcagtggcaataaccaggggcaataaccaggcgtgtcccaggggggagccccgctctgcagccctgtgcgccgtagagagctggacttaggctggcagcatggccgagttcagggtcagggtgtccaccggagaagccttcggggctggcacatgggacaaagtgtctgtcagcatcgtggggacccggggagagagccccccactgcccctggacaatctcggcaa

SEQ ID NO: 17227 - DNA, 2300 bp, Homo sapien
accgtgttagccaggatggtctcgatctcctgacctcatgatccgcccgcctcggcctcccaaagtgctgggactacaggcgtgagccaccgcgctgggcccccttgtgtgttttttttttaagtgaagtatgtaaatcaatagaaatggcaaggaaagatctggaaagaaggatgcacacctagctgttgcttgagaaggagagtgggattgtacagcagggccacattgaggagtaaagaagtgggagccttaaactaagagagagagagagagagaaagagagagaggtgaaaccctgaaaaggagatctatttgattgcttgaggtactcacagggaacagccttgttaagaaaaattatccaaaactgatgaatagaatcaagaggacaactgcctgtccttttaaagatgttttcttttctttaatttttggttttccttctttcttttttttgggggggtggtttctggtttttgagacagagtctcactgtgtcacccagactggagtgcaatggtgccatctcagctcactgcaacctccgcgtcccgggttcaagagattctcctgcctcagccttccaaatagctgggattacaggcacccaccaccacacccggctaatttttgtatttttagtggagacggggtttcgccatattgaccaggctgatctcgaactcctgacctcaagtgatcctcccacctcggcctcccaaagtgctgggagggatgctttattttctagcacggcataccactgtttgacttttctgtgtgttattaataaaggcctcgatttatgtgaagttcatgtaaatgatttgttcctttttttaaaagcaaataaactggagattatagttcattgctctgtagaatgttgactagtttcatatctaacccaacaatcgtgtcctaacattcctttattaaattgcctgtaagtgcccggctcctcaattgttcttgaaaccagcatgaccatctggctgagtcgaataaaatatttgacttgtgaacattctaatttgtatgaaccatgtttttaatttgtttgaaatccctcccagggtggagggagagctgcttgtgccaccccagaacagtgcctagaaccccaatcccttcttctctctgccaggtcctcttccagcctcctctttatctttgtgcccgccttcccctcaccgcacccccatccatgttggacatcccaggggtgcctttgctcactaccccagggaatgagaaacagactcttctgtccccacccgcatcccccactgacctaagaaggtgctgaagcctgggacagagacaaaagtggcagaaatggagagggatgtgtgggttgaaatagggggcttggatgtgggcccaggtggttgaggaccagcctacactgtgcccatttaaagattaatagtatatgctttagaatagtgctttactaatatgattatgaatcataagtataatagcttgtgcttagtacaacaataagagaatcaggcggtgagcttgcttgactgaccacagagtggaacaaacaaccacaggaagtctgcggagcctctgagcaagaaagttggcttattgctcaaccttccacttgagtgcctgaacaaaggtctcatgggaagggaagcgacccctgctccattacccgggagggtactgcaggaggctgctggtaaaagaggagaagtcctctgcagtagggttaaggaggaagcctcctatctcccgcatgttcccagaggcaaagcagctgctctgctgacggtgctcaggcgttgaccactcctttgatgtacaggcctgtgggtttgaagggctgtttgctttcacgtcctgttctgttctattagccgcttagttggactctgatgattatctgtaagttaaacatagagtattagcttacgtagtggaacagtaaatagtattaactggctaatgaccgacacagcaggctccgccacctctccctatgctcacccaatgatcacctcaccatcagcccaccctcagcctataggatcaaaggaactgtactcaataaatatcagtggaacccagagctcctggcctttgcaatctccacgttgcgatggatccttggacccacttttgttaactcttaaactttgtgtctttgtctttatttcttttctcattccctcgtctccaccgggaaggggagagcctgcgggtggtgtatcaggcaggttcccctacatctttggcacccaacacggtctccttgaacccaggtgaagttacacctg

SEQ ID NO: 17228 - DNA, 2300 bp, Homo sapien
tgatcttgctgttccttctgctcaactgcagtaccttcctcttgcccctgtctctacctggcagctcccacttattcttcaagaaccatctcacaagctgccttctctggcaagacttccttacttcagccacacctccaccacattcaggtgcgcaggttgtgcactgcacaaggattcctagcccctcagggggcaggcagatcactgaaatcagcctacgctattccattaaggagccaggagcatcaggctctggggctctggcccatccccccagagggagcctctttctaacttgcacatgacgcttggggggacctctgggaaggaaacacccagttccttcctctgccagaccagattcccaaggcagaggctaagtctaattatctcagtatttccagtagggacctgacccccttcagggattggttttccaggtggatggatggatgaagtcaaagagacaagcacaccccacagacacatatacatgcacacactcacagatgcacacacataggggcatacaagtacagctggccctccgtatccatgggttccacaccagtggattccaccagcaacagatggaaaatattctgggagaaaaagtgtctctactgaacgtgtacagactttttttccttgtcattccctaaacaatacagtgtaacaactatctacatagcatttacattgtattgtattgggtactataagaaatccagaaaggatctattttatttcattttatttatttatttatttatttatttatttatttatttatttatttttgagaaggagtcttgctctgtcaccaggctggagtgcagtggcacgatctctgctcactgcaacctctgcctcctgggttcaagagattctcctgcctcagcctcctgaatatctgggactacaggcgccgcccccgaccatgcccagctaatttttgtagttttagtaaagatggggtttccccatgttggccaagctggtcttgagctcctgacctcaggtaatctgcccacctcggcctcccaaagtgctggggattacaggcgtgagccaccacaccgggcctagagagcgggcctagagaggattgaaaatacacaagagggccgggcgaggtggctcacgcctgtagtcccagcactttgggaggctgaggcgggagaatcgcttgagcccaggagtgcaacatggaagaaagcgtagcgctccttgtgtacacgcagcagcaagagctcacccagctccgctgagcagcgcactttgtacttctgtacctcaggggaccaagacagcaagcaggtgagaggcggggaactgccaaggcggtccttgagccttgcaaggtgcatctccacctaagcctattcgggcatacaaacctgagctgctcccagcccataccgggcttttgtatgaactagaaaaatgtgcccaggctggacgcggtggctcacgcctgtgatcccaacacacaagaagatgtgtgtaagttatatgtaaatactgggactttttttttttttttttttttgagatggagtctcgctctgtcgcccagagcgacatgcagtggcatgatctaggctcactgcaagctccgcttcctgggttcacgccattttcctgcctcagcctcccgagtagctgggactacaggcgcccgccaccacgcccggctaaatttttgtatttttagtagagacggggtttcaccgtgttagccaggatggtctcgatctcctgacctcgtgatccgcccgcctcggcctcccaaagtgctgggattacaggcgtgagccaccgcgtccggcaatactgggacattttatataagaaacttgagcatctgcagattttggcatcccggggaggtcctggaaccaatctctcaaggataacgagagacggctgaatacatgcaggtccacacgctcacataagcgcgcgcacactcggaggagcattcgcgcacacagaggctcagcggcagcgccgcctgcagcccaggcacctggatggcgatgggcatcatcttgccctcgggtccaaagtgcagcaggcagaggggggcgcagtggtgctgcttccggccgctgagctccacggtggggatgccctccatgatgcggtagtcggccaggtaaatgttccccttctggaggggagccgcgatgggtggcaagtaggcacccacacgggaagcccgtgacccgcgccgcaggtgcacagggcgctggcgactaggggcaggggtgggacggggacagggacgcggg

SEQ ID NO: 17229 - DNA, 2300 bp, Homo sapien
gggttgggaggagggaacatagagagtgatgtgaacagatttgggtctggaaaagatcatttcaatccccaactccagccacatctgtgtctctaacctaaacctgaattgcagtttcgaccccattccacatccagtctggaacctactggaaccttctcttcatctcacaatcccagccccctctgaccctaacttggcctgggcattgaatgaccttccttcgatggtgatggaagcgtgccatcagggaggaaagcagggctatgcttcctggttgacagaagctgctcctcggaggtgaaaggaaagaggacaggtccagaaaaagggaataggaacgtgcctgcctcctcactctccctgggtcccaaatcctatctttggagagtctatctctgactctctcataatgctcttcaccttactcctaacaccttctccctatcctgcggctctgacttctgtgattctatcagcaactagttcccaatcccaacctcccacgcttattttcttcagagcacttagtatccaaaattatagtgaacaaattcttgtttactgtttctttcacttctttcccagctattccgtaagctccatgtatgtttcatttcttctctgcctctgcagtgcctagaacgccgtgcaccgtgctcactacatatctgagggaggaacgacctggttcccaacaaacacagttccactggagctcagccctgcctccagccctcttcctagcttcattcttttttgggagggaagtgagggtatgtactttatgaaattaaaggataacacataatgaaatgaatgaagtaccctagacgcccctcagatcaagataagaacacctccagcagcctatatggcctccctctgccagggatactcaccagtagaggttgtctgagaattgctcagttttgctggttctggaagttcctatcaatggataacagaacgtatcccctttaatgtctggctctttttgctcagtatcatctttgtgagactcatccgcattgcagttcattctttttattcctgggtagaattctattttatgattataccacaaaatattgatcatattaatccattatttaacttaattcttttgtcttttttttttggagacggagtcttgctctgttgcccaggctggagtgcggtggcacgatctcaactcactgcaacttccgcctcctgagttcaagcgattctcctgcctcagcctcccaagtagctgggactacaggcgcatgccaccacgcctggctaatttttgtatttttagtagagacaaggtttcaccatgttggccaggctggtctcgaactcttgagctcaggtgacccacctgccttggctttctaaagtgctgggattacaggcgtgagccaccacgcccagctatttaacttaattcttatgccccagatttcactctgtcttctaatttagtttttttttttttttttttgggcttctgattttatatccaactccaatccctcaccagtggatcctggccccacaggaagcaacagatccccttctcctaccctgatcgttcctccccgcagcatcttcaggcctttgggcacccatgtggtccccgagccctagcttcaacacctcccacccttccagtcacagactctgggccctggggcagaaggacaggccagctttctcactgtggccactacctgtcccatttcccagagaggaatggcctggaggctggccagctgcgctgccacttagtgcccctccccctaccctcccccgcccaccagtggcctcagaaccaatgcaagtcactcactgcccatggccctgcttagtaggggtgcctggcactgtagccaatggggactggcaggaggaaggagcttattagtctgataaagatctggggaccacaccctgccccctcccgcaacttccctagggccctggctcaggctggactggctcccccaccctgaaggcgccttcatccacggcatcttctatccgccctttcagaggcaggcccagtgccctgcctgctcttcctccccaccagctcccagaaggcttggagcccagacacctgctcactcaccaccagctgggctccgcctgggcctgcccggcacccaccccggccaccaagggcagcagcttttccagaatttggctggcaggcctagtcaccccacctcgccacctcaccactgcacctcggaggccagccctgtccactccactctgtgcctggcttctcttgcctgccttgggcc

SEQ ID NO: 17230 - DNA, 2300 bp, Homo sapien
tctgtgtgtttttgtctcttctcgtttatctgttctgccatctgctgctatgcggtccacagtctcgatggttcttcatttccagtctaaaagatgtggaaaaggagacgaatcaatttggcactcttaagatttgccccattccttacttctagtctcttaggaggacaacggggacagtaagttttcgtgcaggtagcgtggccgagcggtctaaggcgctggatttaggctccagtctcttcggaggcgtgggttcgaatcccaccgctgccaggctggagtttttctggtggattacgcacctgctacagttctgttaacagttctgtgaggttacacctatttacatgcagaaagtaattttacgaattcccctggtaatggtttcaccatcatcttccgtgtttggtcttccagagagatcataggcctgcatccatcccagaagctaagacctgatggtaactgctgaagcaatatttcgtttcttcataacatctctattatttcgtttcttcataacatctctattttaacatgttttcaaatgttagctcaacttccaacatatttaaataatttattgtacgttctcttaacactgtgttataggactcaattatccggtaggaaaagcacaaataattggtagtgtcctagtttactttttttttttgtcgtattatcttgggtcataggagtatcccctctgtgaaaatcaattaacaatattcaacatgctgatattaaaagaaaagcttcaaggttccaccgagatttgaactcggatcgctggattcagagtccagagtgctaaccattacaccatggaacctccctcgtggtgtctttcaagattgtgtacattactggacattctattttgcgtgtcttccacacccgtcacttaaaacgaaaacaaaacaaagtctgctgttggatatggtagacaccgttatcgagcacttgaaatatatgaattcagatgtattgccagcttctaaatacacatcttcttttgaaggaaggctttgtacaaacaaaaagacttaaaatttcattaatatttttagaatgttgattatatgttaaaataagattttggtatattagggtaagtaaaatagatccgtgaaattaatttcgcttgctttttattctttgtaatgtggctaccagaaaatgtaaattcgataatacggctcgcgtttgtactgttttaaagtatgtttattaccctccaccgtcgtttgctgtattttgtggaaatcaagtttctgtatcacctagctttaaaaactagtaactatttttgttaccattttatgcgaagtgcggtacccaaaagcaaagacatgccgcccgaacagggacttgaaccctggaccctcagattaaaagtctgatgctctaccgactgagctatccgggctcttcacgagagctttactttttgcttataagagggttctctataggaaaagccaggcttgtagaaccgacagaggattttatctgtgcagcatagaatattttggcacagatttggaagcagcgggtgaagctcgcctgctgctgattgagctttttctgcctcccgttcttagagcccccgccgaggctgcgacgcagggactgtaccatagtagaggctggaacagtgcggcgccggaaccggccgcgcggggccgctgcgggctatgggcttctctgagaggttcctccccagtccctagtggcccagatcccggacacctgggctcccgcccaggatcctgcaggcccagggcggtcctggagcggaaagaatgccacgcggggcattcagaccctgtttgccggcgctgtatttcgctttcctgacctgccctactccagagcagagaatgaggtcgggcgtgccaaaggctggggacaaagagggccatgcgtggggggatcggtgtatggggtgacagggagctgttcctgaccatttgacatgtgctggaatgcgtgtgcgactcacctgcgtgtggctgcagtcacgtgtgatttatgaccaagtgcaactctccactgtttagtgattcacacggatgattcacacgtaggaatgcaggtgccctgtgctcatctctgcctgggaatggggaggaacagatcttgggggacattggggagtgggcggacaagcactccagggcatcagtccgggccgctgaccaggcggagggcagtgtcccaattatacaggcgttacctccttttctccatctcagcatctgatccctccctccgcagtggaacccaggctc

SEQ ID NO: 17231 - DNA, 2300 bp, Homo sapien
tgtacaagaccgccttgggccagccccgcccggctcacagccagagtggagcaagtgcctatcctcttctcttttcgttcccaccctcctcccttggctctgccctctaattgcttattttactccaacaccggccccctccccaggccacaaggtgccgacacccattaccgaggcccctagtcctatgttcccgccgcccactcaggtctggctctgacccctgtccccttcttcatattttgcagcttcctctccagcttctggctcctggagttctggagcaccgctccccttccacccctgcgtccccagcctctctccagaccgacggcgtcaggggcccagtcccctagccaaaccagggacctctgctccctcccctcccgcctctcaccttggggccgtccctattctcagctcgatcccgggtgaccattgctcctccggaccctgtgtggaccggttccctgctcgcctggagccttatattccgcggcccaagggtaggagggataggacccgaccccgcccccttcgacatccagattctgcccctctaggacccggcacgaggctcccggaaagaggaggagtgaaggggggaggggaaggagagaaactggcctgggagtgcgggaagtgaggggtgaatgggggcactggctggtttacagaccgtaaggctgtataaggaggcgggacccagctgaaaggaggaggctattggggcagagctcgcttggggatgaaattcagagttcctccagaattgcagctttctgggaggcttactgtaccctcactaaccctgaaatagaagttagcacctctcagcccccaggctgaattttatacatcatctccgaagttcgcttcctagtcgagacagggagcaacccgagtgcgctgggtgaatctgtccgactcaaccgaagctctgccgggaggttggagaggcgctctcttctatctaagccagttacattcaagtccgcgaacatctgcgcgcccactctgcggacagggcacttgtctaggctcgggcgagtcatagtgagatacgcaggagagacccagcttatccctgcaggatctaatggaaaagaccatgtgacaccaagtagctattacagaagcccagtgaagtaggtgctccgggaaaaggtctccttaaggatggctggactgaggaggatcttcaaggcagagggagcaagtctttgaaacataggtatgagtggagaggtctttccacttacagtacaagtatttgattcaaaactagtcataggagattcaggagtgtggctgataggacacctcacgcaagtgtgcccgcattgcttgcttctggaggcccctggtgactgtagggtagcagggagcaggcagtttactaaggggaaagcaaggggtacaaaaaagggatcaacacccacctcaaaccaagagcatgaccctccgcagaacgatgcctgaccactcgagggcttcaggacaaagtgtctgagaagataaatcagaaactgaagggaacagccaggttgccagggataaagacacggaaagacagggttgcagaccgagacggaagacagctgtgaaatcagagaccaatggggtttccttcaagccctcccaacggccctccgcaccttggttttgtcacgaagcctttcttgccatcatagcccgagccgggagaggcacagaccttgaggagggggctcccatttgggatcagggcccccagcacatcccacctctccgtccttcagccaaatgggaacgcaaatgtgtgtccccatcagcccccgccgcccccctccttgggaacctgggctcgggctgaatttttctcacctgcacgcgaggctgggggcccccggctgttcgcacccgggtgtggggccgcccctggccatatggggcggctttatggcccggtggccggatccggacgagaggaaggatgacttggcgctccacccacggcaaccattcgggaccacttccctggcctacaccgttgcctgtccgggtccgcctcaacctcttacaatctcagataggatccccgcagaatctttaagccgcgcattggtggttcagtggtagaattctcgcctgccacgcgggaggcccgggttcgattcccggccaatgcacgagtacagttttcttttctcccctccaaaaaaaggataatatatttggtagcatttctaagaaacatcttcacttaaatatttctaccaaatattaatcttaaccttttgactatagcagagtttgca

SEQ ID NO: 17232 - DNA, 2300 bp, Homo sapien
gagagaacggaaaataacagaggaagagaggtggaaagaacaagggatgtagagtggggggcggggagacctggcccttcccccgcggggggccgagatccgagcactgtgtcctttctcagggtcacgcctgcggaggtgcgggccggggacggagggaggggggtgtggaggctgcaggacccccatgctgggaggaggggagtgcgagggcgtgcggaatcgtttaggcctggggctgcaaactctgctatagtcaaaaggttaagattaatatttggtagaaatatttaagtgaagatgtttcttagaaatgctaccaaatatattatcctttttttggaggggagaaaagaaaactgtactcgtgcattggccgggaatcgaacccgggcctcccgcgtggcaggcgagaattctaccactgaaccaccaatgcgcggcttaaagattctgcggggatcctatctgagattgtaagaggttgaggcggacccggacaggcaacggtgtaggccagggaagtggtcccgaatggttgccgtgggtggagcgccaagtcatccttcctctcgtccggatccggccaccgggccataaagccgccccatatggccaggggcggccccacacccgggtgcgaacagccgggggcccccagcctcgcgtgcaggtgagaaaaattcagcccgagcccaggttcccaaggaggggggcggcgggggctgatggggacacacatttgcgttcccatttggctgaaggacggagaggtgggatgtgctgggggccctgatcccaaatgggagccccctcctcaaggtctgtgcctctcccggctcgggctatgatggcaagaaaggcttcgtgacaaaaccaaggtgcggagggccgttgggagggcttgaaggaaaccccattggtctctgatttcacagctgtcttccgtctcggtctgcaaccctgtctttccgtgtctttatccctggcaacctggctgttcccttcagtttctgatttatcttctcagacactttgtcctgaagccctcgagtggtcaggcatcgttctgcggagggtcatgctcttggtttgaggtgggtgttgatcccttttttgtaccccttgctttccccttagtaaactgcctgctccctgctaccctacagtcaccaggggcctccagaagcaagcaatgcgggcacacttgcgtgaggtgtcctatcagccacactcctgaatctcctatgactagttttgaatcaaatacttgtactgtaagtggaaagacctctccactcatacctatgtttcaaagacttgctccctctgccttgaagatcctcctcagtccagccatccttaaggagaccttttcccggagcacctacttcactgggcttctgtaatagctacttggtgtcacatggtcttttccattagatcctgcagggataagctgggtctctcctgcgtatctcactatgactcgcccgagcctagacaagtgccctgtccgcagagtgggcgcgcagatgttcgcggacttgaatgtaactggcttagatagaagagagcgcctctccaacctcccggcagagcttcggttgagtcggacagattcacccagcgcactcgggttgctccctgtctcgactaggaagcgaacttcggagatgatgtataaaattcagcctgggggctgagaggtgctaacttctatttcagggttagtgagggtacagtaagcctcccagaaagctgcaattctggaggaactctgaatttcatccccaagcgagctctgccccaatagcctcctcctttcagctgggtcccgcctccttatacagccttacggtctgtaaaccagccagtgcccccattcacccctcacttcccgcactcccaggccagtttctctccttcccctccccccttcactcctcctctttccgggagcctcgtgccgggtcctagaggggcagaatctggatgtcgaagggggcggggtcgggtcctatccctcctacccttgggccgcggaatataaggctccaggcgagcagggaaccggtccacacagggtccggaggagcaatggtcacccgggatcgagctgagaatagggacggccccaaggtgagaggcgggaggggagggagcagaggtccctggtttggctaggggactgggcccctgacgccgtcggtctggagagaggctggggacgcaggggtggaaggggagcggtgctccagaactccaggagccagaagctggagaggaagctgcaaaat

SEQ ID NO: 17233 - DNA, 2300 bp, Homo sapien
ttcattatgtagaacgaaggttgggagggaacaaggttgggaaaggaacccaggagaggcccaggcaggtttctgtctctcccctcctctcaaggaccacccatctcatccagcgtggcctaacttgcagcgccattccttttcctcacccttggaaaggcgaagatgccaagatgttgtgttctgcaaggctagtgcgttcaggaagtagacaagtcttgagcacctaccccgggccgggctttttccctaaagaggcgcagcgtatctccctctctcctcccttccattattcaatgtgcaagcgtcctgcgcccattggctgggcggtgtctggggctcttcagcccagcaccagcacccaggtccacgtgcgcccgtgtgtgtgacacagccctgaccttagtggagaccactagccaatcaggcgccgggaagagatccccagccaatcgggggcggggcctgcggctccgtcggcaagaggccaatgagggggcagtgcccggcattatgcaacccgcctccccgcccgcccggtggagcttccactcggctgcgggctggagcggcggcgggcaggcgtgcggaggacactcctgcgaccaggtaggcatctctgcggccatcctggggccgatctccgtccctgagccggaccgctgccacttccaatctgatgggctactttcggcccaggcagagggcacactgtcgtccttaccgctacccaccctctccctgcccccaaggaccgaagtcctcctcgaaatcttgcaccgggagtctgcactcctgacccactcatcttacctccagcttgtccccacctccccgtcccagctttcccggccccacagccgactctcagcgggcatgccccggtcttcttgctcgttactcgaggggccccaggtttgccccggtaccaggaccctattaggctttcagcgctccccgtgtctctgttctccagtccctggccctgcgccgcctgtgatgtcagcccacttcggactagaacatcccgttcccagcgctggttcctgctgttggccacaaccttcccttttcccctggcgctcagaaaatgctcagtagtaggggtgtggttggacggggagtaggggaagaaagatctgttggctgttgtgtgtcttctgcccaaggcttggggttggtgggggggtctggccagaaaagtaggggactgaagagagaggatcctcgggtccttgacgatggcaggttgccggcttcggtccttgtggtggggaagcagcgcaggggctaaagaaggaaaggttgtgttgtcttgaccagaatgactgggatccaggcgagagtcaggttgaggggcttttgcgccgagggcagtggccgttgtgcttcgtcctggggaagccaggaccaaccctgggatcctaataggccgtcccacttcttacggccaccgagccatcctgggactggggatatgtaagggatgcgtgacccccccggccgcgcccaccagtgtgagagtgggccgttcccccacttccgccgggaaatgggggaggggtcgctcctcccgccctcctgtggtccctccagcaaccgctgagctcagcagctgacgtcggtttccctggcgaccgtggcggcggcggaagcgcgtggtggggccgcgcacgtcggcgcgcatgtgcagcgggggtggcaccgcccccggataaaattagcctggaggcctaaatataggaggcgaccagctcacctcctgctccgaggccttggaggcccaggcagagtggacacctaatgggaacttgggaatgggaagtgtccaggtttttgtctacagccgtggttctcattgactgctcaggccatggtggcaggggatgtgaaggaaggccccggagaaccttctcccgctggcagtccccctaagggtacaggagacatcctgactccccattggaagccccaggcctgggttccactcccatcagtcctgcaggaggccaggcagggggaaggtctgagtgaagccagcaggtgctctggagttaaaccagctttctgcaagccctgcttcctggtctccctctccaggtactggctgtgatcgaacttctcaaccctcagagacttagatcttccacctcactccctcagccaagcctccaggccccctcgtgcatccgtggtggcctctctgccttctctgttctgttctccccatggcccagacatgagtggccccctagaaggggctgatgggggaggggaccccaggcctggggaatcatttt

SEQ ID NO: 17234 - DNA, 2300 bp, Homo sapien
accagccaagagaacatgatgttcccaagtgcgctggccgccgccctctcgggctggccgcctcccaaaccgctgcctctccagtctctccagcctccctgccccacattccgaggcagcttcgccccgcccccttcttccgctttgacgtcactgctgtctcccgccccctcgcctccattgacggcagcagggcctggttactgtggggacggtgaagcaggacaacaagagtcttgggagcaagcgggggctgctggagggctggagccttttgtctatgcaaaagacagggagatggaggcgggagatcaaggactgcctgggttaggggagatcacacctaaatccctgaagggggagaaaaaccatgtttccagggaagaggtatctgcaaacgagataaggccaaagccacagtatgagttggggtggagaggatcattttcagggagaggagactgagaatccaagctcctgaatctttttttttttttttaatagagacggggtttctccatgttggtcaggctggtctcgaactcgctacctcaggtgatccgcctgcctgggcctcccaaagtgctgggattacaggccaccgcgcccggcctccaggctcctgaatcttttgttttcctgtttcgatttttctgggttaatttataacacgatcttgtctcagcttttccacagagccctccccttcacccttccctcattgttcaggaaagcttaggccacgtgacagtgaggggagtgcccccacaatgattatgtcagcagctgcttggaggcctgttcatctactacccacgtttccagggagccctgcgaggaactactcatcacggtcctggatggagggggctgtgtaactgcagctctcctgagcccagactaacattttattgcctgcaaatcgtgcccctgttctctttctaggactactcatctcttttagagaatcagaattcccagccccctttctcctgttgacactcttttcccacctccccaacctatccttgtttaaaaaaaaaaaaatcatgtttatcgatcacttgccatgtgtcaggtcctgtcctgggctctggagactacagtgaatgagacagatgacgttccgtctgggcccctggagtttggctttctcttttccaagcagtggaaatatgaagcccttgccaccccacatttctctgtctagggccccagctggcctcttctctgggccatccccttggtccctctgtagtcctggcttcctggcccccacttttggggcagctttaactgtgggtggctgcgtcctctggaggaaagtactagacaccacgtaggctgcccggagaccttgtctctgagtggccatagaagcacctgccattgtttcccttcacagccactattggctctggttgccccttccattgtccgcatccttcctccacccactcacccaccggtcacacgtggacccttaactgtcctctcccaggatttgaagtgtcagaggaagtgcttcggttaaagggcttcattatgtagaacgaaggttgggagggaacaaggttgggaaaggaacccaggagaggcccaggcaggtttctgtctctcccctcctctcaaggaccacccatctcatccagcgtggcctaacttgcagcgccattccttttcctcacccttggaaaggcgaagatgccaagatgttgtgttctgcaaggctagtgcgttcaggaagtagacaagtcttgagcacctaccccgggccgggctttttccctaaagaggcgcagcgtatctccctctctcctcccttccattattcaatgtgcaagcgtcctgcgcccattggctgggcggtgtctggggctcttcagcccagcaccagcacccaggtccacgtgcgcccgtgtgtgtgacacagccctgaccttagtggagaccactagccaatcaggcgccgggaagagatccccagccaatcgggggcggggcctgcggctccgtcggcaagaggccaatgagggggcagtgcccggcattatgcaacccgcctccccgcccgcccggtggagcttccactcggctgcgggctggagcggcggcgggcaggcgtgcggaggacactcctgcgaccaggtaggcatctctgcggccatcctggggccgatctccgtccctgagccggaccgctgccacttccaatctgatgggctactttcggcccaggcagagggcacactgtcgtccttaccgctacccaccctctccctgcccccaaggaccgaagt

SEQ ID NO: 17235 - DNA, 2300 bp, Homo sapien
gtcaggagttcaagaccagcctggccaacacagtgaaaccacatctctactaaaaatacacacaaaaaattagccggggatggtggcgggcacctgtaatcccagctactcgggaggctgaggcagagaattgcttgaacctgggaggtggaggttgcagtgagcccagatcaccccactgtgctccagcctgggtgacagaacgagactgtctcaaaaaaaaaaaatccacttaacacgatgttgaacaaatgagagtatattttaggtagagtgtggtggctcacgcctgtaatcttatcactttgggaggctgaggcaggcagatcatttgaggtcaggagttcgagaccagccttgccaacatggtgaaacctcacctctactaaaaatacaaaaaactaggcgtggtggcatgcgcctgtaatcccagctacttgggaggctgaggcaggagaatcgccaccgcgcgcggcctttttttgctttgagacagtctcactctgtcacccaggctggagtgccttggtgcaatctcggctcacgcaacctccgcctcctgggtttaagcaatccttgtgcctcagcctcctgagtagctgggattacaggtacccaccaccatgcccggctaatttttgtagggatttttttttttttttttgagacagagtcttgctctgtcgcccaggctggagtgcagtggtgcgatctcggctcactgcaagtcccgcctcccgggttcacgccattctcctgcagtagctggaactacaggcgcccgccacctcgcccggctaattttttgtatttttagtagagacggggtttcaccgtgttagccaggatggtcttgatctcctgacctcgtgatcagcccgcctcagcctcccaaagtgctgggaatacaggcgttagccaccgcgcccggccgtcgtttttttttttttttttttttttttttagaagagacagggttttaccatgttggccaggctggtctcaaactcgtgacctcaagtgatccacccacctcagcctgccaaagtactggggttacaggcgtgagccaccgtgattcttataattaggtacacaatcattaccagaatgtccaacttgattgaagtcttactatatgccaggcagtgctcaggatttcgcactgccaactcaaattccttccaggtttaagagttcccatgggccccaggacccgcctgctttatggtgtcggggacttgggttcaagttttcgccttgttactgactagcgtgttacaggcgaacagattacgtaacccccctgcatctcggtctcatttgtgaggcggggggagtatgtgagctggcctcctcagagtttgtgagaagcgcctggcctggcccgcagaaaacaatcaggaagaggctctcttattttcatcgtcaccaagacaccgtgctgagatctgaagaccgcttcaccctaatactctcaccttccagcttcagggagcctcggtgggacccagggccggaaccccagcgccagaggcgccctagtcacgcccgggtctctgtacaaagtgcgccttatacgctgccaccgctcacggctgcgcctgcgcagatttagcagccgtggttaagagtgtcgtcaaggaaaatccccagcttctgggtaaacaagttgccgcgtgagaccgccggcacgtgtaccctacagctccaagacctctcagcctatgagaaagcttggagagcgggactggcatttacgtcaccaatcttggcaggtcgggggttatttccccagccaataagaacctcagaagtgtcgagggcgtggcttccggtcaggcttccaatccccgcgttggggcggcccctctctcacgtgtatctctcccgcccccgttggcctgctgaccaatgagaagacgatggcggccggaggtgccaatggaggctgtgcgggggccggcggctgcacgcggcacggggcatgggtcggcgcccctaagccaataagcgtggggggcgtggcagcccggcccgtgggcgggtttggaggagccagtgtaatgctagaagtcctagaagaaatttggagtgtgcgtgcgcgccgagcggtgagtgctcggggatgggggagagatgcggggcgatcggtgtggacttttccggggtggtgtggtcggttaggaaggtgttagagtgtgtgtgtgtgggatcatgcaaatacgtgataactgcggtgggagctctgatggttgtggagaatagggaccgtgaactcaggtctagagggacggggt

SEQ ID NO: 17236 - DNA, 2300 bp, Homo sapien
atcctcctgggcccttcatctccgtgggtcacacatgccctcatttctactctgctgctgccgtccccacgatccaatagcaatagcacgacccctggccttgaccgtgtatctggggctctgtcccttccacatcacccccaaaccagcatcaaatgtcttgtctggctctgcactaggctcccctcagttagtgcagggtgtccaactgggggcggaagggcttcctgtgcctgcctcttccaatcctccatgtcttatttataccctgacagacactgagggttttgaacttaaaaggctggaatttggcatctttgttctctgactagaaagaggaatcatttgaagaccaaaaagcaggagccagcatctcacagcatgatctgagacccccgtggaagctgctcttttctttctcatcacataggctgagccacccgggactgtcagtgcacaaggaccagggacgcggctgctcctctgagggggaggaagccaagagtatcttctcttagattgggctgagttcccacacccagcacacacattccctgctcactcacctcccacagacagctgggaaatgacacctctggtgacagagccactctccgggcttctgtggggagcgggtggggcactgcagtgggggaggatctcacacccggaggccctgggaagccagggtgggggagggaggaagctggttcctgtttgtcttagagatcaaggccatcagcctccctgcaccttccagggatgtagtaagcacccccaccccagggccaaagggcctcgcctaaaatgcctcctgcacccttgaggcttgctttgaccccctgcactccaccagagcgacagctcccctggtcccatcttctctgacaagctgggtgggagtgtatacagctgctgggtgtgcttagagggcctaatggagaccagccagggataatctcctatgttatccacatcaagccatttaacaaatatggatttagtacctacatatgcaatgtatttggggtccagagagaggagggcaacggtccaaggtcacacctgcgaggcgaatacgcatgtaaagcagcaccttgtaacctgtgcccactgtgcctactactaaagaaaaaaaaatgagagaaaaagaaaaaaggctttttttttttttttggcccaggccctgtgcctgggaccaaagcctgagccctttcctgcagtcgggtcgctgacctaagcctggggcaaagctaggtcttggccagtcagcagccaccacgtgaagcagcccctgcccccatcacccccggcagccttgtgccctcctcctcggggtcctcagctcaccccacctcagtcgggcctgctccagcggttaagtacccctagtctgaaccttaatcgtgaggcggggcagccccctccccacaccctgtagacactcccccgtcctccgccccctggacttgtttgggcgggaagagcctgcctcatcttttcttcctaccctcctacccagtggccagggaccccaggcttcctctgagacatccaccagcggtgatgggttgggaccaatctcccccactcctctccaccctagcagtaaggtccccgctctcgatactgccccagcacctgcactggccctctctgatttcccaactccagcccattccaagtgctgaaggcgggtcgctaggtgctgggacctgggcgcggggcaagaccttgggctgtgtggggtgcaggctggtttactgggttcacgattgagggagtggtctgggggttaggtgtagggccaggctgcgttgtgctctaaggggcaggcggcaggcggtttgggggggctgtggtcagacagggtggggtggcggtgggtttggggaagccgcagcagcccgccttggggtcccgcgagtgccgagggagctgccggggcatggtggcgcggggcccgtggtcctgcccggcacgacccccgccccgcagcgccccgcagcgccccgcccccgcggccccgctcgcgacgcgtctcccgcggcgccccgcccccgcccgcagtgcccggatgcgggtgacgcgcggccgccatctttccgtcccgggcagccagcgccagtcggagccagcgcgagccgccgccgccatcactgccgctgccaagtcctccacccgctgcccccgccatgtgagtcggccgcccgccaccctcaccgcgcttccctgcgccggccgccgcccttggcaaccggccgtcgggagtgcccggggtctctcctgcgttccccgcg

SEQ ID NO: 17237 - DNA, 2300 bp, Homo sapien
gtgaaaccctgtctctactaaaaatacaaaaaattagccgggccgggtggtgggcgcctgtagtcccagctactcgggaggctgagggaggagaatggcgtgaacctgggaggcggagtttgcagtgagcagagatcgcgccattgcactccagcctgggtgacagacagagactctgtctcaaaaaagaaaaaaaaagaaaaaaaaaagaaaaagaaagtgtggtctctgttgcctacatcaccatcaccttgagtcctacatcctttgaatgagtcttgggggtgtgccctagaaaatcattggccaattcccgaagccagtacatgtagaagccaaatctgagttatgcaaatacattatttttctattgttcaacttacctctatttgggtctccattctacctgcctgcagaaaacattctctcagtcacttccaggtgaactccgtcatcccactccttctcccacctccaccattgatctaaatttggggagttcctctgagccacagcctaggtggggtggggtgggaaggggctgctggatgagagtcctctttctgagatgaatcctcctgggcccttcatctccgtgggtcacacatgccctcatttctactctgctgctgccgtccccacgatccaatagcaatagcacgacccctggccttgaccgtgtatctggggctctgtcccttccacatcacccccaaaccagcatcaaatgtcttgtctggctctgcactaggctcccctcagttagtgcagggtgtccaactgggggcggaagggcttcctgtgcctgcctcttccaatcctccatgtcttatttataccctgacagacactgagggttttgaacttaaaaggctggaatttggcatctttgttctctgactagaaagaggaatcatttgaagaccaaaaagcaggagccagcatctcacagcatgatctgagacccccgtggaagctgctcttttctttctcatcacataggctgagccacccgggactgtcagtgcacaaggaccagggacgcggctgctcctctgagggggaggaagccaagagtatcttctcttagattgggctgagttcccacacccagcacacacattccctgctcactcacctcccacagacagctgggaaatgacacctctggtgacagagccactctccgggcttctgtggggagcgggtggggcactgcagtgggggaggatctcacacccggaggccctgggaagccagggtgggggagggaggaagctggttcctgtttgtcttagagatcaaggccatcagcctccctgcaccttccagggatgtagtaagcacccccaccccagggccaaagggcctcgcctaaaatgcctcctgcacccttgaggcttgctttgaccccctgcactccaccagagcgacagctcccctggtcccatcttctctgacaagctgggtgggagtgtatacagctgctgggtgtgcttagagggcctaatggagaccagccagggataatctcctatgttatccacatcaagccatttaacaaatatggatttagtacctacatatgcaatgtatttggggtccagagagaggagggcaacggtccaaggtcacacctgcgaggcgaatacgcatgtaaagcagcaccttgtaacctgtgcccactgtgcctactactaaagaaaaaaaaatgagagaaaaagaaaaaaggctttttttttttttttggcccaggccctgtgcctgggaccaaagcctgagccctttcctgcagtcgggtcgctgacctaagcctggggcaaagctaggtcttggccagtcagcagccaccacgtgaagcagcccctgcccccatcacccccggcagccttgtgccctcctcctcggggtcctcagctcaccccacctcagtcgggcctgctccagcggttaagtacccctagtctgaaccttaatcgtgaggcggggcagccccctccccacaccctgtagacactcccccgtcctccgccccctggacttgtttgggcgggaagagcctgcctcatcttttcttcctaccctcctacccagtggccagggaccccaggcttcctctgagacatccaccagcggtgatgggttgggaccaatctcccccactcctctccaccctagcagtaaggtccccgctctcgatactgccccagcacctgcactggccctctctgatttcccaactccagcccattccaagtgctgaaggcgggtcgctaggtgctgggacctgggcgcggggc

SEQ ID NO: 17238 - DNA, 2300 bp, Homo sapien
gggttcaagcacttctcctccctcagcctctggaatagctgggattagaggcgggcgccaccacacctggctaactttttaacttttttttttttttttttttcagtagagatgaggtttcaccatgttggccaggccggtctgaaactcctgacctcaggtgatctccctgcctcggtctcccaaagtgctgggattacatgcctgagccaccgctcccggccaatttttggccaaagtttctaaaataaagtttaaggttaaatgtccggctgggcgcggtggctcatgcctgtaatcccagcactttgcaaggccgaggctggcggatcacgagggcaggagatcgagaccatcctggctaacacagtgaaactccgtctctcctaaaaacacaaaaaattagccgggcatggtggcgagcgcctgtagtcccagctactcaggaggctgagacgggagaatggcgtgaacccgggaggccgagcttgcagtgagccgaaattgcgccactgcactccagcctgggagacagagcgagactccgtctcagaaaaagtaaataaataaaataaaacaaaataaatgctctattttaatagaattataaatgccctatttttatagaattataattctagcgtttcttttttttttggagacggagttgcgctcttgttgcagaggctggagtgcaatggcgcgatctcggctcactgcaacctccacctcctgggttcaagcgattcccatgcctcagcctcccgaatagctgggattacaggcacgcgccaccacgcccggctaattttgtatttttagtggagacagggtttcagcatgttggtcagtctggtctcgagctcctgacctcaggtgatccgccctcctaggcctcctaaagcgctgggattacaggtgtgagccacagtgcacagcccgcttttccctgtttgtagcgcctattatcttacggatttatttgtttgcatgtctgttgttgatctccctgactagaatacccttactaggtaatcaataaacatatacaaatatttgttgaaggaatgagaaatgcctcttgggcttgtagtttaggctggctaaaagcactgagatggggagtggggagtaggaagagattgttctcctgggagatgggccgggaggttccttgaggatgggacttgactcagcaattaaagaactttcagatctgcagggacctgcgctgaggcccaaaggtcatgaggtcgccgatgataagagcttcttggactgtagctgggcaatgtcggaggcccagcacctccaagggacaaagaaatctgagttgagtttcccttccagccggctccaagcctcccagagacgcagggactgtcccattcccttcgtccactcccactctttccagccaccttgctctgctcttatccccatgctagtttaaggacgctggccattttttgcactctgcaaatccctcaccaaactgagcaaagtagtctgaaagaaatcagtcttcctcaaggaaggttcaggcctggggtcctcagacaaccaggggctccgtgacaatctgtgactgcagagcagtccaggaacaccggcctctccaggttcgggtcccttgtttctcaggcccagcttggtgggaagctaaaggcatgcagaggaggggaaggggagcgggtctgagtcttcggcatggcggggaactcagcccggcgtggtggtggcagcggtctcaagtgatccacaactgggcagcgtagctggggctgggggccgctcccggcgtgggcaacagcagaagcattggtgtccccaagctaggccagggtgggtttccgttcatccgccctgcgtgggcagatcgggcgctgcggggctgtgccacctcgcaccctctgaggaacaaagggcctggctgcgcgcgggtacccagccgttaggttagaagcgccttcgggtacccctgaccttcgctggccctgagagacccgcagcagccggagaatgtactgctcgcgaggatttccgagaacgcggcgccgagcccgcgtacacggttaccaaggcaactgggcggtgcctgagcgggcgggaaggaggcgttcgtctagatttgtcggcttgcggggagacttcaggagtcgctgtctctgaacttccagcctcagagaccgccgcccttgtccccgagggccatgggccgggtctcagggcttgtgccctctcgcttcctgacgctcctggcgcatctggtggtcgtcatcaccttattctggtcccgg

SEQ ID NO: 17239 - DNA, 2300 bp, Homo sapien
gttgaggagtgaggagcttcccctacacagagagacggtgggtagcccatttgtccgctaaaaccttcaagatacatctagaatgcatccatccacatcgtgctaggctgagctactatcacctggtacttggaaccgcctcctcactggtctaccgtctcccttgcaaacattttctacaacagccagtaatccctaaacatgaatcccatcacatcactctcttcctgtgctcagcttcccattctcaagggaagtcctcccatcttctaaagaatatctacctacccagcccaattatatatgagctttttaggtttttttttttagagcaaaggaatgacaggttttgtcaagctgcaggtgactataagatacagacagctgacaattgtggactcctcaggcgtggtgaaagattgagctactatcattagggttggctggctaggaccccggcaggcacctggggatagtagtgctgggaagttctggggagttgcacttctgaatgctggcatgacactgcctcaagacatctctctatccaaatggaaaaaacaaccacatcctttgtcagctaaggagagttagcaaactgtttttattaaatactgatgtctggccgggcacggtggctcacgcctgtcatgctagcactttgggaggccgaggcgggtggatcacttgaggccagtagttcaagaccagcctggccaacatggtgaaaccccatctctactaaaaatacaaaattagccgggcgtggtggcgggcgcttgtaatcccagctacccgggagactgagttaggagaatcgcgtgaacccaggaggcggaggttgcagtgagccgagatcgcgccactgcactccagcctgggtgacggagtgggactctgtctctaaatacataaataaataaataaataaataaataaataaataaataaaaatactgatgtctccaagctttggctatgtgttgcaatgtacaacctttccaatgtcgctgcaccattgcatttagaggaaatctccattccctaacaggaactacaaggccccctgcatgacgtggcccctgctgcctgttcagctccttggctcgaaatccttccccttatcttgctgattttgttttagtcccaatgtctcctgccccctcacctcagtttcttgaatacgtcaagacttctttgtctctgagaggtagctcaagttttcttctctctgcctggggggtggctgcgtctttttggttctttttagttaaaagtctcaccaaagaggtattttcctgaccccttacctaaactagtgcctgctcagttatattctcaatcataacactttatttcctgtatagcacatatcaaaatttgtgatcatttcatttgttgaatattttacctcgtggcaaaatcacacgccatcctccaaggggcgagacccctcagtgtgaaaggggcaagagacacagaacaagagtgacaaacgcataggaaagcccagaggccgctgccttgaccacagtgggtcgctctgagcagttcagtggttaggtctcttaaccaagaaagatagagcaaaccattcatgctcatgctggacttctggtttccttctttttagtcaactaggttcaaccctgatggtccaagaaggatatgccattttcatcctaagaacctctctaggaaccccaagtgggctccccacttggtatttttgctaagcaatcactgttggggggggtacaattacaggcagaaaggatctgagccccacccctcgggactcaggaatttgaggaccttggtctttaagatctgccccatcagctttcagaaagggcggggcgacgggagcagctgtcacctccttctctccaccctgccggcgttcacgtgtgttccgctgtgcagtaacagctcttcttccgggacttcctggtcgccgcgaccaatcaaaatgcttttcctgtccttaccattgtcagccgctgccaatcggctcgcctctaccaacgccccttaaaggcgcagccactgcctccggagccggggcgaaccaattcctccgttgcggcccccacctgcagtatggagtcgtctcgggggcggcccgggcccgagacggaccttctggctgtagcggaacatcaggccctagtctttggcggcgggccgggccgaacgtcctctgagccgcccgcaggcctccgggtgtccggggaggaagagaccgagaacgttgggggcgcgaaccgccaccccaggacgtccccgaagacgtcaag

SEQ ID NO: 17240 - DNA, 2300 bp, Homo sapien
tttcacaggttgcccaggctgatcttaaactcctgggctcaagtgatacagccgccttagcctcccaaagtgctgggattacaggcgtgagccgccaagcctagccatggtttgttttttctacacaatatgcttaaacagcaaatagcatttagaatgcattcagaaaggatattagctgaataataatcttctctattgttcatgtaagaaaagtgctaacgtaggcatgtagaggctcaacaatgtcatcaagtcctgaagttctttccaggcctctcttctgccttctgcaatgttaggcttcaatgtcaagctgcttccttcagtagcactagaagcagcaatgagggctgcatgcttccctgctcacttccagaaatctcttcctccataccttgccctatacatcttttcatctatatcatttgtaatacactttatgataaaccagtaaacgttaagtgtttccttgagctgcccagcattctgagcaagaaactgattcccactagctggcccacttaaatcacaggcttatgcctgatccaataaccataatctggaataaaaggtattgattagtataagttaattggggctcatttctggacctgcaatgaagtcagtttccttctcaaatcctcaaaactctaagtgctttcagaagtgggaataaagctgggcgcagtggctcacgcctgtaatccaagcactttgggagaccaaggcgggcggatcacctgaggccagcctgagcaatgtgatgaaaccccgtctctactaaaaatacaaaaattagccgggcgtggtcacatgcacctataatcctaggtactcgggaggctgagacaggagaatcagttgcaccctggaggaggaggttgtggtgagctgagattgtgccattgcactccagcctgggcaacacagcgaatcttcatctcaaaaaaaaaaaaaaaagtgagatttaaataggtcttcatcaacctagggatttggggttgtcagcaacagaaactactacagaaaccgactgcatagactggagagacaggtggtcccctaaaggaaaaatagagtgttagaagaaaggagaagagtgctggacagtacatacttaataaatatccactggttatttcatagaaggcccaaaaatgtatttatttaacccagtaatgaaatctgagggttaggaagagcagaaaagaaggaagtgtggcaggaaggaggaaaaatgaaagtgggcccaaacaacacggcagctaacagagatcttgcaacgaaaggtctattggtggaaaaactcctcccaggaatgtcagaacttttaagaacgacatagtaatgacacaagaataaacacacaggcaaatgagcaaacaacggaatacaaagtctagaaatagacacaagtaaatatgctaacattatatatcaagggcagcatttaaattctgttggggcagtttgtttaacaaatggtgttgacataactggcgctccatcgggcagagaagttagaccccagctcatacatgcataaggataaactccagttacattaaagatttaattttttttataaaaagaagaaggccgggcacggtggctcacgcctgtaatcccagcattttgggaagccgaggcgggtggatcacctgaggacaggagttcgagaccagattggccaacacagcgaaaacccgtctctaataaaaatacaaaaattagccaggcgtggtggcgggcgcttgtaatcccagctactcgggtggctgaggcacgagaatcgcttgaacccgggaggcagaggttgcagcaagcccagatagcaccattatactccagcctgagcgacagagagagacctgtctcaaaaaaggaaaaaaaaaaagaaaagaaaaagcaagataattcactgggggaatttggggaaactttcctaaactggaagccaagcgtgagcccttctcattccgcctcttccattgggttcccatgacttacgtcacaggacatcgagccaatgggaactaggcatgggcgacgagcttgcccaatggggccggggcgggagatttgaaaagtccttggccagggcgcggcgtggcagattcagttgtttgcgggcggccgggagagtagcagtgccttggaccccaggtgagctggcctcctgtcgcaggccttgcgccgggagtgggcagatgatcaggtagatcagagggtccgttgggctggcctgcgcgcacgccgcagggctggaaggaggtagggacgatagcagggcgggg

SEQ ID NO: 17241 - DNA, 2300 bp, Homo sapien
catgtatggccgggcgcggtggctcacgcctgtaatcccagcgctttgggaggccaaggtgggcggatcacgaggtcaggagttccagaccagcagcctggccaacatagtgaaacctggtaacatagtgaaacctcgtctctactaaaaatgcaaaaaattagccaggcgtggtggcaggcgcctgcagtcctagctacttgggaggctgaggcaagagaatcgcttcaaccttggaggggggaggaggtgttgtcagccgagatcgcgccactgcatcccagcctgggcaacaagagtgaaactccgtctcaaaaaaatgaaataaaataaacgaatgatcagctgtttgttagttcttggttattaaaagtggggtctatgtacgcacttttctgaggaaaaaataaagtgtggggtatgtggatgggattatgtgtgaactccctggattgtatacatgtttaggaagagggccatagctttttttttttttttttttttttgagacggagggagtctcattctgtcacccaggctggagtgcaatggcacaatattgactcactgcaacctccgcttcccgggttcaagcaattctcctgcctcagtctcccgagtagctgggattacaggcgcccgccaccacgcctggctaatttttgtatatttagtagagacggggtttcaccattttggtcaggctggtcttgaactcctgaccttgtgatccacccacctcagcctcccaaagtgctgggattacaggtgtgagccactgtgcccggtgaagagggacatagctttcataagggtcataaaggatttaggcctccccttctgcagcgtttaagtgcctgaggccagggaagaggtgactggattattttgcagagaaagctggggcccaaggggagggagacaggaattggaaaagggtaggaatgggggaggagatgccagatcagccctgagaacctctttacccatctcaaagacttgggacactaatgggaaaggctgggctaacttctgctgcccttccccactgtctgtccaggggaacctgggaaagacaaataggagctgaatccttcactgaaagccccgtcatcgtatctatgggttgggcattaggaacggcctggccccacaaatcacacaactggggtgtagaacaaaatggttccacagatgacaccaggctggtccagggccgatgcaggccagaaccccgctgggaggactccccagaacaggcactgagctgaggaaaggcaggacacgtggtctgctaccgaccccaccagatcttgctgggactctgggcagctccggagtaagagcagcatggtgagtgtttaagagcgcagaggctcactgggcagtcccggggacactgctaagtccccaaaccgggtctacaggccttcgaccacattcatgcggccacgtgcctcagagccttcggggggtcttaggaggcaggcaggagggtctcccttctaggccattctaggaggggactggggagcagaggttagactgtagggtaggggtaacctgatcttacagtccggaagccatgagactagtcgcctggccttgcgccccgccccactgcagggtggaaagcctgtccccctccagtcacccagctcaataacgccctcttccgtgggtcttctgggccccagaaatcgttccctctttccctcgcttgggtactgccatgcggtctggggaacccgtggactatcgatgggtctggcccagggtttgccctgcccgttagcccaggaggatagacagacacggggcactggtgttcccctagtgatttctcctgcccgtcccgaaagcaagcaattccaccgcttctcttcaaagctctgcaacgaagagctaggtccaaggaccgcaggcggaggcaggaagtgtcaagatcccaggttacggaatggcaccaagtcggtaaccaaaggaagcaacaacccgggtgttcaaggcagtcgtgcaaggcggcgcgggggcgaggccgaggccactccctcccacttccttgacgctatttcctgggaggagccggagctcgcggcccggagccaagagattcccagcccagtgctccaaaatactcggcctgggggaggctggtccgtgagcgtgcgcccggaccgttccgccatgcatagtggacccagcactacagcaagcctggcacgacctctaaggcggttcgcggcaacgtccgcacgtcggctcgttggtctaggggtatgattctcgcttcgggtgcg

SEQ ID NO: 17242 - DNA, 2300 bp, Homo sapien
cactcatagcacccacatttcctgcagagtcaagctgccactcccatgagatcgccactctaaaaggtggttctctaacttaggggcagaaatgttgcataggcctaagggtcctttgcttaactgatgccacaccccactggtgcaggtggactgggtcaggcggccgccccaccctcgatggaaggggctgcccaccttccaggcctctttctccaccctaggacgtcccctagaacctgagccactttgttttgtttggctcttcattatagttctttgggtttggtggctcataatgttatatatatagtatataatataaaaatatatatttaaatatacagtatttaaaatttggcacagcttccagatgcggtcctctaactggtctttcacttgcagttacctccatccctctccaccagcgggatgtcagggtaaggagtaagcagggatccggctggcctggcctggcctggcaccaggtttcgtgcagcagggtgcagaagggctgaggccatgtgaacagagtccaagaaagcatcattcgggagtcgctagggatcctggtgtggaagggcagggcacttttctggagcactgaagctaggctggttaaggaagaaataaatgccagagataaggcaagaaataggatctgtgagctcttggcaggacctaaacctccttggaagataggcagaaagctctcgacaccattccatggcccacgaaccaatgtaagatgagcaaatggcttgaaggaattgctacctccaggtcaagccagggatgcagcactgccgagaccacgtttgtgccaagcactgggctggaccctgtgcagaaccaaatgaacaaggcacgttcccctttcagcactaacggcactgtaagaacagggagaagtggaatctaatctggcctgagggtagagggtgatcagctaagtctgaaacaccatgtagaaacttgccatgtatggccgggcgcggtggctcacgcctgtaatcccagcgctttgggaggccaaggtgggcggatcacgaggtcaggagttccagaccagcagcctggccaacatagtgaaacctggtaacatagtgaaacctcgtctctactaaaaatgcaaaaaattagccaggcgtggtggcaggcgcctgcagtcctagctacttgggaggctgaggcaagagaatcgcttcaaccttggaggggggaggaggtgttgtcagccgagatcgcgccactgcatcccagcctgggcaacaagagtgaaactccgtctcaaaaaaatgaaataaaataaacgaatgatcagctgtttgttagttcttggttattaaaagtggggtctatgtacgcacttttctgaggaaaaaataaagtgtggggtatgtggatgggattatgtgtgaactccctggattgtatacatgtttaggaagagggccatagctttttttttttttttttttttttgagacggagggagtctcattctgtcacccaggctggagtgcaatggcacaatattgactcactgcaacctccgcttcccgggttcaagcaattctcctgcctcagtctcccgagtagctgggattacaggcgcccgccaccacgcctggctaatttttgtatatttagtagagacggggtttcaccattttggtcaggctggtcttgaactcctgaccttgtgatccacccacctcagcctcccaaagtgctgggattacaggtgtgagccactgtgcccggtgaagagggacatagctttcataagggtcataaaggatttaggcctccccttctgcagcgtttaagtgcctgaggccagggaagaggtgactggattattttgcagagaaagctggggcccaaggggagggagacaggaattggaaaagggtaggaatgggggaggagatgccagatcagccctgagaacctctttacccatctcaaagacttgggacactaatgggaaaggctgggctaacttctgctgcccttccccactgtctgtccaggggaacctgggaaagacaaataggagctgaatccttcactgaaagccccgtcatcgtatctatgggttgggcattaggaacggcctggccccacaaatcacacaactggggtgtagaacaaaatggttccacagatgacaccaggctggtccagggccgatgcaggccagaaccccgctgggaggactccccagaacaggcactgagctgaggaaaggcaggacacgtggtctgctaccgaccccaccagatcttgctggg

SEQ ID NO: 17243 - DNA, 2300 bp, Homo sapien
aagttttagggatggtttgtatgttggggaagtggtttggaaatatttggcatctcctgtgagagaggagagacgctaagatttagttggcagacatagggaagatggagaggtgagttgagactcacagagggcaggtctctgagttcaaatcgtgagggaaaaggactctggcagagtggcagtgttggggtctcttgtgtcacattgcctgtctctgcacaagccaggtccctgcccagctggtgtggcacagagcccttcggcctggtacagcctatgtgctgacagaactgcgagtgtccaagatccgtggtcagcgccagcatgtttggatgaccagtcagtcctcccgtctgttgctgctgaaaccagaatgtgtgcaggagctggaactggagctggaaggacccctcttagaggctgaccccaagccactccccatgcccagcaactcggaggacaagaaggatccagaaagtcttgtccggtattctagactcctatcctattcggtgagcacagggagagatcctagagcttgaggggccagaaatgtgggttttcaaagaggaagaaaatagtggtcaactggacctcggcctgtttgcagggagcagtcactggcgtgttgaatgagcccgctggcctctatgagctggatgggcagctggggctctgccttgcctaccagcagttccgtggccttaggcgggtgatgcgacctggagtgtgtctgcaggtatgtgagatcagggctgataacaaaaagagacctctgcagcttctcttaccttcataggctccttttctgcagcagggtggttatatagaaatatagaaattaaaagtgtgtgttagggggcacttttgctaaggataacttggacagaagcttaaataaaaaggagtagagtcttgggcactgtgaggaggagttgtggccagagcatctccttcacagaagggcctttcagctggaggaggagatagctgaagcacagatctggggctggggtgatctcaggcgacccggtgagaagcctcagccatgtctgttcatccaggagccacccagcccacagcaagactgagtggagctcatgggagatgaaggctgaccgcagcgggagtgggttgtaatggaaagtgaggccagcccacgtgggagaaattgctttccgtcttcctggaacccaggcagtggcaaagtgcggttaactctgcctgggttcattgagttggggtcttcatctctgctttttcattttctctgctttcccccagctccaggatgttcacctgctccagtcagtgggaggggggacaagaaggccagtgctcgccccctgcctccgtggcgccgttctgcttcaaagcttctctcgtcagaagcctggggctcactcatcccgtcaagcctacggggcctccctgtacgagcagctggtgtgggaacgtcagttaggacttcccctctacctgtgggctaccaaggccctggaggagctggcctgcaagtgaggaggctgagggcccagggcggggaggcagtgggagtagcacacttccttggcaaggagagcaggattcttgaagaggcaggctcttcaggggaagtgactgtgctgcttttcctggccaaggctgtgtccccatgtgctgagacaccaccagttcctgcaacattcctctcctgggagccccagcctgggactgcaactcctggctcctaccctggatcttctagctccgccaggcagccctgttcggaatgcacacaatgagatccttgaagagccacatcactgtcccctccagaaagtatgaggatgtgggggaaggatggtggcagaacactggaggacacctggggcccatgggacacacacccgatttctcttccctccttgacagtacactcggctgcagactccctcctccttccccactctggccaccctgaaagaagaaggacagcgtaaggcctgggcctcctttgaccctaaggcccttctgcccctcccggaggcctcctacctgcccagctgccaactcaatcgccgcctggcttggtcctggctctgtctgctgccctctgccttctgcccagcccaggtaagggggaccctagcagggctcaggtgatttccctttttgtcatccttattgccacgactctagtctcggttactatctttcttcgtcattttgactacactagccttctaagcagaccacttcatctgttgttggccctccaattcattctctctgcagcaactagaaatggggatatg

SEQ ID NO: 17244 - DNA, 2300 bp, Homo sapien
actgaacttttgagtttttcagacacctgctctatcctcctgcctttgaatatgtgtttgcttccgtcctgaaaccccttccggcgcttttttttttttttttttttttttgacagagtctcgctctgttgcccaggctggagtgctgtggcacaatctcagctcactgcagcctccgtctacccggttcaagcgattctcctgcctcaaccttctgagtagctggaattacaggtgcgcgccaccacgcccggctaatttttgtatttttagtagagatgaggtttcaccatgttggtcaggctggtctcgaactcctgacctcaagtaatccgcccgcctccgcctcccacagtgctggattacaagcgtgagccaccacacccagcccctttcggcgctttttgccttctacacgcacttcgggtctcagacgcttttacttattatggttgcccttttcccctacagctccgtcaagggtcttctccaggaacccacagccccatagttcccccattaacctgctcctggtttcccaccaggattaaaccctagagagtgaacggagaccagtttaaggctcacagcgggcgccgcgtgaatgagggaataaacattcgcagaaccagtaagaggtaggagcggaccgactcacaaccccctcacccatgggccggacgcggccagcgagcccagagagacaaggcagaggaaataggaagagaaagagtatctgtgacaaacaagaaaaaaggaacaagagacgtaatagcagcactcacggaggaagggacctgggcccggccagccgccatgatgcgccggagctccgcccccgggaggggcaggtgctcgcttgggggtggggatgggggtgggggggcgctcggtgacgtcaccggtgagcgggtttcctcgccacctccagctccttctcgctgctcaccccctcgcttcctagagactccgcgaggcgcctcggtgcaccatcccaactcccgacacccctgtctcttttctctgatttttttttttttaagacgaagcctggttctgtcgcccaggctggagtgcagtggcgcgatctcggctcactgcaacccccgcctcccaggttcaagggattttccggcctcagcctcctgagtagctaggattacaggcacctgccaccaccacgcccggctaatttttttttttttttttttttttgtatttttagtagagacggggtttcaccatgtggccaggctggtctcaaactcctgacctcaggtgatccacccgcctcagcctcccaaagtgctgggattacaggcgtgaaacacagcccctggccctctctgatttttttgagacgaggtctcgctctatcgcccaggctggagtgcagcggcgccatctcggttcactgcagcctcgacctcccgggctcaagcgatcctcccacctcagcccaccaagtagctgggatcgcaggcttgcaccgccacacccggctaatttttgtatttttctgtagcgacatggtttcgccatgttgcccagactggtctcgaactcctgggctcaagcgatctgcccgcctcgggctcccaaagtgctcggattacaggcgggagccaccgcgcccagcctccgtctccctcctaagtgacatcctgtccggcatcccgcaggccttcagatggatggggtagcagagctcaggaactcaaacacagcccgcctggtggatgacttctaagcatctttcagtctccctgatcttgccaagcagagaagggcttcctcgtaatgccaccaaagcacaactttcacatgcttgctttatggccttaactaactgatgtcattacttaactgtccccgcggggacggggaactgaatgtattttcacaaacgtcagttcaagacagatttgtgggagaaaccacctggggataaacctctccccaccaagaacctagaattcggccgggtggctggggaaaagtgggcggggcgtagtcgccccggcgctggcaggtccagtctctgcccgcggcgcacgcggatgacgtaacaaacgcgcgcgacgattcgaggtgctctgtggccgcgagtgcatcttccacgtgagtatagttaccgcgtgcggacctggatcctcctccaggtgcagcgtttcgtcatctagcccaagcttggtctggcggcttcagtatccccaccgggccgagctgtgtctacttggtgcccgcgtatttgctttagtggaggcgtccattcgtcctatcttgcgtgcgttccgcag

SEQ ID NO: 17245 - DNA, 2300 bp, Homo sapien
ttttttatttctctaacttgccaagctcagtcctggaaggcatttttttcaccctgacatatgcatggctagctcttgttatttagatttctggtgattcgccttcgtggaaaaggcttcactagccactcaagtagttactatcagatggccggccctattttaatttcctgtaaagcgcttatcactattggatgtttttatttttcgctctatattccccactagaaaaaaaatctctacgtgggcatgggatgttgctgcttcgtttccattgaattaccaaggcttagaacaataccagggcttgaaacgcaaaaaaattctaaaacttgtggaatgacttaatgaactcttgattctcaccactcttcagcccctccccaactttcaggacagtcttcctgaaggcattttgtttattaagccacttgatttccgtctatcattcccagtaaaatataagcttcaagagctcagagacagggtttgcgtgcatgagggctgtattccatgaccagcatggtgcctgatataaagtaggcggccggcagtctttctgttagctgaatccatgaatgggacaatggggctaaatttacatgggggtcggccatgcctggggtctgcggaacgcacgcaagataggacgaatggacgcctccactaaagcaaatacgcgggcaccaagtagacacagctcggcccggtggggatactgaagccgccagaccaagcttgggctagatgacgaaacgctgcacctggaggaggatccaggtccgcacgcggtaactatactcacgtggaagatgcactcgcggccacagagcacctcgaatcgtcgcgcgcgtttgttacgtcatccgcgtgcgccgcgggcagagactggacctgccagcgccggggcgactacgccccgcccacttttccccagccacccggccgaattctaggttcttggtggggagaggtttatccccaggtggtttctcccacaaatctgtcttgaactgacgtttgtgaaaatacattcagttccccgtccccgcggggacagttaagtaatgacatcagttagttaaggccataaagcaagcatgtgaaagttgtgctttggtggcattacgaggaagcccttctctgcttggcaagatcagggagactgaaagatgcttagaagtcatccaccaggcgggctgtgtttgagttcctgagctctgctaccccatccatctgaaggcctgcgggatgccggacaggatgtcacttaggagggagacggaggctgggcgcggtggctcccgcctgtaatccgagcactttgggagcccgaggcgggcagatcgcttgagcccaggagttcgagaccagtctgggcaacatggcgaaaccatgtcgctacagaaaaatacaaaaattagccgggtgtggcggtgcaagcctgcgatcccagctacttggtgggctgaggtgggaggatcgcttgagcccgggaggtcgaggctgcagtgaaccgagatggcgccgctgcactccagcctgggcgatagagcgagacctcgtctcaaaaaaatcagagagggccaggggctgtgtttcacgcctgtaatcccagcactttgggaggctgaggcgggtggatcacctgaggtcaggagtttgagaccagcctggccacatggtgaaaccccgtctctactaaaaatacaaaaaaaaaaaaaaaaaaaaaaattagccgggcgtggtggtggcaggtgcctgtaatcctagctactcaggaggctgaggccggaaaatcccttgaacctgggaggcgggggttgcagtgagccgagatcgcgccactgcactccagcctgggcgacagaaccaggcttcgtcttaaaaaaaaaaaaatcagagaaaagagacaggggtgtcgggagttgggatggtgcaccgaggcgcctcgcggagtctctaggaagcgagggggtgagcagcgagaaggagctggaggtggcgaggaaacccgctcaccggtgacgtcaccgagcgcccccccacccccatccccacccccaagcgagcacctgcccctcccgggggcggagctccggcgcatcatggcggctggccgggcccaggtcccttcctccgtgagtgctgctattacgtctcttgttccttttttcttgtttgtcacagatactctttctcttcctatttcctctgccttgtctctctgggctcgctggccgcgtccggcccatgggtgagggggttgtgagtcggtccgctcctacctcttactggtt

SEQ ID NO: 17246 - DNA, 2300 bp, Homo sapien
ttagccaggctggtctcgaattcctgagctcaagcgatccgcccgcctcagtctcccaaagtgctgggagtatgggtgagttctcccacagtttctaccctggagcccccaggcttcaggacccttccgcatccagaggttgcagtgagccgagattgcatcactgcactccagcctgggcaaccgagcaagaccccatctcaaaaaaaaaaaaagtttttagtgtataagccttacttctattgttaaatttattcctaattatttttattctttttgatgctactgtaaatagacatagatatttttgcctttttcatttttcgcttagcagtatatcttggaaataatttcatattgatgaaatcatattacttcattacattcctatattctctttttttggtggcttagtctttcattgtatagacttaccatagtttacttaatgaggtctctgttgtcagcctttaggttatttcatgtacttgctaatacaaacgttactgtggtgtttaatcttgtaagtaggtgattttatacctgtgcaaataaatcagcgggatgacttcctcaaagtgtatttacccaatcagagactgtgtgcatttgtcattttggttgttattgccaaatcgtcctccgtagttgatatcagtttactctcctatcaacccagtcaagtggtaaggcttctgggctaggcagggtggctcacgactgtaatcccaacactttgggaggccgaggtgggcggatcacctgaggtcaggagtttgagaccagcctggccaagatggtgaaaccctgtctctactgaaaaaatacaaaaattagccgggcacgatagcaggcgcctgtagtcccagctactcaggaggctgaggcaggaatatcgcttgaacccaggagacggaggttgcagtgagctgagatcacaccactgtacttcagcctggacaacagagcgagactccatctcaaaaaaaaaaaagctggtcaggcttctccctaacatcagcttcctctgtgttcacgctgccttgctttcgaggcctcttctcgtggcttccccagtgttctgattctgccttcccttcttacaggcatggaagttgtaaaggttggaggtcccgtctacaggattggagttggaggtggagctgcttcatctgtgcaggtgagtgggaattgctaaaggtgcagaatccttgatataaccgggccccaggcataggggagcgtataggagcttccagtctcgctgagctgagctatgccatatatgcccccaggtgcagggagataacaccagtgacctggactttggggctgtgcagcgaggagacccggagatggaacagaagatgaaccgtgtgatcagggcttgtgtggaggcccccaagggaaaccccatctgcagccttcatgatcagggcgctggtggcaatggtgaggaaaggagttggaacaagagactgggcctgcctggtatcctgccaggtttcgtttagggagaggtatcaggaatctccaaccaaccacccagctctgggtcccattctccatgctctgtacattctagacaggttcagggttggaagggtggaagcctgctgccgtgggatgattggtggtaagggtgcggcagcagttgacacaggaacacaccaaattacaggcccctttggaggccagggactgccctttgttgcctgaccaccactaggtcactgcttctccttgcaaccctctcaccaggcaatgtcctaaaagagctgagtgacccagctggagccatcatttacaccagccgcttccaggtgggtctcgtcccctgaagtgtgacattttcccacccctgccagccccagcccgcttccacccatctctcttgcaacaacatgagacgtgggagtgcccactggcccttctctttcctccccgccgtggctgtgcagcttggggacccaaccctgaatgccctggaaatctggggggctgagtaccaggaatcaaatgctcttctgctgaggtcccccaaccgggacttcctgactcatgtcagtgcccgtgaacgttgcccggcttgcttcgtgggcaccatcactggagaccggagagtgagttggcccagggagttgggagcaaacactggggcagacatgagccacctgggtatgggctagagggagagctgtcaagggagagagacgagaggaagatgggaggtagtggcaaacaagctgtggggaatgttggatccaaggaggggcagggactcaatatggaaaccaaac

SEQ ID NO: 17247 - DNA, 2300 bp, Homo sapien
tcatgatcagggcgctggtggcaatggtgaggaaaggagttggaacaagagactgggcctgcctggtatcctgccaggtttcgtttagggagaggtatcaggaatctccaaccaaccacccagctctgggtcccattctccatgctctgtacattctagacaggttcagggttggaagggtggaagcctgctgccgtgggatgattggtggtaagggtgcggcagcagttgacacaggaacacaccaaattacaggcccctttggaggccagggactgccctttgttgcctgaccaccactaggtcactgcttctccttgcaaccctctcaccaggcaatgtcctaaaagagctgagtgacccagctggagccatcatttacaccagccgcttccaggtgggtctcgtcccctgaagtgtgacattttcccacccctgccagccccagcccgcttccacccatctctcttgcaacaacatgagacgtgggagtgcccactggcccttctctttcctccccgccgtggctgtgcagcttggggacccaaccctgaatgccctggaaatctggggggctgagtaccaggaatcaaatgctcttctgctgaggtcccccaaccgggacttcctgactcatgtcagtgcccgtgaacgttgcccggcttgcttcgtgggcaccatcactggagaccggagagtgagttggcccagggagttgggagcaaacactggggcagacatgagccacctgggtatgggctagagggagagctgtcaagggagagagacgagaggaagatgggaggtagtggcaaacaagctgtggggaatgttggatccaaggaggggcagggactcaatatggaaaccaaacaaggagtggaaagcacatttgtgccctgatttctaggaacattccttgctggtgttcatagtctcatcccctctgggtggggtccctgtggtctatagatagtgctggtggacgatcgggagtgtcctgtcagaagaaatggccagggggatgcccccccgacacccctgccaacccctgtggacctggagctcgaatgggtgctgggcaagatgcctcggaaggtatgtggggttgaggggatgggtttttcctgtggtcctctccacaccaccctttaccctacgtgcactttgtcgcctgtgtgcccagcccgccccaggtgttcacactgcctgtcgctgtctgtgttgcaggagttcttcctgcagaggaagccccccatgctgcagcctctggccttgcccccagggctgagcgtgcaccaggctctggagagggttctgaggctgcccgccgtggccagcaagcgctacctcaccaataaggtcctccctgcacccttcctctgccccctgcctccttcctccgctcagcctcttctgccctcccacccttagaaagtgctgtgggggtttttgcctggccctgcaggaagcagcaggggcagggcagccaccctgatggcctggtctccctgctacccaccttctaagtagagctgttgtctgcattgggggaaagacaggcctcccactgccctgagtgccttgggggcatgtgcgggagctcaggctgtccctgtcccttgctctcttgctaaccccacctggttccacaggtggaccgctctgtgggaggcctggtggcccagcagcagtgcgtggggcccctgcaaactcctctggcagatgtagcggttgtggcactgagccatgaggagctcataggggctgccacagccttgggagaacagccagtcaagagcctgctggacccaaaagtcgccgcccggctggccgtggccgaagccctcaccaacctggtgtttgctctggtcactgacctccgggtgagttctcccacagcttctatcctggagcccccgggcttcaggacccttccacatccatctgtagcccttcatttcatgttgcaacctcccagtccgcctgcacccctggcctctccacatttctcttcccctctaatgctgtgcctctgccacccccaggatgtgaagtgtagcgggaactggatgtgggcagccaagctcccaggggagggcgcagctttggcggatgcctgtgaggctatggtggcagtgatggcagccctgggtgtggcagtggatggtggcaaggactccctcagcatggctgctcgggttggcactgagaccgtgcgggctcctggtgaggtgtgggagccccagggaggggaggaggaactatggagctgggttggcaactcattcctttggact

SEQ ID NO: 17248 - DNA, 2300 bp, Homo sapien
cttcgtgggcaccatcactggagaccggagagtgagttggcccagggagttgggagcaaacactggggcagacatgagccacctgggtatgggctagagggagagctgtcaagggagagagacgagaggaagatgggaggtagtggcaaacaagctgtggggaatgttggatccaaggaggggcagggactcaatatggaaaccaaacaaggagtggaaagcacatttgtgccctgatttctaggaacattccttgctggtgttcatagtctcatcccctctgggtggggtccctgtggtctatagatagtgctggtggacgatcgggagtgtcctgtcagaagaaatggccagggggatgcccccccgacacccctgccaacccctgtggacctggagctcgaatgggtgctgggcaagatgcctcggaaggtatgtggggttgaggggatgggtttttcctgtggtcctctccacaccaccctttaccctacgtgcactttgtcgcctgtgtgcccagcccgccccaggtgttcacactgcctgtcgctgtctgtgttgcaggagttcttcctgcagaggaagccccccatgctgcagcctctggccttgcccccagggctgagcgtgcaccaggctctggagagggttctgaggctgcccgccgtggccagcaagcgctacctcaccaataaggtcctccctgcacccttcctctgccccctgcctccttcctccgctcagcctcttctgccctcccacccttagaaagtgctgtgggggtttttgcctggccctgcaggaagcagcaggggcagggcagccaccctgatggcctggtctccctgctacccaccttctaagtagagctgttgtctgcattgggggaaagacaggcctcccactgccctgagtgccttgggggcatgtgcgggagctcaggctgtccctgtcccttgctctcttgctaaccccacctggttccacaggtggaccgctctgtgggaggcctggtggcccagcagcagtgcgtggggcccctgcaaactcctctggcagatgtagcggttgtggcactgagccatgaggagctcataggggctgccacagccttgggagaacagccagtcaagagcctgctggacccaaaagtcgccgcccggctggccgtggccgaagccctcaccaacctggtgtttgctctggtcactgacctccgggtgagttctcccacagcttctatcctggagcccccgggcttcaggacccttccacatccatctgtagcccttcatttcatgttgcaacctcccagtccgcctgcacccctggcctctccacatttctcttcccctctaatgctgtgcctctgccacccccaggatgtgaagtgtagcgggaactggatgtgggcagccaagctcccaggggagggcgcagctttggcggatgcctgtgaggctatggtggcagtgatggcagccctgggtgtggcagtggatggtggcaaggactccctcagcatggctgctcgggttggcactgagaccgtgcgggctcctggtgaggtgtgggagccccagggaggggaggaggaactatggagctgggttggcaactcattcctttggactcctccttgctctacagggtcactggtcatctcagcctatgccgtctgcccagacatcacagccactgtgaccccagacctcaagcatcctgaagggagaggtatggacatggccccatcctttgtgatctttgcttgtgtgatctttgtttggctcctgctttgtgagtgctgggcccccatctcaacactgggctgtggtgttttctgggactgattgtctaggtgtctcaccacatgctgggaatagcagtgctgtgagcccctcagggatgggtcctcctgagctgttcccctcccctcacccctccccgtctccccaggccatctgctctatgtggctctgagccctgggcagcaccggctcgggggcacagctctggcccagtgcttctcccagcttggggaacaccctccagacctggaccttcctgagaacttggtgcgggccttcagcatcactcaggggctgctgaaaggtgagtgaagacccctggggagatagcgcacagggtgccaggcgtgcagcaggcgttcaccatctgagcagtggggcaaaagggactccaatggacgatgtaccccagatcccctgacattctgacacacactcttgatggactgactccggaaggtggggtggggctgtcaggtttgggtcccgagg

SEQ ID NO: 17249 - DNA, 2300 bp, Homo sapien
ccaacagcattttagagatgaggaaatgagactcagagaggagtctgatggctatagtaagaaatgaggagtcaagctccttagtgtgcgctacaaaaaccctgcacacctgactgtgtttgcagctccctgccacccattcccatcctaccctcccttgccaaacagatacacttgctttctccaaaatatgccctctcatctccaagtttttgctcctgatgttcccccagctagaatacccctaggatgtcctactgaattctgagtcaaactttaagactcaaagtatgggccaggcatggtggcgcatgcctataatcccatcactttgggaggccaaggcaggaggatcacttgagaccagaagtccgagaccagcctgggcaacacagtgagactccatccctaaaataaaacacacacacacacacaaaaattaccggagcatggtggtgcatgcctgtagtcccagctactcaggaggctgaggcaggaggatggcttgagcccacaaggttgaggctgcagtgagctacgactgcaccactacagtctagtcttggcaacagtgagaccgcctctcaaaaaaaaaaacaaaaaaagactcaaagtgtgctccactgttccttcagtgaggcatcgggggctgtgtcctaaatgtctttgtatctccagcccttcacattagggcctggcaaggtaagagaccaataaatatgtaccctttggcttcatttcactaagtcattagggtccagaggtatggtcagcacttggaaccctgtggaatggcctcaagatcagagtcctcttgcccaattcttggctgggaagtaggtgacatctagaatccatgagggtatgggtgatctcctgggttccagacatttgcattgagtttattcaatcacttaacaatatatattaggtctgggctgggcacgctggctcacgcctgtaataatcccagcactttgggaggccaaggcaggcggatcatctgaggtcggaagttcgagactcacctgaccaacatggagaaactccatctctactaaaaatacaaaattagctgggtgtggtggtgcatgcctgtaatccagctacttgggaggttggggcaggagaacagcttgaacccaggaggcggaggttgcagtgagccaagatcatgccattgcactccagcctgggcaacaagagtgaaactccatctcaaaaacaaaacaaaacaaaaaaacccaatatatatcaggtctgttatgctctaaacaccgtgccgggtgctgaggatcaaagatgaatagagaaatgaactgaaatgatatagtgaagttaaaacttaaagaacacaacaaatctgtaaaagacaaacaaaagagggtttaatctgtgcttctgtccaggtgtgtggagctgggggtggggttgcacctgcccgggagcattcccaaggcaaatatttgagaggaattagatttctaatacccaggttggctctcactttcaggaagatgtgagacctgaatcctaacctggacgcattgttcccctaattcccagcagcagatctatgaattagcggtctgggtggcagcccattcttctttcagaggcccagaacaccgtgaaactatgctttcctgactcaagagaccctacctagacgtgggcccctttgacgagcacctgcccctcaggagggtctcaggcgaccttcttggaaggtgtgaccacttgaaaaggacgaggaggccaggcgctgtggctctcgcctgtaattccagcacttagggagccgaggcgggaggatcgcttgagtccaggagtttgaggccagcctgggcaagattgggagacactccccaccccgccccatttctacaagtaattaaaaatttagccgggcgtggtggcgggagcaggagccactcaagaggctgaggcaggagtatcacttgagtcctggaggtggagactgcagtgagcggtgatcgcgccactgcattacagcctgggcgacacagcgagacctgtcaatcaatcaatcaatcaatcaatcaagaggaggctggcgggagcatgctcgtgaccaccgggggcgacatagaccctaaccctaagtccaaccccaaggcagaccccaccgtcccgccaggcgcactcctaagagcgcggcttccggagcaaagccgctgacccccgcccccagggtcttggcgccgattggccaacgagagcgcagggcggagccaaatcttaaaggatccgggagctaagccagacccgggtggcgg

SEQ ID NO: 17250 - DNA, 2300 bp, Homo sapien
tcttggattctaaaaccatttgccaataaaagaaaataggggtccttggagaaatggctgattgcaggactgtggcaggaaatacacaaaatgagcctggagcattttatagtaccagaaagtaaggtgacactaaataaaaacaaggttttaattaaaataccaatgatgacaacaacactgatgggactcttatttttctccctggttgaggattgaccgccatcatgaatgacttagtaactatctgaactaggaagttcatgatcaactgactacatacttcaggaggaacaaatggttattgaggtccttcaccctgggaagacaacagtacctaagacagaaattcaggaaaaactagccaaaatgtatgagactacactagatgtcatcatctttgtttgtttttgtttgtctttatgagatggagtctccgtctgtcacccaggctggagtgtagtggcgcaatctcggctcactgcaacctctgcctcctgggttcaagtgattctcctgcctcagcctcccgagtagctgggattacaggtgcctgccaccacacccggctaatttttgtagttttagcagagacagggtttcacaatgttggccaggctggtctcaaactcctgacctcatgtgatctgcctgcctctgcctcccaaagtgctgggattacaggcgtgagccaccacgcctggcctcatctttgtatttggattcagaactcattttggtggtggcaagacaactggctttggcatgatttatgattcactggattatgcaaagaaaaataaacccaaatgctgacttccaagacatggcctggatgagaagaaaagaactcaagaaagcaatgaaaggaacacaagaccagaatgaagaaagggggactgcaaaggacagtgttggtgtggcaaaaagccaaaggagtaaagatgctacagtaacatctgtggccactgtggatttttcacaagatttataaactaaaaacttttgtgtgcaaaaaaaaatggatgggggtatgctaaagagacacaggagccaacggaaacagctctcaaaggccaaagctagaacgaaattagctagaaaataaatatgaagtatattggattataacccaaagtataaatgtccatgagtccatactgattaaataaatggttgaataaataatggaggagtagagacaaatatctcatatgaaagaactccaggccagggatggtggctcacgcctgtaatcccagcactttgggaggctgaggcgggtggatcacgaggtcaggagatcgagaccatcctggctaacacggtggtctctattaaaaatacaaaaaataagccgggcgtggtggcgggcacctgtagtcccagctacttgggaggctgaggcaggagaatggcgtgaacccgggaggcggagctctcagtgagctaagatcgcgccactgcactccagcctgggcgacagagcgagactccgtctcaaaaaaaataaaaaataaaaataaagagcctaaggactaaggatttaattaaccaagcaccaacccgtgcagcctcaggagactggtcccgcagcgcaagtgtgtccctctaccccccgcaagccgggccgcgtcttcctggctctcctggcgccggcaccgagcagggcgtggacctgaacttatgtgaccccacccggtcacaacccggggtaggaagctaaagccgtccgcccacccgaggggcggtcccagcaccccagtgggggactgctgcgctcggcctctgtgttcgatcgggaacccaggtctcttccctgccaataacaaaaccgccgcgtcccgggcctcccttccggagccggagtcggcggccgagcgctggtggcggagcctggacagttaattccaaccgcctccgggtgattccggggacaggagcgccgagagctcctccctttggccgcggagccggctcggcgctgattggctgagggcctcggttgtggctcttgaaggctccccattggccccgcgctccagtggcaggagtgtggcggcccggcctccgcaggctacccggggttgaagctactgcgagctccggtggctgcctggggacgctcagggacgctcattcctggccagagtcctgacttctttctcggatcgagatctcgttgctggctcgaggaaatcaccggctcttctcccggatccttttcttctctcacttgctggctttcttcttcctgcctccctggcttccatctcccaaccccgcgattccctcctcta

SEQ ID NO: 17251 - DNA, 2300 bp, Homo sapien
acaaaggttatggaagttacatcttatggtcaagattaaaatgttatagactatttataaaatttttggggccaggtgtggtggctcacgcctgtaatcccagcactttgggaggccgagtcgggcatatcacgaggtcaggagttcgagaccagcctggccaacatggggaaaccctgcctctactaaaaaatacaaaaaattagccgggcatggtggcagatgcctgtaatcccagctattcgggagactgaggtagaagaatcacttgaacctaggaggcggaggttgcagtgagcagagatcgcaccactgcactccagcctaggcaacagagcaagactccgtctcaaaaaaaaaatttttttttggaaaaaatttaattggcttcatgctgtttttattggggcttattgtttggaaaattaagtctcttctgggattacaggggagtgccaccatgcctggctaattttttttttttttttgagatggagtttcactcttgttgcccaggctggagtgcaatggcacgatctcagctcactgcaacctccgcctcctgggctcaagtgattcttgtgcctcagactcctgagtagctgggattacaggcgagtgccaccatgcccggctaattttttttttttttttgagatggagtttcactcttgttgcccaggctggagtgcaatggcacgatctcagctcactgcaactgccacctcctgggttcaagtgattctctctcctcagcctccagagcagctgggattacaggtgcccgccaccatgcccagctaatttttgtattttttttttttagtagagatggggtttcaccatgttggccaggctggtctcaaacttctggcctcagatgatccaccctccttggcctcccaatctgctaggattataggcgtgagccacggctcctgggacattttttatttttattttttttgagatggagtcttgctctgttgcctaggctggagtgcagtggcaggatcttggctcattgcaacctccacctcctgggttcaagtgattctcctgcttcaccctcccgagtaggtggtagtacaggcgtgcgccaccacacccggctaatttttttgtatttttagtagagacagggtttcaccatgttggccaggctggtctcaaactcctgacctcaggtgatcctcctgcctcggcctcccaaagtgctgggattacaggcatgagccactgcgcccgacctctgcacattttttattgttttcagacagcatattgctctgttgcccaggctggagggcagtggtgcgatcacggctcactgtagtgtccaactcctgggctcaagtaatcttcccacctcagcctcctgagtagctgggaccacagatgtgtgccattatggcttttttttttcttttgagatggaatttcgctcttgttggccaagctgaagtgcaatggcgcgatctcggctcactgcaacctctgcctcctgggttcaagcaattctcctgcctcagcctcccgactagctgggattacaggcgtgtgccaccatgcttggctaattttttgtatttttaatagaaacggggtttcactatgttagtcaggctggtctcgaactcctgacctcaggtgatccgcctgcctcggcccccctaagtgctgggattacagatgtgagccacctcgcccggcctgtccacggctaattttttaaaaatcttttgtagagacagggtcacactatgttgccgaggctggtcctcccaccttgccctcccaaagtgctggagtgctgggattataaggatgagcaaccacgcctgggcccctgcaaatgttatacctccctggaggagacagaccccaagtccacacttctctcttcagtcctacctcctggccctccccttttctctctcctctaacacacacacacacacacacacacacacacacacacacacacacgccagacacaatggctgggtggggctgaggaactggcttcctccgcagagatctcaatctgggccctgagttcccaccccagaatcacaggaacacacacttggaaacctcagccctgcattcctcgctccaaggggcagacaggacaggctgaaaatagcaactggttccaaaaagataaaggtaaattcatggggacctactgcagagttagggagggaagcctgcgggagggtccctgggtgtgaaataggcgttggctcacacccggctcaggagacaggtggtggtgcaagtcggggaaagatggt

SEQ ID NO: 17252 - DNA, 2300 bp, Homo sapien
aagtgattcttgtgcctcagactcctgagtagctgggattacaggcgagtgccaccatgcccggctaattttttttttttttttgagatggagtttcactcttgttgcccaggctggagtgcaatggcacgatctcagctcactgcaactgccacctcctgggttcaagtgattctctctcctcagcctccagagcagctgggattacaggtgcccgccaccatgcccagctaatttttgtattttttttttttagtagagatggggtttcaccatgttggccaggctggtctcaaacttctggcctcagatgatccaccctccttggcctcccaatctgctaggattataggcgtgagccacggctcctgggacattttttatttttattttttttgagatggagtcttgctctgttgcctaggctggagtgcagtggcaggatcttggctcattgcaacctccacctcctgggttcaagtgattctcctgcttcaccctcccgagtaggtggtagtacaggcgtgcgccaccacacccggctaatttttttgtatttttagtagagacagggtttcaccatgttggccaggctggtctcaaactcctgacctcaggtgatcctcctgcctcggcctcccaaagtgctgggattacaggcatgagccactgcgcccgacctctgcacattttttattgttttcagacagcatattgctctgttgcccaggctggagggcagtggtgcgatcacggctcactgtagtgtccaactcctgggctcaagtaatcttcccacctcagcctcctgagtagctgggaccacagatgtgtgccattatggcttttttttttcttttgagatggaatttcgctcttgttggccaagctgaagtgcaatggcgcgatctcggctcactgcaacctctgcctcctgggttcaagcaattctcctgcctcagcctcccgactagctgggattacaggcgtgtgccaccatgcttggctaattttttgtatttttaatagaaacggggtttcactatgttagtcaggctggtctcgaactcctgacctcaggtgatccgcctgcctcggcccccctaagtgctgggattacagatgtgagccacctcgcccggcctgtccacggctaattttttaaaaatcttttgtagagacagggtcacactatgttgccgaggctggtcctcccaccttgccctcccaaagtgctggagtgctgggattataaggatgagcaaccacgcctgggcccctgcaaatgttatacctccctggaggagacagaccccaagtccacacttctctcttcagtcctacctcctggccctccccttttctctctcctctaacacacacacacacacacacacacacacacacacacacacacacgccagacacaatggctgggtggggctgaggaactggcttcctccgcagagatctcaatctgggccctgagttcccaccccagaatcacaggaacacacacttggaaacctcagccctgcattcctcgctccaaggggcagacaggacaggctgaaaatagcaactggttccaaaaagataaaggtaaattcatggggacctactgcagagttagggagggaagcctgcgggagggtccctgggtgtgaaataggcgttggctcacacccggctcaggagacaggtggtggtgcaagtcggggaaagatggtgagactcgccgtggagggacgcacgcagcatcccttagctgagacagaggcatccagacacccatgctgctcagccaggctctgtgccattgccgtcttgtcctcatccctacccctgtccacctcacccctatgagccccgatccacacagctgtgcaggtagaacctgcgcacacactttccaagcctgaatttcagcttttccccagacccctttaacctctgagaccctggatacctctgtctcctggggccctgtgtgatgtgcgcatgtggagagtggtgtggttcgtgaggggggggtgtccggttgggaggcggatctgattcctgtttcctgcccctactcactcagccctgggaggtgactgagagtggaggggattcaagggtgagtgcttggggcccgagtacctgggttcctaagggtggggtagggaaggaagtaaatgcaggtacccgagagggggtgggatccctgaggggcaggggctggggaggagttggccagtggtcaagactaccgtgtgggtcactttgctaaatgactttctgccagaacacagagg

SEQ ID NO: 17253 - DNA, 2300 bp, Homo sapien
ttataacaatctcagaaggcatgacacctctaggacccattctcatcctacatcctcctctttctggtgctgagaaaaaaaagaaaggaaaaagaaaagtcaaaagaagagggaaggaactggtggtgattgactagcagtgagtagagctgggagggaggtgaagggttggggaaagcaatgggaagctcgatgacatctttgcaagacatgtccaaagaacaatggagggaggatcttttcctggggataagctcctgctccctccccctgctccatcagtgagcatttggggttggggttagggcagaggaactaggaagagaaaaggggactgtcctagtccattttgtgttgctataacagaatacctgagggtgaataatttataaagaaaaaagggctatttggctcacaattctgatggccagaaagctcaagattgggcatctgttgaggacgtcaggctgctttcacttatggtggaggcaagggggagctggcttgtgcagagatcacaaggtaagggaggagctgaaactgtgccccaaacagttaaataaaccagtgattaacagacattttcgagtttacaggatggcagctaagaaacagcttgctgaaatgctgaaaaatccctttgcttataacaggactggctgaaatcagtgggaacccgtatggctgacagcaatccgcacagaacgagcttgctgatgtcacagcctgaatttccacctgctgtttcatactaacgccaccaaatttgcacatgcaacccacgaagaaccttggagataaccagacatgattaaggactttctagacttctcctttctttccaccaatcacccgctaatcccagaatcctccccctaaaccttttctaataaaagtactgccttaagaccagcaaagagagacagatttgagctggattcccgtatcctcgtgggtcagctcacaataaagctttccttttctcaaaacctagtgccctagtattggagtattggcttctatgcacatctggcagcgagcacttttgcttggtaacagcgccaggttctttttaacaaccagctattgcggggagctaatggagtgaggtctcagggaaggcgttaatccaatcacaaggcatctgcccccatgacccaaacaccacccactaggccctctcacctcccatcaccaccacactggggagcaaatttcagcatgaggtttggtgaagacaaattaaccatatgcagaccacaggagggcctctcacataccattgctcatatgtaaagggaggcagaagctggagggaggtgtcagatccacagttctgagctgtggcctgagaaacaggatttccggaaagagttagagctggagccacaggccaggcaaggtggctcacacctgtaatcccagtgctttgggaggccaagtggggaggatctcatgaggccaggagttttttttttttttttttgaggctgagtttcactcttgttgcccaggctggagtgcaatggtgcgatctcggctcaccgcaacctccgcctcccaggttcaagcaattctcctgcctcagcctcctgagtagctgggactacaggcatgtgctaccacgcccagctaattttgtatttttagtagagatggggtttctccatgttggtcaagatggtctcgaactcccgacctcaggtgatccacccacctcggcctcccaaagtgcagtgattacaggcgtgagccaccgtgcctggcagaggccaggagtttgagaccaggctgggtaacatatcaagaccccatctctacaaacaattgaaaaattagccaggcatgctggcacaatcctgtaatcccagctactcaggaggctgaggtgggaggatcacttgaacccaggagttcaaggttgcagtgagccaaggttgtgccactgcatcccagcctgggcaatagagggagaccctgtctctctctctaaaaaaaaaaaaaaaaaaaaaaaaaattgctgaagacttggcttccctcccccatctcactgtgccccaggaaaattccgtggcagttaggggacctggcctgctgaatgggttggggccttctcttggatcaagagtctcttatttgatcgaggtctgttattagacttcctcattctttctcagacctcaggctgcatggtggcagctgatgaaaatatccaaaagatgagaagagacaattgagtctggtgagggaaaggggagacagagggtgaagtggtgctcaagatggatgcagagtactct

SEQ ID NO: 17254 - DNA, 2300 bp, Homo sapien
gacgatgggcggccaggcagagacgctcctcacttcccagacggggtggcagccgggcagaggctacaatctcggcactttgggaggccaaggcaggcagctgggaggtggaggttgtagggagccgagatcacgccactgcactccagcctgggcaacattgagcactgagtgagcgagactccatctgcaatcccggcacctcgggaggccgaggcaggcagaccactcgcggtcaggagctggagaccagcccggccaacacggcgaaaccccatctccaccaaaaaatacaaaaaccagtcaggcatggcggcgcctgtgggcaatcccaggcactcggcaggctgaggcaggagaatcaggcagggaggttgcagtgagccgagatggcggcagtacagtccagcctcggcttggcatcagagggagaccgtggagagagagggagagggagaccgtggagacggagacggagacggagacggagagagggagagagggagagggagaccgtggagacggagatggagagaggaagagggagacaaatttttttaaaatcactagatggaccaaccaaaataggtctattagataattgtagaccctggactctactgtagaatttcatggtatagtaaggactgtacctctactaaagactgagattctacatcttttgattataaattgtttctagcctgttgccttcattcttttttttcttttttttatttttagagacagggtctcactatgttgactaggttggtcttgaactcctggcctcaagcaatcctctcaccttggcctaccaaagtgttaggattacaggcatgagccaccatgcccagttgccttcattattttatagaatgaagatgaggcttttccttcctttgcggtcccctgaagggactcaaataacaaccaacacagcactcaggttctgagagacgctggtttcagaaaggaatctggaaggtgctttttctggattccattgaataccttgtggtttcaagtctgttagaactagtaggaccggctgggtgtgctggctcacacctgtaattccaacactttgggaggccaaaacgagcagatcacttgaggctagaagttcgaggaccagcctggccagcatggcaaaacctcactttgggaggctgaggcaggtggatcactagagcccaggagttcgagaccggcctgggttttttgcaacatggcaaaaccccatctctataaaaaaatacaaaaaaagaaaaagaatgaaaatgcatatttttcacattttaaattttggatgtgtcttatcaatacattcatttaatacacactgtttttcctctcaaaagaaagttgttattaagttagtgatttacaatcagtaatgtcttagaatcaggaatattcatgattaactagcaatgctgaggaagggagtttgaagcccttttagtgaaggaccttccggacctggaagcaggccccacttaactgagactcttgctcagagcctttaaaagtttccatctttctctgcttctcaggattctgccctgcccctccgctctgcatctgacagctgggatctcgggatcctgttttcctaagcttgctggaattcctgcagtcctcatgtgaactcccctggcctcatcaccatcctgtcttacggctgttctgactaaggaatcccagtttagacaactgagtatcaagttctctccctaaggaattatctgatcacagtggcaggtagactccatttggggtatctcttttctgcaggataatctcctgacatatctttatgtacacagatataatatttccattggaaacagatcctgccacccctgttaggagtcatcaagcctgcgcccaagttcacttggactctgctttattctggaaagattaataaatgggctacagctctggcagcgtcaaaactggccagaccaacagacctcccaggaaagcaaaactcctttccctcatccatgaagctgtactcatcttgttagatgtgagacctatttcttatttcttccatttattcacctgactcgctttcagagtcctttatgctgcatgccttcattcctggtgccctctcttgtctcttccccagtcctgctgaagctgctctttagcccaggccccaagactatatggtccctgtggcagcagccaatgttgtttcaggaagcaacagcatttgaaaatatgaccaaagattggaattatttagaaggctctcaaaaggattgctacagagacacaat

SEQ ID NO: 17255 - DNA, 2300 bp, Homo sapien
gtgatgtagattcacttgtaaatgttttcgggctccctatactagaatatgagttcagtgactgtggagatttttgtttggtctgcatgctgtatttccagcacctcttttcaccctttcctcgcattcataagactaaaatttatcataatttggatgtcttttaggattggaactgttggagtaagatcgtattgtcatcttctcactaaagattttgcaggtggaattatgtgtggatgctacctttaatttctagcattaaaattctgaagttactttattatttttctgtttgggggtggggttttttttgttttggacagagttttgctcttgtcgcccagcctggaagtgcaatggtgcgatctcagctcactgcaacctctgcttcctgggttcaagcgattctcccgcagtagcctcctgagtaggcattcaccacaccctgctgttttgttacttgtttgttttttgagatggagtctcgattgatcgcccaggctggagtgcaataatagcaccatctcagctcactgcagcctccgcccccccagggttccagagattctcctgcctcagcctcccaggtagctgggattacaggcatgtgccaccatacccagctaatttttgtatttttagtagagaaggggtttcaccgtgttggccagactggtctcaaactcctgacctcaggtgatccgcctgcctctgcctcccaaagtgctgggattgggggcatgaaccaccgcacccagcctgaagttactttggaaacaaatatatttgtatatgacagcttgtaaaactgtagtgagaagagcagaatcatatatttctcagtgaaaaagaaacaaatcttataatgaagcacagaagaggctttaagaattactgataccatcttgccttttctcctttgttggtaggaaattagtaaataagccaggtttgatggctaaagagtgatttctggagttttttaaaagttaaaatcttttcttattaggcatccacctaccccaggtttgggaaatggtattgaatgttgggctttcccttgtgttttagtgattatttaaagcttgggagtgtttttttcttatttttctgcaggtggttatcactaggctaaaactggacaaagaccgcaaaaagatcctcgaacggaaagccaaatctcgccaagtaggaaaggaaaagggcaaatacaaggaagaaaccattgagaagatgcaggaataaagtaatcttatatacaagctttgattaaaacttgaaacaaagagcctgtgttttgtgtgtggtgatttaggacactccctagttttcagtggatcagtctcttacctctgatttgttggtctaaaatttttctgaaatcaggactgatgagattttttttatagtgggcagcagcatttgaggatatatcagaagctggaggggtgtcattgagaagaagaaggcctacaagaaaagctagttggaaacacttcctcttgaacctgtcttttaacttgcttactatggataggttgctatatggacaggctatattttttaccttactgcgtaaaagtttgtattgccattggataggaagtcttgctttcaataggataagaagcttctgtgactttatagcttctagatgacttcttcaagctgttcctccagattgagaggtctcgggttcaggttatctgatagacccatgggccccctttaccttgttttctgcacaagtgctggatgagtgccatcaaaccaaaacctaacacgtctttgagttaaaatataaactaaactgcagcttcgtcaggatgaagtgaaaaggtgtgaggtggcagcagtgtgtgtgctcctgccgttcctcattttaagcatctaaacaggacacctgaagcccgtttactttccaggctggagacttggcaacaacgtgggaatggggaacgggcccgagttaagtcactggcttagccaaggtcacagctggcatctgggtgaacagcgctgcacggtgtccgcggtgcctctagggggcggggcttccggctggcgctgaccggcttccggcggagcgggcgggaggtggggcggagttgctgctcgggggcctctgggtggagggggattcagacgccgcgtctggtgtgtccctttctccttcctgaccttcctcagtctgcagctcttttctccaccgcgcgcccgcctcagccgttcagccctgagctggcgggtggacgggcatggatccaggcggtgggagcagtctgcgaagtcagggt

SEQ ID NO: 17256 - DNA, 2300 bp, Homo sapien
gcggcaaggacctggttcctggaaaacacgagtcacgctgcttcacacctccaagccttccttcaagcaattcctactgccttgtggagcgaatgctaacattcttccaattccagtcaatgctgacctcacctcagaagtcttccctgaccccagagctcccttctgctcctgaatcacagagacagcaagggcagctggctcagcgagcacttttcctgtggtctcgtggctgttgattcccttgtctatcttttcttgtagacagtaaacttcctgaaggcacaaactttgacctattttgcatcgccagtgtctagtttcagggctggcccaggaaagaagcctcataaatatttgttgaaaagagtcgcagcagaggaattcttgctgaatttttcagtgatgaataaaatctagggctacttccttcacagcatatttaagaacacaactatttttaaatcatgaaaacgcatgttcgttgctgaccatcctctgggcagtcctgactatgaggttcccacaaattggggccatatacagttcccagaagaggccggggagccagcctgcacgggttctgctgtgacttatgggtcctgtataaccttgcaccaagttcctctcatttctctgtggctgagttgcccaatctgtaaaatggggacaataataccagcaacaacagagccattttgtggattaaaagaattcatgatgtaaagtgtagagaagagcgtccccacactcagaaggctcactacgtcttcggtattcttgtgaaacgcctgtcctctgtcactgtgacacccgtgtcattcattcagcagaagccgttcagcgccggtgcctgctgcactgccgctgcctcagaaaccatttgcaggggccgggcgcggtggctcacgcctgtaatcccagcactttgggaggctgaggcgggcggattgcctgaggtcgggagttcgagaccagcctggccaacatggtgaaccctcgtctctactaaaactacaaaaattagccgggcgtggtggcgggcgcctgtaatcccagctactcaggaggctgaggcaggagaacccgggaggcggaggttgcagtgagtggagatcgtgccagtgcgctccagcctgagcaacaagagcgaaactgtctcaaaaagaagaaaaagacacacacacacacacacacacacacacacacacacacacacacacacacacacacacacacacacgaagaagaagaaaagaaaccatttgcagggagcgcacggcttccgtctggtcctgaactggacgcaaacaggccgagcatttagaaacccgcgcagctccccgcaccgagaggcttcctctcgcctggctccttcgaagcgtggtctggaccagcacctcccacagcactgggggcgccttggaaacgcggccttggacctatttccgcgggggcaggcggcgatcggtggccctggtcctcgcaaggcccctcaccacccagaactgaatctctggcgggccctgctgtgcggtcagcagacgcccaggtgcaggggcggtggccggcgtcgcggtggagctcgttaaagtaccggcacgctggccgcgcccacgccacgggcgggaggggacggtgagtgcagggacccaggcgaccggccggccggcgtccccgcgcctcctggcggccagaagcagggcctgcgcttccccggctaaggggtgccggcccccgccccggcacctgggagtgaaggtaccagcgggtctcctgggcggtctcctggggccgctcgttccttcatcacccccaggggcagttggaccctgagcagccttagccaatagccccgggactacccttcccagaggattcagcggcagcacccgggtctcggaagggagacactaggacctggaggaggggagttttgcaatccctcgcagttcccctcctagccactaggtgacactagccataaatttatttcccagtttactcccctcgctcaaactccgcgcccctctcgctccgagagacataggtctcgcgagatctttggtaaacttacagaaccggaagcagcgtgtagttctcttcccttttgcggccatcaccgaagcgggagcgggtaaggattcggcgggcaagcgggtgtaatcagcagccatccgttcttgggcatggtggcttccgaccgcggggaccccgagagtctcttgtcggccgagtagcagccaggaaggagagactgggatggttttttatctgttgctttcttaaatcaagggccg

SEQ ID NO: 17257 - DNA, 2300 bp, Homo sapien
ctacctcagcttcccagagtgctgggattacaggtatgggccaccatgcttggccctgtgcaaaaaaaaaattggaaatccatgcatagttttttcataatatgcatattattcataatattattcataataggcatatgtaatatgttacctttcccacaaaccccattaatcccttctctgatctttattgatttgggtacctcttacaatccatcttgcattgttcctgtttatgtccatcgccctcaaaaatataaactgggcctcctaggctcactttgttttcaccttgaggcatgtcttacacattatttttgtgttcacacccacaaatccaatcctaaaagcactgaaattggaaaggattacattgcgtgccgcatggaggctggtgcctgtaatcccaggactttgtggggggctgaggtgggaagattgcctgaagtcaggagttcttttttgttttgttttgtttgtttttagacggagtctcactctgtcgcccaggttagagtgcagtggtgctcactgcaacctccgcctcccgggttcgagcgattctcctgcctcagcctccggagtagctaggattacaggtgcccaccatcatgcctggctaatttttgtacttttagtagagacagggtttcaccatgttggccaggctggtctcgaagtcctggcctcaggtgatttgcccgcctcggcttcccaaagtgctgcagcgcctggccgaagtcaggagttcttgaccagcctgggcaacacagtagaccccatctcctaaaggaaaggattaccttgtacattatacagcaaaagttcttaaaattgtttttaaaatgtatctcttcctttaagtttccactccctatgtaagttgcctatccctctttccctcctttttgggctagtatcgtctccagcttgcttccaagtccgctagggaatacacacgcgcgcacacacacatacacgtgtgtgtttacgtactaaaaatatataaacattaataatgcaagatggggccgggcgctgtgtctcacgcctgtaatcccagcactttgggaggccgaggcgggcggatcacgaggtcaggagttcgagaccagcctggccaacatggtgaaaccccgtctctactaaaaatacaaaaattagtcgggcgtggtggcaggcgcctgtaatcccagctactagggaggctgaggcaggagaattgcttaaacctgggaggcggaggttgcagtgagccgagatcgcgccactgcactccagcctgggcaacaagagcgaaactccgtctcaaaaacaaacaaacaaacaaacaaacaaaaaccaagatggattgtaagaggtatatatatacacataggactccatttcttgggggacctggaggggagaaagtcacacccatacacacacgtacacgcatgtatacaaaaatgaatatatgctcagatatatacaatatataaatgggcaaatataaaatcccctttgtgccaacgaatccattcattcattcatcaaatatttgagcgtccactttgcctagaaccaagttatctgttgggatgagcaaggcataagaggttctagctctcatagaacttagaattctactggaggaagatgagaacaaatacaaaatgtaaacagtggaagttctgtaaaaacaacacagagctttgtgagagtgatgcttagaatgctcctgatgttccattgggtgttcgagcagggggaatggactcggaggtgaactatgagccgagattcattttataaacgggaacacagacacatggacacttgaagggccttggtggccagaaaactgaaggcaggttcccatccgtcttggcaccactctcccgaatagcagtttcagggaactgcacaagccaaaaccagccggtcgcagagtccaggagcgcctgcgcaagaggacgcctgcgcaagaggacgccgtcagcttggcgtcagcgcgccgggctctggcccgccccctgtgacaccagccccgccccaccccgccccgcatacccgtgcgctgccgcgcatgctccgagccccgcccccgtgcgtcacagaatggcctcggacacccaggcagtccctgacgtgtcggggaggagccgggcgcggaggtacgctgagtggagctcggggctgcgtaggggagctgagccgagcggctgggcgggcctggccgggccggcggaggggagacgtcggttgagcggcggcgaacatgcgcttttgacacattggaggtgagcctgcagcgc

SEQ ID NO: 17258 - DNA, 2300 bp, Homo sapien
gcatccttaatgcaaaaaatttcagttagtatggaagtatatgaactaaaaagtcatggtttcctgccttcacactgtttctgcattccttacagttattccaaggcatgccaaatcatatttttatgcatctgctctaagttgtttgtaacacagttacgggattatactttaaatattgctttgcagtgtgcctatcatgacttctattgccattatctttccatgtcatgtatattattctacctcaatttacttatttatttttaaatactacatggtaatacgtggttgtatgagtatgccttaatataggtcactattaggacccgtggcctgggatgctcacggtgttgcctaaggtagttgttattgaaacagccaacaggcacccgtgatccttggctactgtctctgctttgagtcaaagaggtaattcttgcttgtttttctctgaaagcagagcaggtacaactctagaaacgctcacaatctctgaaagcagctgggattttctgccgtcctcaataattatggcacatgtgtaaaggagcagattcgacacacggtgcactctgaataggctcttatccttgcagtggagtgttttggttgatctctgtccctgattttaccctggagaatatacatttcattaaggattttgtattaaaagcacatcctaaaacatcactatacaaattagaactttattctttcttaaaaaatttgtttaaataatttttgttttcttttgaagagatgggggtctcactctgttgcctaggctgatctcaaactcctgggctcaagtgatcctcctgcctcagcctcccaaagtgctgggcttgccgccgcgcccagctgaaatcagaactttattctaaccattgggtttcctcgggtggagtaaacataaaattgattttcctcaggcttaggagtttcaggcagacttgcggcagcccttgtttttatagtggaatgataaatggaatgactggatggttttacatgagcgtagccatttcccctgaatgatatggagaacttttagggtagtcttcataaatgttggaagcagtgcctaattatttttccctacaacttataatgatcctctactagagtagttattagtttctccttggaatcgtatttcttgatgggccgcaggtgcctttcatgagagcaggtgtgaatcataaatggataggtcggacaggtgcctgtgcgtgtggaagccctgaagaacagtcacgaggagggaaggataacactgtctgttcagggtcgctactcctgcccgccacttgcctcccaagacagagcaccagggcagggattgccaagaggtgagcctgttctgagggagatgtggggaccttagggtgagctgaagccaggaacaggccttgggcacactgactgcacctctgccccttgagagcatccgagatgtaagtgtaggctttacttcctgagctgaacccggaaatgtgctgtgcttcccaatcggaacagttgcagatactgagttttggttttaaatggtagacattttacattgtgccttttctattaagaaatatgcttttgtgggctggctgttgtgtgagtgtttagcttatatgataagtggattgtgtatgcgcactgaaatattaacctactgttgctggagttgtctttctagttgctgtattcctgaggataactcttttgtgggttttgctgtgttttcactttcttgccgctttgcttcgattccggcttttggcctgtctggctttttacctctggcttttcttctgccaacctgttgaccagataaaaaccaagatgttgtgtagcagccgcaaaaggaagggcaggatattccacttcccaggtccattatacactctggcaggttaaaaacacaaaagcctgtctgtgtagaagtggagaagtatggcttgtagtttcagcatgagaaaagtgccccatttgaaaaagccctccactgcagaacctgcctgccctccctctcactcctgaggagtctgtagcaccgtggtgatggctcactagtgctgccagaaacctgcggcaggattgtttgggggagagacatcatcaaagtaggtttgtgtgtgtgtgcatgtgtgcgggtgtacatgtgttcaccttcccacccgctgaaacttcagatgcagtgaagccttctcacataaaacaatataccttaactgggcgtattgctctgtgggattcaaaagtattttgtaaattctggtcacttgagggcttcttggaat

SEQ ID NO: 17259 - DNA, 2300 bp, Homo sapien
tgcggcctggtgagtgagactagaggaggccgaagccatggcccagaaattctgctccacacaaccaatgcctctgaagactttgcagtctgaaagtaacaggaaaaacatgtttgtgcttacattttagaagtcaatctggcaggaaatacaaaggacgataactgagggatgcctaagacgggagaggtgatcctagttcgaagggctgagggcctgaactaagacggggcagggggtggagaggaagggattccaggcgtgactgaggagaggcggggtgtggtgggggacgcaggaggggaggcctcggggatgcctggaggctccagcctgggcccctgggtggatggcgccgccattcgtttttcagagatgagtctgaagcagtgttggtgtgaagagcttttacaaagttatcgtgtgtgtttttaaatcatctgtgtttgttaatgtcactgggcgttctcatgcattgaggctgtctcttttgtacgacatgaattctttaatacaggtgtatttgttttggtgataaatgtaatggaagtgttgccctttaaaaaaaaaacacaggagcttcttcaggaggagacacgccagaaactaaacctgagcagtcggatccggcagctggaagaggagaagaacagtcttcaggagcagcaggaggaggaggaggaggccaggaagaacctggagaagcaagtgctggccctgcagtcccaggtgtgcgtcctctttaggaggccgcggtggcctcgatgtgtgccttcagcagatcctggccctgctgtgctgggctgtctcagctccatttgggacagttaattaggtcgtactaaattaagcccattaaatggtttttcttgacccagccacatgctggttataatgctggaagcccttaaaataaggacctaggactgtgtcaacgatgtaagatttcaatccagtcatcattttatggactattagctaagaaattaagtgacagtctaagactcatttgttttaaaatcacagtattgatttttcttctctcaaaatattaaaaacaaaaggttttttttttcttcaaaggcaaaaaccaattgagttcttttttttttttccttgagatagagtctcactttgtcgcccaggctggagtgcagtggcgtgatctcagctcactgcagcctccacctcctgggctcaagtgatcctcccacctgagcctccccagtagccgagactacagacaggcgatttttgtatttttagtagagatgaggtttcactatgttggcctggctggtctcaaactcctgacctcaagtgatcctgccgcctcggcctcccaaagtgctgggattacaggcgtgagccaccatgcctggccccaattgagtacattaatactgagctttctgtttgtccgtacacaaaacctagttggctgataccaagaagaaagtagatgacgacctgggaacaattgaaagtctggaagaagccaagaagaagcttctgaaggacgcggaggccctgagccagcgcctggaggagaaggcactggcgtatgacaaactggagaagaccaagaaccgcctgcagcaggagctggacgacctcacggtggacctggaccaccagcgccaggtcgcctccaacttggagaagaagcagaagaagtttgaccaggtgggtcggccacgtgtcgtttcctcctggcagagctcttgcttttgttcgtttggtttaaaataatcttatttaaaggcatttaaatgtgatacatgtttatatcaaaattggaaaaagggaaagcaaaaaaaaaaaaaaaaaggaaatacaagaacaccataatctagtggcagcactctagcgataaatcagccacatggtggaagagaaaagttgatgtcactgtttcggtttttcgtattcccccatccccttctgcacagctgttagcagaagagaagagcatctctgctcgctatgccgaagagcgggaccgggccgaagccgaggccagagagaaagaaaccaaagccctgtcactggcccgggccctcgaggaagccctggaggccaaggaggagtttgagaggcagaacaagcagctccgagcagacatggaagacctcatgagctccaaagatgatgtgggaaaaaacgtaagtcgcctggtgggctccacacttccgcacgggagagtatcccaggggcctgggccttcacacaggagcgggcgactcctcaggggagcctgaaggacctgggaatgcacagcccagcagcaaagccatcta

SEQ ID NO: 17260 - DNA, 2300 bp, Homo sapien
gagggtggagaaaaggcctggccctctctgcccactcttctgtctcctctctcccagtactcgaggatggcagttttcttggttcagaacaggggttcccatggaaaagggaatggggtgacaggcagctacgattgctgccccagcacctgctgagccactttgcaaacctgggtacagtgatgtgtttgacatgagaggattccagctcccttcggctctcacagtgtggtctcacctcccatgaaaggacattcttaggacactcaacttcttccttaaaattccctccccacactaatttatctcccctccagatctcggtgggtttgaaatgactgagcagttgacatcagcgcatgaccatgtcatcagggcagtgacatgcttttgaataaaatggcttattttcaacttggatcagtctgtattttagtttattcctgtggtgagtcactcggtgtgttgaagagcttcttatgtcttaccttaaagaacgcttaaagaaggaagaaaagactcgtcaggaactggaaaaggccaaaagaaaactcgacggggagacgaccgacctgcaggaccagatcgcagagctgcaggcgcagattgatgagctcaagctgcagctggccaagaaggaggaggagctgcagggcgcactggccaggtctgcagcccagcagctgcgctgcacgggagcccatggggctgagtttcagcagactttgttatgttcgggagcattcaaaaaccctgggagagtgagatggggtttgcttgctgtttggtgtgacctgagaaagtgaaaagcccaggcgtacagaatttgtgtcaggacagcaagaaagtctcataaaccatctcaatatttatactttaaaatgacaaattatattatgaaacccttggaaattcacaccagaacaaattatttcactataacaaatgttttggtctctgtacattacagattaactgtagtatgttttatttattttttttttttgaatggagtctcactctgtcacccaggctggagtgcagtggtgcaatctcagctcactgcaaactccacttcctgggttcaagcaattctcgtgcctcagcctcccgactagctgggattacacgtgtgcaccaccacactggctaatttttgtatttttagtagagatggggttccaccatgttggtcaggctggtcccaaactcctgaccccaagtgatccacctgacttggcctcccaaagtgctgggattacaggcgtgagccacctcacccagcctgtagtatgttttagaacttgaagggaaatcacttttcaaaaattatatttctccactgagagcatgattcaataatcagttctaaaccattcagtttagaatgcaaatcagatgtaataaatatatgtctaatgtttcatttctttataaagaataactatttggctacatggttgtaatacttggagtttataatgtgttacaatcaaaatctttcaagaaaaatctcccttacctcaaacatcccaactattcccaatcagaaaaatcttccaacattttaaaccacagacataaacaaaaagatgccctatggaagagaggcacctggagggtatgaggatgagagcctctttcttctactgtgttctttgagcatccctggtttggctgggttccggtgtgatgaggaggtcactccttcatagttagaagcagatttttaactataacagcctttgacttcagagaaaatgttttcatattctaagggctaaagtaagagtgtcctaccttttaatggagaagcatggtcgtttggaaagggggctggggctggaatctagttctggctctgccaccattagctttggggccttcagcaaggcctctacctgagaacctcctcctgccctagcaggtgctgagcatctgcaccagcctcaggccccaggaggagggatgtggggctggggtctcgtggagaggtgctcaggggctggggctcgcctgagaaacaggccatccgggtgccatctctgagtgcctcttgcgcctgggtgttttaacagaggtgatgatgaaacactccataagaacaatgcccttaaagttgtgcgagagctacaagcccaaattgctgaacttcaggaagactttgaatccgagaaggcttcacggaacaaggccgaaaagcagaaaagggacttgagtgaggaactggaagctctgaaaacagagctggaggacacgctggacaccacggcagcccagcaggaactacggtgagtgtg

SEQ ID NO: 17261 - DNA, 2300 bp, Homo sapien
agaagagaaatcatcaagaaacatgggactgaagtagtgagggggaagtagggtacaggagaaggtggagctcctaaaaaagccaggagtggagagtttttacaatggtgctgtgacatcaccaggtaaacgtaccagggtcaagaaaaacaagcactgggtggtgtctattcatttagcaattgaccagtcattgcctgagtagtgttgggcaggagaggaagaggacgggccataagccagttggctacacactgggaagttagtgggagaggatatggtgtagcaacggtgtgaactactcaagaaagaagcgtggctctgacaagagaagtgggcagatacagggtcaagggaagatcagtattttatggggcctgcagaagtgggtttgtgccgctttctgctggggcaagtgaagagggagaggttgaaggcacaggaaagaatggtggtctctgaggtagacagtctccaatgcacaagcaaaagaggtagctctgacccacacccttgaatctggtagctttgcttggaagcagttgtagtgtagtgtgcctgcatgggcctggaaattaaacagcttttacccgcccttctcccagcttccactgaagacctgcataacttgagcagttcacttttacctcccggggtcttggttctcttgtgttaaaaacctcattggaaattgataattgaatgagatcttgcacataaagctcttcatacagtgtcaggtccccatatgcttctgtcaaaggaaacaaatgaaagaaatgaggtgtccattagggttgaggagggcattaaaaagggcagttcagttgataattctgattgattttaaagtatttgagtaatgtgtttcattcatttaacttcttttcaataagaggatatgtacattatgcaccaaatgttttgcttgtggctggtgtactgtttatggtctcatcattagaagtactaggtctttgtggataatgtaaaactatcggttgctgtaacaagggaatgtctgacaagtttagccattgaacacctaggaagcttagtcatttatcttttcagaagagtccttcctattttgtgttcttgccctttagtaagtgttattcatgttttgagaagagaactgaagcttacacattgctaaaaatctgaactcctgtaatctaatcttcctgcatttgttcctaaaacttgaatgacttttctcactgaatatctaatgactaataagagagaattctggtccctagtccctgaggttatttgttaagtggatttgtacaatcagatattcttatatatatttttatgagccatttcctatttggaggcctttcacagtatcagtttgtatgtatcaataatgccagccaatgagttttcattttccaaataattgtaaatgtaacagtcagaatgttatccaagacagtgaattcctgaaactagcgcagcggaaggcatctgctggtgtgtgttggtgtggagctgtcaaagcactacagtatcctgccatataagtgtgtggctgttagttcccggcttgtgcagtgcctaagtatgctgactgccttacctatatggcatctcctgtcatttgttccacaaagcttgtgctgctgcactttcactgtgtcttttctttccctgctaacgagtgaggtttggcttatatttgttttctcctttcttctccccagtggaccgtatcgtgggtctggatcaagtcactggtatgactgagacagcttttggctccgcatataaaaccaagaagggcatgtttcgtaccgttgggcaactctacaaagaatctctcaccaagctgatggcaactctccgaaacaccaaccctaactttgttcgttgtatcattccaaatcacgagaagagggtacgtgctgagcaaaacatatgctagtatttaaaactgatctaggtcagatgctaaagattaaaccatgaaactattgtttgcttgattaggctggaaaattggatccacacctagtcctagatcagcttcgctgtaacggtgtcctggaagggatccgaatctgtcgccagggcttccctaaccgaatagttttccaggaattcagacagaggtattgctaacttttactttttttgcttatgtatcagagtttatcttgatatgaattaaaacagtgataaaataaggaaatctttttccttgtcccctacatagtttgttttcttatatagcaaacatatagtgaggttctggaaaagggacaatccttactaccttgattattggt

SEQ ID NO: 17262 - DNA, 2300 bp, Homo sapien
cgtcttaggggagcttcagtgtttgagcagaggccgtaattcaggtctcgctgtgtgtgtagcagcttgtctgaatttcaagcctagtagtgagtagaaatgaaaacttttgaaatgtgccagccttgcttgtaaatatgaatcatttaaaatggtggcatttgtcctcattcacaacaaaattcatagtatttactcattttgacaacaaattacgtctgcctatgtgtcaacactggaaaaagttacaaggattaaaaagaaacaaaacacaggctgggcaggtggatcacttgaggtcaggggtttgagaccagcctagccaacatggctagaccctgtctctactaaaaatacaaaaacttagccaggcgtggtggcgtgtgcctatggtcctagctacttgggaagctgaggcaggagaattgtttgaacccaggaggcagaggttgtaatgagccgagatcatgccactgtgctccagcctgggcaacagagcaagactttgtctcaaaaaaaaaaaaaaaaagaaagaaagaaagaaacaaaacacaaataaataaatatatgaggctatagcccctgccatcaggaacccagcctatgaggcacaacactggcaccaggaagtgaatcgtcactagcctgctctgagagggggatctgagaaagctttcagtggctttgaagatgagtatcaataccagcaggcatctcagagttctttcagctgcttcagattaaatcatattaatttaattgttttagggattctctgtttgcagtgccagatatgtttatggtactgaggagttttcttcatgaatgttctaataaatttcacttctctggtagaacccccccacccccaagggaaaaaagagtgtcgtgaacattttcctgtgtcctcttactggcatctatcaagaaatatttgggttggctgggcacagtggctcaggcccgtaatcccagtgctttaaaaggccaaggtgagcagatcacttgaggccaggagttcgagaccagcctggccaacatggtgaaaccccatctctactaaaaatataagaattagccgggcatggtggtgtgtgcatgtaatcccagctacttaggaggctgaggcacaaaaattccttgaagccgggagacagacgttgcagtgagccaagatcgcgccactgcactccagcccgggcagcagagtgagactctgtctcaaagaaaaaaaagaattatttgggtttattatttaatacctcttacaaggatgattttcttttctaactactgctgatagttattttttctatttattctttttatttttattaattattgttccaatacaatttaattttatcagttgtaattttggaatgcatgtgctgtgctttcgttaaagcagcctatattaactctttctttcaggggtgagtcaggtgctgggaagacagaaaatacaaagaaagttattcagtaccttgcccatgttgcttcttcacataaaggaagaaaggaccataatattcctgtaagtttctgctctgttgttttttaaatcttcttcttcttttataatttcagaaacaaaaataaggaagccagtctactctccacactgctataactgacagctcccttgtctccacctgctccccgccacctacccagcaatgcttttttccaccccagaggctaggatacaaggaaattgctgttaaagaggttttctgacagggcaaactggaattatggttgtggcttgatgcctaatttcttgcaaagatttgctgagaattgttcagcagttctttctgaacttgcagtagcctcttgctactacccacagcagcttgaggggagggtagagatatgggaagaagtgatgacagaaaaagggcaagaatagaaatgtcagttctccttaatttttagacatgcagaagtggtagttaatacagcctgagagaacgccagccaacccagcttccacagttctcaactgcacattggcttggtgctttggaaatggcttactgctaggcaaagactcaaacttgctaacatttgcatttgtctgtttgtaatgaacagcaggaatcgcctaaaccagtgaaacaccaggcaagtgctcttctttatgcttcttagtcttgagtgtttgcactaatttctgtctgtagattgagtctctgctagaatcaaatgccactagttctaagtgaaatctgtcattaaaaaattttaattttgaaaatttattgcttagagccttattctttcttgagaagcgc

SEQ ID NO: 17263 - DNA, 2300 bp, Homo sapien
gaggctgaggcaggagaatcacttgaacccgggaggcgaagattgcagtgagctgagaacatgccagttcactccagcctggtaacagagcgagactccatctcaaagaaacaaacaaaacaaaacaaaaaaatatatatacacacacatatatatacatatatacatatatatacacatatatatgcaaaagtttttgaattatgagaaactactgactctgtggcttacagtgttattcgcgagtggatgcactaagcatagaacattgcactgagaaatgacttcggtggctgacaaagtggagactcaggcctcagagagggagtctttggtcttctctaaacacattttaaaattcattagaggaatatcattcatatattttggaaagttaatttgtactccatgtgcagactgcattagaaggacagacctcttcacagagccaagtcacaagacacctggacacggggtagtaccccagcaggcaggtgggggtgggggaccagatgcagcaggacaaaggacaaaacagagcctggttcggacttccccaggaaggactctgcactcagctgccttccagcctcttctgaattccaccaacccttccttaggacttcctgccttgttttttgcttaattcactttttgccagactagacgtttcctaggcttaggcaaacacatcattatcacatgtattaaaatgctcccatagcctacattaataactgattaataactgcatcttgctgtgaatttttatgatcttgactttcaggttttgtatgaataattcattttgttcatgtgatttagactttattatatttatatataattatgcaagagttttgttgcagttgcctagattctgcagacatttcattaaattttatttactttgatttttccagtttcctttcgttattttggggccactgtttttcagtctccaacgttttcataagccctaggggatatgacagcgctacaggaatccagccttatattcttaagaacctctcatagcccttcacgtagggagctctgatgaatgaatgaaggagcgactgaacgagtgaatgaatgaggtgaataaagtttcttccaagttttctctccaaggtcggttctcttctcattcttctggaatctcagccttgcctggaggctgggcaggagagcctctcaccccgctaacaccaaaactgcgaccttggaggaccgtgtcctgcgcctggcgctcggccgatcccggcagagtccgcctggggccggggtcgggacagtggccgcagcgtggagcgcagccgggtcccgggccaaaccctgtgcgcatgggcggagcagcgccctcccccgcgttccttcccccactgcaggtgagtcgcagcgccgcggccccaaccccgcgcagccccgggggtgacgtcaggactctggaccgcgctccgccccgcccctgcaggcaacgctgagggcccgcgactccgcggtggaaccccgtcccgctgcggtacatgccggctgccgcaagcacagggggcgaccgggcgctcgaatgtgctgcggctgcggcggctgcctgacgctaggacgaggagtctgcagtcagagcgccagcctcctgccgcggcccacctgccccgcggcccgcacagccaatgtcagcgcagcgcgccggccgccgcggggcccgcacccgcagcctcgcgggatcgccgggcgttcagccagcctcagctgtccatctacgcacgagccagccaatcccgcgccactgccccggccgcacctcccggagcctatgacgggcgtaagagccagcccatgagattggggcctctgtggcctgggctgggagcgggagccaatgagcgtcattccaggtgggtggagggagccggactcgggaaggtagcttcgttcgggttgctaacgtcttcccttggagatgggcgcgcaaaccaaccagtgggtctgggggcggcggtgatgggcgtggagctggcccaatgagggtaggggtgggtggggcagccccgagcagcagtgctaaaggagcccggcggaggcagcggtgggtttgggactgaggcgctggatctgtggtcgcggctggggacgtgcgcccgcgccaccatcttcggctgaaggtgagaggtgcggctacccgggtccgagtgcacggcccagggctgggggacagtttgtggagggaggaatggctcctgggctgaggggtcccgggcggctctggaggacaggaacgggggaccgaagcgggagct

SEQ ID NO: 17264 - DNA, 2300 bp, Homo sapien
tcatttagacattttgtaagtctattcagttattttatatcctcaggagaggggaggggagggaagggaagggaagggaagggaagggaagggaagggaagggaaaagatggggataggacagacctctgtaaatccgagacagccctgcgtcttgctcagggtccctgggagggcagtgagactccagagagggatggtggtgtgcaaggatcacgaaaactcccatgataggtaccaaaccaagcagcagaaagagcttccagatacgaggagacccttgggcaggagcagaggatgtcttacacctacctctatggaccaacctggccctggaccacctgatttcacggacaatcaaggatatgtctcatatacgtggcggggagggtgattccagaaacagatggcttcctcctcaagggctggcgttgcacagctcctaggcacgaccttaaagaaagggaggggaagcccagattgactgtgccagcctctgtggataaacaaggaaacatgcccctccgaggagcttgaatcgttcttggcggtcttattgtcgccctgctgggcgtgttcctccggggctccggtggagaaccacctcttgtttagggttggggtggccattgtgtgggtgtgttctgcgtggggtagggactgtcttgctttctctgctgagcccaccggactaggtggaagcgacaggtgtgtgtgatggtccgctctggaggggaggctccggcggagcgtgggaggggagcagggctggggtgggccgggatggagggcgcggcagacggccagcagggggcgccagacgaccggcaatgcggcggggcggactggccgcgctcgggacacgcccccgcccgagacccctagcccaccacaacccacgcaccccaccccgctccccctcccagacagagagaagcggaacgggcggtgtggcgggcgtggcggcagtagcgggcgtgggagggagggaggcagagagaagagggagcctgcgcctggcgggagcgagctcaaggtcccggccagagtccagccggagaccccagggcgccctccgcacacccgccgtcccacgcgaagacgtccgacctccagccagatgagttaatgcacgcagcctgacgggatcaaggaaggcggccaccacggagtcaacattttaaatagggtcatttccgttaccgtgttttgacatttcttcccgttttaagtttatgcaaacaaaaacgcgcagggccgggcgcggtggctcatgcctgtaatcccggcactttgggaggcggaggcgggtggatcacctgaggtcaggagttcgagaccagcctagccaacatggagaaaccccatctctaccaaaagtacaaaaattagccgggtgttgtggcaggcgcttgtagtcccagctactcgagaggctgaggcaagagaatcgcttgaacccgggaggcagaggttgcagtgagctgagatcccgccattgcactccagcctgggcgacagagcgagactccgtctcaaaaaaaaaccaaaaccaaaaccaaaaccaaaacaaaacaaaaaactggcgcaggccccgagtctcttcttctgaggggcctggcctgggccctcctcctgtgcctgtccccgcgcaccccccgcccgtccccccttccccacccggccccaccgcgtgctgggcccgccgcctggtttctaacctcgcgcctcctcgcgactccacccctgccgccgctaagcacctcctttctttctctgctcttcttcaccaaggcccggcccctccctcaccctcacccacacctgaaccccagggaggccctaagagcagggcgcccgcacaaggccgctcctccacccgatgccccttctcagccacactcaccagaaactgcctctggccctgggctccatggcaaccagcatctaaccaggcctaatgccttcccagaagttcctgagggcaaagggcaggagcagagagcaggaccccagcaaggggaggaccaatgggggcagggggcagggggcagagggcagcgcctggactccacgtgccggccacagaaccaggcagcctgttgctaggtaaccacatctcccataactgccccagcacatcgtcctgagccgcccaacctgtctccagccaccttctgtggagtctcaaactccatcatctgtgggaccctgtaggccgaagggagaaacaagagtgcagccaccacccctgagccacctgtggctctgctacccacaatttcactgtgaagagtcagc

SEQ ID NO: 17265 - DNA, 2300 bp, Homo sapien
ctgcccccaccctgactgatggttttacttgcctgaagcaatccaggtgtttagcccaagttcctgggcaacatgggcagccagaggctgggcggggcccttggtctagctccaggtgcaccctgcaggccccaggacatgcccctcgcacacctgcacatgtccaggcacattggagtctgacatctgcctcccagtggagatgaacccaggacaggtcaggactgagaagtggatggatgcgctatcctccactgaggctgcccacagaagaacccagggaggggcaggagtagggcaatcattagtgtgactgaggtggttttaaacctgaaatgattgcagtagcactgaatttgagtgagtttacctggaggagactagattttatttttcctgccattggtatgatataaacggattcataccaatttcatcaccaatcattaggttttcagtagatgtctgcagagtttaccagttttttaggttaagtgaggcccctgggcctgctccccaacatactctctaccagctgacaatgcaggcaagtcataggccgaattcccttacacatagacatgtgttggcaagcagttccactccacccccagccaaattaggtgctctgagcaaaccttgtatgaaaagtttactgaatcaggagctgcacactggaccattttgaagcaaagcctatagcatccttccaaagggtttggactactggcatctctagattttttttttttttttttgagacggagtcccactctgttgcccaggatggagtgcagtggcgtgatctcggctcactgcaagctccacctcccgggttcatgccattctcctgcctcagcctcccaaggagctgggactacaggcacacaccaccacaaccaactaatttttttgtatttttagtagagacagggtttcaccgtgtaagccagcatggtctcgatctcctaacctcgtgatccacctgcctcggcctcccaaagtgctgggattacaggcatgagccaccgcaccaggccatctctagattattatagcctgttccagcaagagaggaaatgccttcaaaaaaattatctccaatccaggtggcttggacaccactaatttcaccagtgaaaaactatttctaatatctattatgtccattagtgaagacacttctgttgatttaagattgtcgacgtgcttgtactagctgtctctgtctttttgatgaaatgctagctaaccacctcaagtgtgtgtactctcaaacagggcaccagaccacccttaggtgtaggttaaaactgtgcagcacatacatatggctctggggactgccatgtgctggcgatcggctgcaaggagttcccctggacgactgccatcagctgtcagccctccttagggactgtcccagctggagacaaccatgtcacccaaggtcatgccatttccgagggcagtatgcatccaatgaaacaattctaggccccggggacaaaaatacctgccttcctggagcttggattctggtggagacagacaataaacaaagtcaacacatgaaatataagcccgtagtgccttggtcagtgataagttctagagagaacgatcaagtagggcaggggagtgggagtcttgggggcggggtgggtacaggggtatgggatttgcgatgtcagagtggaccgtgttgatctctgtctgtggttggtcactgatcagggtgcattccagtacagacctgaagaagatgagggagacagcctggtggataccattcattccattctggctcccccccacgccgactctgacggttttacttgcctgaagcagtccaggcgtttagctcaggctcctgggccacattggcagccagaggccaggcggggcccgaggcctagctcagagcgcaccctacaggcccccggacgcgcccctagcgcacctgcgcacgtccgggcaggtggcccgcggaggcggtgggacgtggcaggtgcggctcgcaggtgcgctggccccgcccccaccttcgcccccgccccgcctctccctccgggcggggcccctttcggtccaacggcaggacctgggggctgtggccgggggcggccgttgacctggtgaccgcggcgccgccccagaccgggggcgcagtcccactcgctccgagccccggtcccccaagcctccctcccgggtacctggggccgcgcccgccctgcgcccagctccgccctccgtcggcccaggcctgacagagcccggcagccatgagtgccaac

SEQ ID NO: 17266 - DNA, 2300 bp, Homo sapien
ggtagtgggagaggagcgaggtacattctcacagctaccacacttcccaaatgtcagttgcttattcttgtaccactttcatggttttttttttttcccatgtcaacgtaccactgttaaagaaagaaattattctggaacttattaaatggtaaggaagacttatccaagactattgcattaggaaagagaaagcagtctcaacttggaataaagaaaagccagttggggatttatagccaatgagcagagtgaaggggtcagcggatggaaaattcctaagaggagacatcaagggtcgggacattcttgctaaactgagctaacaggatttttgctagaggcacaagtcaaattcttatacatcgacggtaagggatgaaggggttcaggagatatcaagagtggaggactccaacctaaactgatttggcaggattcttgctaaaactgggatgggcaggccaaaggcaggacaggagccagggctgagccctagtgaagaagagggctaagaggaggctgagtaaggtttggtcaaggagagagtctttgttaccacctgtcctggtatgtatctgatacgattctttaaattgactttagattttagctttatacttggggcggggggtggagactaccagaaaagacagggtgctgtaggcttcaaaaaaataaataaataaaataaataagttttagcttcatgcatggattcaggaactactaaaaataatggcaaaggcttggcgtggtggctcatgcctgtcatcccagcactttggaaggccgaggcgggcagatcacgaggtcaggagattgagaccatcctagctaacacggtgaaatcccgtctctgctaaaaatacaaaaaattagccaggcgtggtggcaggcgcctgtagtcccagctactcgggaggctgaggcaggagaatggcgtgaacccaggaggcggagattgcagtgagccaagattgcgccactgcactccagcctggatgacagagttagactccgtctcacacacacacacacacacaaaaataataataataatggcaaaaactgcaattacttttgcacaaacctaatagttttttatatatatattttatatatatatatttcatatatatttggaggatatatatatttcatatatatttggaggatatacatttcatatacatatttggaggatatatacttcatatacgtatttggagactgtatatatacttgatatacatatttggaggccatatatatatttcatatatatttggaggctatatatatttcatatatatatttggaggctatatatatttcatatatatatatttggaggctatatatatttcatatacatatttggaggctatatatatttcatatacatatttggaggctatatatatttcatatacatatttggaggctatatatatttcatatacatatttggaggctatatatatttcatatacatatttgtaggctgtatatatttcatatacatatttgtaggctgtatatatttcatatatatatttgtaggctgtatatatttcatatatatatttggaggctatatatatttcatatatatatttggaggctatatttcatatatatatttggaggctatatatatttcatatatatttggaggctatatatttcatatacatatttggaggatatatatatttcatatatatgtttggaggatatatacatttcacatatatatgaaaatacatacatgtattttctaacatgcattaaaataaatgcataactattcagattttaaggtcgtttgtgtaccacctaaaattgtcctacataccaccagtggtacacatactgcactttgggaaatgcaggttttacaaagaacacagaaacgtggaagggaaggctatattccagccctggctggcatgctggctgccagctctaagtcgattacttcgggcacctcctgaggctcagagaaatggctaaagacactctcggaaggaatggaggtgggacgagggtgaggttcagtggactgagtttcctcccacccctaccactgcccagatgtggagctggacctccagaggagcgtgcaggctgtgctccgggagctcagcacccaggcccctgccctgcagagcaaccaaggtaagagccagctggcagcagcagctggtccctctgacctccacccaaccccagccaacaatacacgcgcatacaggaaagagccccggcctggagctcagggggcaagggtcgtc

SEQ ID NO: 17267 - DNA, 2300 bp, Homo sapien
ctcccactgtcctttgttcctggctggcggtcagccgtgtgcactcaaaaatgaaagcaccctagctcctctttgcaagggacagctctggggctctctatggtcaccaagctgccccctctatgggtaccacagcaaatgcagttgcagaaatggcagctgatgataaagagagcagtgcacccacaagaagtgacctcggcttgtgatttccgattcagttaagccaaggctgataaggagaggcgctgcccagggtggccacactgcccagctgctgctgagtctggaacctgcaggggctgagttcttggtcctttattctgtcctgggcgtattcgtttccttcgttcagtcacccatttgcttcataaataagccaagcattctcttaacactctttcaccctgtgatggacggaataatgaacaacactctagcccctgctctttcaggactcattgagggaggaacaaggcagacatgtgagctgagaacgctaatacaaagatgcaagatagaatgtgacttcagtcacatgaaggggacagaaaagaagcagttatgggaggaaggcacagcaatagagtaaatgatttacatttctggactttttttccaaatagcttcctctgcaaaatgaaaggtcagcatagaacctagtcaagcccctacgggaaaggatcagtgacttcacagccccaaagctctctgagttgagccaagtgacaaactccaacaggcttaatccaaaaaagaatggaatttattggatcatgtacaatgaacagtccaagagtagattcagccccagaatttcaggcatagctggatccagcactcaaaccctgctgtcagcaatctgtcactctctagagccatttacccattaggcccaacgggatgacagcatagaatctgtgagtttttcaaagctctagaaatgtgtcagagactctcccaaatagtgtttgacttcaaaatgtgaaaaaaagaaaatgacaaagtagcaaatgtgtcaccatgcggttgatcaacttcccccagcaggtctactgttcctgcccagcactgctctctcctaattgccaaggacagcagatgcttcttcattctcttcacctgtgtcctctccacaatcattggcgtcgttgaccattgtctcctccttggcattctgtcttctgccagcatccctggcactccactttcctcctgcctcttaggcttgtttttttgttcttctctgataaataatgaatgacaagggatgagccaggagaagggttgggaagtgattcccacagcctggatagttaagagactgcagtacttctgggaggggctggagtgaggggataaagcatgaggttggagtttagggagggaccagatcaagaagggtctggcaagtcacactgaggagtttggccattctctttaaagtaataaggagccattgaaggttgtagcaggagtgtaacatgaatagatttgtgtttcactcttagaaagagacctttggctgtggggtgaaggacctcaggctattgtagtgtttcaggagaaagaccatggtagtcaggtgaaacagtgacagccatagggatggaagaaagtggaggatccatgacctattgacagggcttggtgcagtttagatgtaacaggcgaggaagagggaggcgttaggatgataccgaggttgctgattctgaggcaggaaacagagaagtgggcttagagggagaaatgatgagctcggtttgtacctgttgagatggaggtgcttgagggacatctggctggccatgtccaggggtgggggatggttggtgagtctggagcttgagagagaggtcagggctccctgcatcagtccctcccccgtcaacaccagagggagtctcttgggaggtgtccccctcctgccccataaaattggtcacattcgatcagaataaaggacctccagtgaccgtgggtcatgcttctttagaaaggatcctcacagcaaaatgcattctgggaggagcttcgagggccacaaggaaggggaaggaagaggaggggacagagctgtgagacatcgagcttttctttgcagatctgaagagcacagtcaagaccacagacacccgtggaggctcccccaagacatctgcttctctgggactggggacctcgctcaggaccgtggggagttggctgaaggacttggggagcccagaagctgccaccgaaccaaggtaagtgctggcttggatggagatcgccaggcaggcagatctgagcagaac

SEQ ID NO: 17268 - DNA, 2300 bp, Homo sapien
ctgtgtcaggacttctctgaaagccctctgccctcagctttgcggagagaaggaaggatcttccagatgggctgacaaccctttttctcttcccaatcttatgacagggattggcgggtcactgtgctggttctggactgacacctcccagcaagcccaccagagtggctgcgcccacgtccttgacaatactccgtggctcttagaactttagaatgcagaggatttagcaacttttgtccctagaattgggtctcagccacaatttgaaaataaaaagtcctccctgatccccttgtctgtttataccagtgtcaactctctcccagctgcctcgaacaagtcccttatccttcctggacctcagcctccccttctgtaaaatgagggacttgctggggaggcctctgagctccctccaagaacctgctctgggggtaacctgggagaaatcagcctgtgagaacaaagggtcgctgtcacatctgggccagctgttcatgccccaggctcatccatgtgaaggtgtctggtgttctacctcctccagcaggtgccgttagccctgagctggaataggacccacctccagagggtcttgtggtcgggctgccatgggaggcagaaagatgaggcctcatcacaggtgtcagtccccacagatgctcatccatgccaggtgccagcacaatcccaggtcagggaggggtctgcccggtctggctcagggtcagtggactcacgacctgagctacctgtggaggtgttaaacagaagatccaaaggcaactgtaaaagtcacatggaagggcctcaggatgtctttgggcatccaggtgctgctaatggacacacccaaggtcttgagtcaccaatgaaaggttttcttctttttgttttctttttgagatggaatctcgctctgtcacccaggctggggtgcagcggtgtgatctcgacttactgcaacctccgcctcccgggttcaagcgagtctcctgcctcagcctcccgggtaactgggattacaggtgcctgccaccacgcctggctaatgttttaaaatattttttagtagagatggggtttcaagatgttggccaggctggattcgaaatcctgacctcaagtgatccgcccaccttggcctcccaaagtgctgggattacgggcatgagccaccgcacccagccacccgtgaaaagttttctgaactcagctcttcacctccacagccagaaggcatgggacctaatgggttagtctttgtcctgggccagcccggcgccctggcatatactcctgggtccaggttctcagcaagctaattcctgcacccagactgtggcatgggctggctcccctttctccaatactcttccccctcatttgccctggcttcctcatccagcttaaatgtcccttcttcagagaggcctccctgaccccccaacaccctggaggggggtccccacttgtcccactcccagcaccatcctttacagcatgtttcacttcttggaatcacgtctttgtttgctccattgctcagtgtctgtgtctcccaccaaggagcacagctgcttggttcactgctgtctcctctagtctcctctagtgcctggcacatggcagacagtcagtgaacccgtgatggaaccaaggtgcgtgtgccgcttcctgcgtgcccactgctgcactgtccggctttggaatgcatagcctaccacagacactgtgaaaggatgctggagagctcacaaagggcttagttttcacttggcgagtggtgcctcccaggctggggaggcaggaggatttgcctgtgtggggcctccgtaagctgaatactctagccgcgcagctgaacccaggttaggattttatccctctttgtatgtcatctgcatggctcagctctgagctctgtgcttcctcttctggcttccagagctgaactgcagctttctcagcatccctctatggcctggcctgactggccagtgaaggggtctgcccggaaggagtgagtgcagtggcatcccctgaggccagggcgatgatggcaatgactgtagcagggcagctctcgcgtgttggaagcttactcagcgcatctgctacagcattttatcttcccaagagccccatgaggttagcaccattgtcatcccattttacagataagtcaacagaagtttggaaaagttaaagtatttgcccaaagtcacatggctagcaaatatcagagtccaggtttgagtgtaagtccgtcggatgccagagccaagcttaatcac

SEQ ID NO: 17269 - DNA, 2300 bp, Homo sapien
ggaaatggagaatggataggtgtcaggtgctgatcagatctgtgacagggagacgcagacagaactcagtgttgacggcgtggcataacatgcaggctccacatctgggccacagctgtaggtggagaggagaatgcctacttctgaggggatgtacgatgggaccaagttggcttcttgggatgctcagagccctaggagtgagcaccaatgagccactcttttgcagttttcctccattttcagaaggcaggcatcccataatttctctggcagattatttgcctttccaagtgctctcctaatccaacatttccatctggcacacagtgtcattcttgctcctgaattcctgattccagagcatttctgccattttcttcctttgcacagtgtgtaccttccctcttctcctcttcttccaaatgtccatatttttgtggtggaaaaagtggggacaggggagacagaagactggaatccttatcaagtcctctctcagcccttggtggctctggttccttctctgtgaaagggtgacgtgtggggaaggggttggggatgaggtaggagagggggtctgagttccttcccacgtctaacgatggctggaaccaggcctctgtgttcaaccaagggtactttctgtttctgtccatttggggaagttgctttttcttggtatttcgggagtcaggaaaagaaaagtcattggtgttcatatctctcaaagcctcaggtagggctgcggcttttgaccaacaataacgtatgaccatgaccttgtggccgagtttgcacgcctctaacagatattatgacacagttccattcaatagtggaagtggagatttcagcgttgccctttgttaacccacaaatgaagtgctactcttccattgtgagggctgtcggagcagtagccaaccttcttatccccattttttaaacgagggaaaggaggcataggaagcgcagtgtcttgtgggattccctggggagtccttccaactcttggtagagcatcatctgcaacgtcgtctgggggagaaaagggggaggcaagaagagggccttgaccctggaggcaggaactcccgcacaccctcactcccttccccaggggctggggaaaccactcaggtgacagtagccttggtgccggccagggagggcgggaagtccagccagaggctggaacagcagtgctgaacgccgggactggctggtatttctatgaaggttcctgcagaaggatgcgggtcaaggtgcccgtctgcacagcagtagtgcaggcattttaagggttaagggcacccaaagaaaatagaagtaggggccgggcgcagtggctcacgcctgtaatcccagcactttgggaagccgaggcgggcggatcacgaggtcaagagatcgagaccatcctggccaacatggtgaaaccccgtctctagtaaaaatacaaaaaattgggcgtggtggcgcgcgcctgtagtcccagctacccgggaggctgaggcaggagaatcgcttgaacccgggaggcggaggttgtggggagtcaagatcgtgccactgcactccagcctggcgacagagcgagactccatctcaaaaaaaaaaaaaaaaaaaagaaagaaaatagaagtaggaagaggaagtgggtcgcagtgagagaaggaagcagctcgtcggagcttcctctttctcgtctttcccctaagcccctaccccagacctgcccccctgctccgcccagccctcctgcggggccaaagccgcgcttccgacgcgggggcctaacctccccttactccttgggggtcgctggtgctccgcgctggtgcccctcgggccactgccatggaccggccagggtctgcttcttccgagggctggcgggtcagagccggggctgcttctcagacgccttgcggcctcgggggcgtgacccagaggatgtggggccgggcgcgcacctggctgacgctgccgggccgccaggtggctggagaggccggctccgcggtcagccccgccccattaggccccgccccctgacaggctccgccccgcccgccggaggagcccaggctgggcagatgctgcggctcgccgcgcggctccagctggggcgcggtggtcccgacggtcacccgaatcgcagggagtcgccgctggagaggggctcggcgcccggcggggactgcaggtgtgtgactgggcggccagggcggatgcggagggcacgcatgggagctccaggcagagctggagcaagctggggaccgtcggggaga

SEQ ID NO: 17270 - DNA, 2300 bp, Homo sapien
ctcatactaacagctaacatttctatatgcatgtactatgtgcctggttttatgcatatttacatttgcatacatgagaaagcctatttatatgtgttacagacctgcaatatgtatgtctatatcccatcagctataatattcaaatgtgtcaactcacgtgatgctcacaacccagtggggtagaaagtattatctcccttgtacagatggaggaaaccaaggcatagactttccatagtcacacagcagaggcagaatttgaacccaggtaccctggctccgaagcgtttcctcctaagagctatgctgcctttcagtataccattgcgatttcacaggtcaccatggttaaccatttcatttatttcctttgacctcacttttaatttgttattgtgtcatattttatgtacccttgtaagttacctgaaatcctttctgccacaaggtgaggtaaggcataaataaacagtgcagagtgtggtaaacggcacaagaaggcacagctaaattgctaccccggggtaagaagatgaatccaggctgtcctgcaatggaatggatttattttcttgagctgtggtgagctcccatccctggaagagctggcttgggtggccgtctctctgggaggctggggaaggccttcttccaaggagacggagctgggccagacgagccccgaggccccttcttagattctcagggtttatgaaaatgccaataagacaaactgaggcacttaatggagctaatgcagcaaggcagcccttgggccggaaccaggacctggggcttttcatccgggtctattactggaccacacatctacaagtaacaaataaacgagcagagattccgttccaaactctcggcccagtgtattcctttcccagagctctctggctgctgttgcaagatgaccaaaggatgctgtcactgtcctcagtctttttattggggcgatggagaatgaggcaaggaggggctgggtggccccgcagatgccccatgacaccatcattcggcaaggttatgcatttgacgaatgccctgcagtggaaggagcccaggcttctcttcctgtttttgatgtttacttgggggttgatcttgtgcgagtttcttcagctcccgggaccctcagtttcctcatctgcaaaatggagttaatacaacagcaaagctgctgtggaggtcccatgagctattacagggctttgcacccttaaaaatgcggttgaggaagtaccgatacgcctgcctcaggggatctggggagggctgggctgtccccatgcctgagaccaggcaggcccgtcttggaggggcggtggccagcgtccaggtgctgccagcttcctaccccttcagcctcctgcccaccactgctcccttggctagaacgaagccgcgttcccgacagacaggctcacgcacggtgatatccgtgggagtgcgggcgagcagcccctcctcgccggaccccgggggcttcgggcaaaaatggagagcaggcagaggtcacatcctcctcctcttcctcacgctcccgggctgcgtgcccacaggggcacagccctgtgcgcggtgccaccgggggccatcaggctgggttagaggaaggcccgacctccgcgcagcaaagaaaacaaacacagatgtgtttggctgggaccgggagggagaaagtggcccccttcccccgcccgcgcgctcccccgggcgtgaggctctccgggcggcgcggggcgcgggcgaggctgacagtccccggcggcccctcctcccccacggggtgcgcgcctggcccggcccagccccctctccggggtttccccgggtgctctcctcgctttctctttgtctctgctgttctttctcgggctcccgggttcccacccgcctgtgctctccctctcgggcgtccgggccggttccctttaactttcttctttcccggggtgaaaactttgctcggagctggcggcagctcgcggacgttattggccggcgccccgcccggcggccccgccccccgcccccgcgctcccctccgcccctcactcccagcgcgagtggcggcggcggcggagccttcgggggcgagcgcgcgtgtgtgtgagtgcgcgccggccagcgtgagtgtgtgtgcgccccgggcgcgggcagggcagcactccgagctcggcgggagcggcgggagccgggcggccgcgtagtcactcgggcgagagaggcggcggcggggccgggaccggggctggggctggggcagcggcggccgcgccgggcat

SEQ ID NO: 17271 - DNA, 2300 bp, Homo sapien
caggttgtccaaggagggacaatgctctcgccaggcatcagcccgccctttgttagaggaggagagaaggcacaggctgggaaatgagagttcccaaggcttcagcctctgattcagaaacaccagctctcgtgtctaggcttgatttttccacctgggaatttgaaatgttggttccaaccatttctgagcaacctgagaactcctaattccctgacgggagacctcagctttccccccatgttttccgaaccccagatttcctcccagctgtctaaaaatgttcaccttgcagaatctggatggacagaaggattttgacaaactgtgaggctgacaattggaggttgttgtgaagctatttcaacctgctctgccctggatgggtgctgagccccctctaccaaggcttggaccctggtcatttgctattagcgagcccctgcgaacagctgtacggaacgcctcagggttgctatcatccttcattagggacacaggtgccgtgcatggaagccctgcccagctcctctcgaaggccctgggctgtccgtcctttctgttctgaacccaccaggggcagggggaatgccggcattccggcaatagtgacaacagcactcctggaatgggcccacccagatccagggtccaggtggacagtgagaatggggccagtgctgaggagaggggcttgcttttccccagaaacaggagactcagtgtttgtcaggatagacagcctcagacaggctggctctgctgagcccccagtggcttctgcaagaactctatgagcttggggggtctcccacgtggactcactgagcatgaggccttgaatgcaggaatgcacattgaagacagaacccactgaatgggccaggcgcggtggctcatgcctctaatcccagcgctttgggaggccaaggtgggtggatcacctgaggtcaggagttcaagaccagcctggccaacacagcgaaatcccatctctattaaaaagacaaaaatcagcggggcatgaaggcttgcgcctgtaattccagctacttggaagactgaggcaggagaatcacttaaacctgggaggcagaggttgcagtgagctgagatcgtgccactgcactccagcctgggcgacacagtgagactcaaccaaccaaaaaaggaacccactgaacatcagtgactagcatcctcaaaagctcactgtcccccacaaagccagagacttgaaaagcagggtgccccacacatacttatgcagggggcgatgggagagcggctctgctggtagcctttggcgcagcggttgcaggtgatacccgtcacgccgtccttgcagggacactggccggtggtttggttgcaggttttgccagcagcacccacagggtggcaatcacaggctgcagagaacacaaaatgggagggtcagacaagggggaagcggccagtgcatccccgcagagccttccctacccagggctgcctccatggaccctgccctggaggaagagcagcgatggggagcaggcccagccaagcccaaacgcactccggaagctctgacactggccacccacctacctggaaacggagaataaaaaccaaaatggaccgacctgaagagactgctttggcagcaggaaagtgaaatgcagaagccctttggaagcccaggaggaaggctttcaaataccttctcgggaaggcagagcccgtagccctcatcacgcctgggtggaggagtcaggatcgggggatacaccttcccttgacagggtcggcttatgcgttttcactctgtcctcaaccagctccctgcccccaagttttcttgccaacccagggcatgggaggagtggggtttgaggcctggtgaagctctggggtttgccaggttagagggagtcacagggaggggtggctcccccagctgctgccccccaacacctgaccctactttgcagccaggcagccttctgaatcacaaaacccataaactgtagcactagagagggtcacggtgatcatttagcttaaagccctgattaaatgtgcaaacaaagacgggagaggtaaaggaaactcccagagcctcacaggaagggaacggccaggctgggagctgaagcaaggcccgggattctcaagccagcaactacggctccacagagcaggccccccaccctcctcctgggcttgaaagggtggagaggtggggttgcccaccctgtcatgcttcacggaggctctgtcgctgtgtcccaagaagccaattctggtaagagagt

SEQ ID NO: 17272 - DNA, 2300 bp, Homo sapien
taaaagatacacaaactagaatagtataatgggcccctttcatactcaccacccaatttctgtgattatcaatattctgccattcttgtttcatctctaccctccacaccttttttttttttaattttgagatggagtcttgctccgtcgcccaggctggagtgcagtggcatgatcttggctcactgcaacctctgcctcctgagttcaagtgattctcctatctcagcctcccgagtagctgggattacaagcacccgccaccatgcccggctaatttttgtatttttagtagagatggggttttgccatgttggccaggctggtcttgaactcctgacctcaggtgatcacccgtcttggcctcccaaagtgctgggattacaggtgtgagccactacgcctatgcccggcccagattacttttttttttttttttttttgagacaaagtcttgctcttgtcccccaggctggagtgcgatggcacaatctcggcaaactgcaacctctgcctcccgggttccagcgattctcctgcctcagccaccccccgacccaattactttttctaaactagtacttcaggcacctgtgtgcttgatagtgtaatgaggttgtctattgccccaggccaagggttcccgcccggactttaccgcagattggaatcacttggagagcttttaaagctccccacgcacgcccaggacaaaccccataccagttgagtcagaatgctgaggttgggaccaggcattgttatttttttaaagattccccagtgattccaacttgtttcagaactattgctctttagggctaaaataacaacacaaggactggagtcaggacacctgggagtttgtgctagctgtgtgcatttctcataacctctttagggccactctctgtgtgtaaaagtgttctctatggctctgaaattctcctttaagtctaaccttgttagactggtgttcaaggctctgcagaaactagcttctactcatctctaccattttatacttaacaggcttccagggccaccacgcagccaaatgtgccgggcacgtttccttccattcatctttgctcgccctgtctttcactaagtctagaatgtgctcctccctcctgtctgaataagagacctgctttaacttcgtggtcatccagatgtaacctcatggaccctctccatctgagtgccttggtcagcagtaatctcttccacctctgaactccagacgtacttaccacttagatcccacatttggcaggaggcaaaacttaccatatgtggatgatttttatatgtatggtctggaccccagagccagacctaggctcctcttttcatgataatatggaggaaaaaaaagtgaaatgtggcaaagtttggaccaggacccaattttccttattagcctcctgttttcttaattctgtgttttcttgtatcactgctatttttccctacacacacaaatacatgaatatatatatatgaatgatatacatgtgacatatacgaatatatagtatatatgatataaacgataggtatgtgatatatatgaatatatgtatcagtgatatatatgatatatgtgaatgtgtgtgatatatatatgatatatacatgaatggtgctgctttacagtatagtggttagtggttcaggatcctctctcaggatccttatgaagtttacagtgtaaagctcttagtataggacctggctcaggtcaggtactcagctgttactattgctataattattctagtaagattcctaagggaattgatgggcgcattttccttcatttaaaaaaaaacacttatcaagttccctcagtgttcaaatgatatgtgggaattgaaaggttttaaaaaatatattgtttactcaagcaaaaattaggacattaggggcaacaggagtttctgatattttgtgatggactggtcctggaagataatgctggtcatgttagtccacagagtctctgctttttaggagcagactgtctgataggagaaatgaaatgtgtatgcatgcttaagtattttcgtttttttgttcgtttgtttttttgagatggagtctcacagtgtcgccgggctggagtgcaatggtgtgatctcagctcactgcaaccttcgcctcctgggttcaagcgattctcctgcctcagcctcccaagtagctgggattacaggcacccgccaccatgcctggctaattttttgtatttttagttgagacggggtttcactatgttggccaggctggtctcg

SEQ ID NO: 17273 - DNA, 2300 bp, Homo sapien
atttttttttgagacggagtttcgctcgtgttgcccaggctggagtgcaatggcacgatctcagctcaccacaacctacacctcccgggttcaagcgattctcctgcctcagtctcccgagtagctgggattacaggcatgtactaccatgcccggctaattttgtatttttagtagagacggggtttctccatgttggtcaggctggtctcgacctcccgacctcaggtgatctgcctgcctcggcctcccaaagtactgggattacaggcgtgagccaccaccgcgtccggcctaaaattaggtttaaaaaagtaaatgctaaattaaataattggcccaaataacctagattccaggtaactcaactttgttcttggaatccattcttctaatatccaggatgtgggcaacttaaacaattataaactatattagaaataacaacataagacacatattccaacaagaacgttatagagctgtaatatgtttttaattattaagcagaaaggtcaagtctatgttcaataacaatacgttccttgggatcaaacaatatgttccttgggatcaaaagttgcatctttcatcatgcagtccttgggattaactgctaaataaatcacccttatcagctattgttttactgcagaagctactgctaaaggaaaagacttcatgatattaactcaagaaagtgcaaaatgccttataaacaagtgcacaatttccctcccaggttcctgtatctggaagggcccccaagatctaggtcttagccccagctggttactaactggctggtggccatggattctgaacctcggtttctccacctgtgaaataagggggtttaccgggatggactgacatgctacaaaaacgttatttcgacttcacttttataggagtccagggaagcctgcaccagccagctagctccaaaaccaggatgggcgggaaatccccgcaacgagatgcagcccagaaaagctaaaggaatattcagagatttggcgtaagtcctcagctctccagcggaccacctggtctccttcccgggccacccttgcaaggaccaagtgtggcgggatgtggctgagccccctcagtaaaggaaaggtctcgctgcccctcccctcatcccgaaaggccaccagcggcaatgcgaagtgattgcctgctctccggaagcccggcctccccgaaggtccctccacgcaccgccgccctcacccgggactcaccaggggtccggtgccatcctgcagactccgcccgccgctcggactcttcctgctcttagcagctgactacggcggcccgcgcggctcactccccgcagttcgtcccgtgcgcgaccggagcctggagtttgcaaagtgagtagctagggcctcagaactataatcagagaaagcaaagcgctcccctgcggacagtacactggagcaatctactcccaccaagagacgcgaactgctaagctcagttaaaattgttaaatagaaacaaagcattttcccaggaaggtgggagcgctgcaagacctctctgtagcagttacttaaaaatttatcctgcttcaaaaacaaaacaataaacaaaacactagattgcggtgagacttgcacgctgcgtaaactcactacaacctactttaagttaactttatgatatgtaaattatacctcaacgctttttaaaaaatctttaaaatttttttcacactgctccaaacaggggcccaaagaagtatcaattatatatattttttatagcagccttcctatcagtcctgtacgcctgattacatattttttaaatgccattcattcggtgcttgattttagagttactaagaagtcacagactctacacaaggggatggaggaattagttctgcgcagttagtgccatcccctaaatttccagagaaatagcacaaaaaaaaagaagaggagtcccaccccatctctcttccagtccccataccccttcatttccaagaatgctaatgaactcgaactcggcaggctgggtttctgcgcgggcgtggagctggagcgcatgcgctcgtccgttaccataacgaccagaagacgctgcagccactagggaggagagcaaagtaatcagaacctcccaaggatggataacaaaatttcgccggaggcccaagtggcggagctggaacttgacgccgtgatcggcttcaatggtgaggcctccagcatctttgggctggctggtttaggaattcggaggacgtgtagtgcaaacaggaatagtgagac

SEQ ID NO: 17274 - DNA, 2300 bp, Homo sapien
gtgcagtggcgtgaccttggctcactgcaacctctgcctcccaagttcaagtgattctcctccctcagcctctcaagtagctgggattacaggcacctaccaccacgcccggataatttttgtatttttagtatagatgggatttcaccatgttggacaggatggtctcgaactcctgacctcaggtgatctacctgccttggcctcccaaagcgctgggattacaggcatgagccactgcccccggcctcagttgcagagttctatgtgtgtggttctacattggctcaacaagtgacattatgcaacccactgtaggctgctcaattgtttctcaatgatcttgtaaccaactctcaagatatctgatatccgaaatgtataaagcactcactttctattggagactgttaaagttaaaccaagagtcaagagctaagtcctagagtatgcttaaaactttagacagtgattgttctgcatccacattcttaaagctttcaggcatcacaacacacatttttgaaaagttttgcttctcctaaaatctaattcattgttttctcatccctcaaaaaaccaaaacccctcaaaacgaacaataaaaccccacagctttttcttcccagaatcttcaaaacaataggcagtcacaaataagatttcagcggagcggcccagtccctttttctctccgctttagctccccctggcgtccccttccccttctgtcctggtctgaaatcctcatcatttagaaaccttccttaggattagaggaccaacaacatcccctcagggggttgctcaaacacacgttccctcccagccctttctcactggtacgccagttgggattttagcagatttcctagctggtcccaggggccgacacagacagcatccttctgtgtggttacgaaggagcctagggctttgcgagcggcgtggggttcagagccaggaagggctgacctagtgggagaagggttacaaccacccgtactcatccggcccgcctggggaagaggcatttggtcccttttaggtgctggcgcttgtccgagctggtaaaaaccatctcactccctgaggcttggatcgaggaagtgactctccaaggccttggggcaggtcaggctgtgcgggtcctcctgtgcgtgtccctggccagggctcctgccgttgtcccacactgcctttcaggtgtccccggtgtctcactattcctgtttgcactacacgtcctccgaattcctaaaccagccagcccaaagatgctggaggcctcaccattgaagccgatcacggcgtcaagttccagctccgccacttgggcctccggcgaaattttgttatccatccttgggaggttctgattactttgctctcctccctagtggctgcagcgtcttctggtcgttatggtaacggacgagcgcatgcgctccagctccacgcccgcgcagaaacccagcctgccgagttcgagttcattagcattcttggaaatgaaggggtatggggactggaagagagatggggtgggactcctcttctttttttttgtgctatttctctggaaatttaggggatggcactaactgcgcagaactaattcctccatccccttgtgtagagtctgtgacttcttagtaactctaaaatcaagcaccgaatgaatggcatttaaaaaatatgtaatcaggcgtacaggactgataggaaggctgctataaaaaatatatataattgatacttctttgggcccctgtttggagcagtgtgaaaaaaattttaaagattttttaaaaagcgttgaggtataatttacatatcataaagttaacttaaagtaggttgtagtgagtttacgcagcgtgcaagtctcaccgcaatctagtgttttgtttattgttttgtttttgaagcaggataaatttttaagtaactgctacagagaggtcttgcagcgctcccaccttcctgggaaaatgctttgtttctatttaacaattttaactgagcttagcagttcgcgtctcttggtgggagtagattgctccagtgtactgtccgcaggggagcgctttgctttctctgattatagttctgaggccctagctactcactttgcaaactccaggctccggtcgcgcacgggacgaactgcggggagtgagccgcgcgggccgccgtagtcagctgctaagagcaggaagagtccgagcggcgggcggagtctgcaggatggcaccggacccctggtgagtcccgggtgagggcggcggtgcgtggag

SEQ ID NO: 17275 - DNA, 2300 bp, Homo sapien
gccattttgcgatggaagtacccatatacctcctgaagctgatgagatgtctctgagccttggcgttgcacgcagtcctgttgaagactgagtttagataactccaacactagtcttcatttctcacagctctgtttttgttcttgagtcaatttttctctttttctttatagaatgcattttatattcttaaattgcatattaaaattgaagtatgttcaagaataatttgtgcagactctaattagaacttttaacattttgaataaattcttagttgttggttttctgttataatttgttttctgcaactctgcaaaacccacagaccttcctcatgatctgtgcacagacagcattgctattatcctctaaaaataaggtgaggtgaatttccttcttaattgccatttcattggtcaagctatatgggactagactcagatttaaatccagatcttgggcaggcttcttaaaaattctctgagccacaattttctcttttgtcaagcaagagtaagttcctgctcaaaaggttattgtgagaattaagtgactaatgtactaaagcatcggcagaattcctgacagggtagagagaaatatgcatgctttctcaaagaaaatgtgtggtgttggggatctcaggacaattaccaaagaaagatgaaattacagagatgctttattggagttggccattacatctttcttctgtgctttccaccagaagggtgatgaaatggaccttgtgtccttgtgtattaatcacccagccgggtatctttttccagagaggggtaaataatggcattttccagaacgcaagtctccgattcacagtaccgtctgatgttttaagcatgttatttatcctttaagtaaggctgcttttttgcatgaggtaactgctgtaacccggtttgaaagatcaagttttttgtttgtttgtttgttttttgagacggaatttagctcttgtcgcaatttagctcttgtcgcccggctggagtgcaatggcgcgatctcggctcactgaatcaagcgattctcctgcctcagcctcctgagtagctaggattacaggcatgcgccaccacgcctggctaattttgtatttttagtcgagacggggtttcaccatgttggccaggctggtcttgaactcctgacctcaggtgatccgcccgtctcggcctcccaaggtgctgggattacaggcgtgagccaccgcgcccggccaggatcaagaatatttaataaatgatgatcacttattaaacaacaagtaacatttcagagcgttagaatactgcatctcacatggtgctgatctcttcctgagctagaaattgacgagaaagtcattttgcaagaccttgcctgattaattataaacctgacagttgcatgggataaagtgaggggtgggggaggggcccagggttacccagggaatcaagggcggggcaaggccaaactaattctgattgggcaatcattcaacaaggatcgtgcgttaaggagtgaaccagaaaccgcgtagggggcgcgcctgagagcctgaaaacttcctggttagcaaatactgaggctggaaagggcctgaacttggcagtccatagatccaggtcgagttccggtttccctgcttacggatcgggcggcctccctacgttgcgataacctctctgagcccccttccttgccgattaaagcaagggtgatcaagtcttgcaagtttttggaaaatgattctaacccaatctgtggtgtaaaaaagcaaaccacaaccactcgggggcttttttcacagggcaacacgtggctcccagttcaggtcccgggttggcgggtgcaggcacagactctgcctccccccaaggggcagacggtctggaaggaggtggcgacacctgtccgcacacacctgagcctgcggaggaaccagcggtgcacaaaagcgctccccacccccacacagcgcccagcgcgcgcctctcaccacgcccgaggctgtgctctggagatgcctgccttgcccttttcttcctgcagtagccaggcctttaccatttactaggcgctttcagaatgttcatttctccgtaatttccactgcttgaaggctgctcgaggaacaggagcagcggcgaaacccaggtctgtcggtttacgaggtaaggaagggtggggaatccgaccacgaagactcccagtcagcgcagcgggggcggcaccaggcaggggtaggggtggcccggcgctgccctggagggggctggtcgtgccgccggatt

SEQ ID NO: 17276 - DNA, 2300 bp, Homo sapien
tctaaaaataaggtgaggtgaatttccttcttaattgccatttcattggtcaagctatatgggactagactcagatttaaatccagatcttgggcaggcttcttaaaaattctctgagccacaattttctcttttgtcaagcaagagtaagttcctgctcaaaaggttattgtgagaattaagtgactaatgtactaaagcatcggcagaattcctgacagggtagagagaaatatgcatgctttctcaaagaaaatgtgtggtgttggggatctcaggacaattaccaaagaaagatgaaattacagagatgctttattggagttggccattacatctttcttctgtgctttccaccagaagggtgatgaaatggaccttgtgtccttgtgtattaatcacccagccgggtatctttttccagagaggggtaaataatggcattttccagaacgcaagtctccgattcacagtaccgtctgatgttttaagcatgttatttatcctttaagtaaggctgcttttttgcatgaggtaactgctgtaacccggtttgaaagatcaagttttttgtttgtttgtttgttttttgagacggaatttagctcttgtcgcaatttagctcttgtcgcccggctggagtgcaatggcgcgatctcggctcactgaatcaagcgattctcctgcctcagcctcctgagtagctaggattacaggcatgcgccaccacgcctggctaattttgtatttttagtcgagacggggtttcaccatgttggccaggctggtcttgaactcctgacctcaggtgatccgcccgtctcggcctcccaaggtgctgggattacaggcgtgagccaccgcgcccggccaggatcaagaatatttaataaatgatgatcacttattaaacaacaagtaacatttcagagcgttagaatactgcatctcacatggtgctgatctcttcctgagctagaaattgacgagaaagtcattttgcaagaccttgcctgattaattataaacctgacagttgcatgggataaagtgaggggtgggggaggggcccagggttacccagggaatcaagggcggggcaaggccaaactaattctgattgggcaatcattcaacaaggatcgtgcgttaaggagtgaaccagaaaccgcgtagggggcgcgcctgagagcctgaaaacttcctggttagcaaatactgaggctggaaagggcctgaacttggcagtccatagatccaggtcgagttccggtttccctgcttacggatcgggcggcctccctacgttgcgataacctctctgagcccccttccttgccgattaaagcaagggtgatcaagtcttgcaagtttttggaaaatgattctaacccaatctgtggtgtaaaaaagcaaaccacaaccactcgggggcttttttcacagggcaacacgtggctcccagttcaggtcccgggttggcgggtgcaggcacagactctgcctccccccaaggggcagacggtctggaaggaggtggcgacacctgtccgcacacacctgagcctgcggaggaaccagcggtgcacaaaagcgctccccacccccacacagcgcccagcgcgcgcctctcaccacgcccgaggctgtgctctggagatgcctgccttgcccttttcttcctgcagtagccaggcctttaccatttactaggcgctttcagaatgttcatttctccgtaatttccactgcttgaaggctgctcgaggaacaggagcagcggcgaaacccaggtctgtcggtttacgaggtaaggaagggtggggaatccgaccacgaagactcccagtcagcgcagcgggggcggcaccaggcaggggtaggggtggcccggcgctgccctggagggggctggtcgtgccgccggattcccgcgcggggcggggctgccccgcccttggctccgcctccgccccgtccccgcacacctggcccgcaggtagccggcaccaggagccttagagaagctgtagggcctgctggccgctcgtccgcctcgcgcccgggggctccgcgcctggagctgcgccggcggcagccatggacctgggccccggggacgcggcaggagggggaccgctcgcgccccggccccgccgccgccgctccctgcgccgcctgttcagccgcttcctgctggcgctgggcagccgctcacgccccggggactcaccgccccggccccagccgggacactgtgatggcgacggtgaggggggcttcgcctgcgccccgggccc

SEQ ID NO: 17277 - DNA, 2300 bp, Homo sapien
gtctgtctcctcagaatggaatatttgtcacatacttccagtcttccacctgcaaggcagagctgcttccaggaaacgcaaggcatgggtgggggagaatggcaggtggctagcttgtaggacataggtaggcctaatgacaggacgtagagcccaccttcttctacaatcccaccaatcagataaggtgcttctcctcctttggaaggagtgaggatgaggaggcagcatggttctccccgtctacaggaaattgagggagcaatcagtgtttttcccaatgcatcagggctccctgggctgggagaacttctcccagacacgccttgttcctcactccctcctggctcacgcaggaaggtgccacaactccagctcagacctgtccatgctcagccacaggactttgtgccttccatgagctcaaaaccttttatcagatcatcttagtggtagtttgggactcatctgacatccccccttttcttgcaacacatttgaaacactcctttgggtgtggacgttgccatcacttgtatctgttcctattgatttcaggataaaacctcatgtgctccactttgctctcttcccatctcttctgtattgaggctgatccaccgtttctgaaatgggctgggcccaagtagttggaaagagctacaggttgacaggcactgggattttctatgcactggagggtgtggaaggagaagacttcttaggttgtggaggggggcttaaaggtgctccttctgcattgcagttgggggaaaggtagcagctctctttgggcatcatcagtattgggtatttgtgtaggatggtcaagtggaagtgccctatagacattgagaaggtagctggggctgcagtggaacagctgatctatttcctcaaagtaaccccaaatctacagagctcacaagctcccatgggaatgaggggaggcactgtgaggttggtctgaagttctgagacggagccttcagcagacttagcagcctccgaggatagctgaccttggcttactggcagttttgggtatttctgtttggaacatcagtccttgggttgtgggggagactgctgagccctgaagagctgtgggaaggaggccccgtgttttctgatgggctcccttgttctcttctcagggttttgcatctcaggaggccaggaggccctccacatgtcaagctggcggtggagtgggatagctctgtcaaggagcggtgagttcaagggaatttgccacctgcagagctgagacagggcctgtgtgtgcccaggtttccctggacgcagcttcccccagcacggctgcaggcagggtgcacacatctttgagccagtgtaacccgttcctgtgagatgcctgagtgagaattttctgtatgtaaataacagtgacaggaatggaggaatggagtgatggtggtggtggtgggtgatgtcagaagtagtaactgcagtcatagtagacagttacgtagcacccacccactcaccccatgccagtcactgctctgcacacttcatgtgtgtataggggatttatttaatcttaatcacaccctatgtgtgggtggtctggggtggatactcctgtaatccacatttctcagaggtggaaactgaggcacagagagggtaagcagttgctggagggcacacagcttgtacattggcagagctgggatttgaacccagaccctctgactggagtccatgctcctcatcaccatacttggctacctctgtaacactgagggcatcagccttactttaagaaaggatgtcgttcagtccagcaagtatttattgatcaacttctaggtgccaggccctgtgctaggatgaggaaaacaaagatgaataagccaaggacctgccctgtaggagctggtgggggagagagaattccagtaaaatatagtgctgagtcagaaggatgcctgcagctctccaggaacccataggcagggcacggtagtgtggcctggccaatgtctgctgacgggtttgctgtgagtagagacatagacgaaacctgtctgggagcaggaaagtcctgaacgccgtgggtgtcctctccgtgcagcctgttcgggagcctccaggaggagcgagcgcaggatgccgacagtgtgtggcagcagcagcaggcgcatcagcagcacagctgtaccttggatgaatgttttcagttctacaccaaggaggagcaggtcccgccctgggggtccatgccccggccgggaagggggctggctgcctttggtgggttggccacgtgc

SEQ ID NO: 17278 - DNA, 2300 bp, Homo sapien
tggacgttgccatcacttgtatctgttcctattgatttcaggataaaacctcatgtgctccactttgctctcttcccatctcttctgtattgaggctgatccaccgtttctgaaatgggctgggcccaagtagttggaaagagctacaggttgacaggcactgggattttctatgcactggagggtgtggaaggagaagacttcttaggttgtggaggggggcttaaaggtgctccttctgcattgcagttgggggaaaggtagcagctctctttgggcatcatcagtattgggtatttgtgtaggatggtcaagtggaagtgccctatagacattgagaaggtagctggggctgcagtggaacagctgatctatttcctcaaagtaaccccaaatctacagagctcacaagctcccatgggaatgaggggaggcactgtgaggttggtctgaagttctgagacggagccttcagcagacttagcagcctccgaggatagctgaccttggcttactggcagttttgggtatttctgtttggaacatcagtccttgggttgtgggggagactgctgagccctgaagagctgtgggaaggaggccccgtgttttctgatgggctcccttgttctcttctcagggttttgcatctcaggaggccaggaggccctccacatgtcaagctggcggtggagtgggatagctctgtcaaggagcggtgagttcaagggaatttgccacctgcagagctgagacagggcctgtgtgtgcccaggtttccctggacgcagcttcccccagcacggctgcaggcagggtgcacacatctttgagccagtgtaacccgttcctgtgagatgcctgagtgagaattttctgtatgtaaataacagtgacaggaatggaggaatggagtgatggtggtggtggtgggtgatgtcagaagtagtaactgcagtcatagtagacagttacgtagcacccacccactcaccccatgccagtcactgctctgcacacttcatgtgtgtataggggatttatttaatcttaatcacaccctatgtgtgggtggtctggggtggatactcctgtaatccacatttctcagaggtggaaactgaggcacagagagggtaagcagttgctggagggcacacagcttgtacattggcagagctgggatttgaacccagaccctctgactggagtccatgctcctcatcaccatacttggctacctctgtaacactgagggcatcagccttactttaagaaaggatgtcgttcagtccagcaagtatttattgatcaacttctaggtgccaggccctgtgctaggatgaggaaaacaaagatgaataagccaaggacctgccctgtaggagctggtgggggagagagaattccagtaaaatatagtgctgagtcagaaggatgcctgcagctctccaggaacccataggcagggcacggtagtgtggcctggccaatgtctgctgacgggtttgctgtgagtagagacatagacgaaacctgtctgggagcaggaaagtcctgaacgccgtgggtgtcctctccgtgcagcctgttcgggagcctccaggaggagcgagcgcaggatgccgacagtgtgtggcagcagcagcaggcgcatcagcagcacagctgtaccttggatgaatgttttcagttctacaccaaggaggagcaggtcccgccctgggggtccatgccccggccgggaagggggctggctgcctttggtgggttggccacgtgctgcgggggcctcacagtccgggtggtttgctttccagctggcccaggatgacgcctggaagtgtcctcactgccaagtcctgcagcaggggatggtgaagctgagtttgtggacgctgcctgacatcctcatcatccacctcaaaaggttctgccaggtgggcgagagaagaaacaagctctccacgctggtgaagtttccgctctctggactcaacatggctccccatgtggcccagagaagcaccagccctgaggcaggactgggcccctggccttcctggaagcagccggactgcctgcccaccagttacccgctggacttcctgtacgacctgtatgccgtctgcaaccaccatggcaacctgcaaggtgggcattacacaggtgagccttgccttgcctttctgcaaatgcagctgtggccacagcctcgagatgtccctggaatgggtgttgctcagatgctgagctccctggggcacttattgagatccgacccctcacccaccgcacac

SEQ ID NO: 17279 - DNA, 2300 bp, Homo sapien
ctcaggccctcactgaacggggcactggcaggagcagtgatgctgaagatttttaaggaactcctcgggcagaggacactgatgaaggtgtgagggcagaagattctgcagagcatcctgaaaacacacaggctcttgatgatgtgttagacacctcctgaataccccccagacagaatctggaatctatgtgcctgggctagacagtgatactgggttaatatcactccatctatactttgccgctggccgagtctgggcacctgtgtcctgtgctctcactggcctggtggggtgtccagtctcaagggaagaggccttactaagttccatcgctagagggcaaccagccaatgggtggggaagtcgtgtgtggcccccaactttcatcccttcagaaataaaggatgtttttgagaaaaagttgcaagagatgagatggaatattcttgcaaagcaggtattttctttaaagacagaccattttccagcatgcaacttggaagatgatctttaatgagcactcacagaacggagttgcagccacattcaatgaccaaagtccatcccttgggtactttctccctctgggtcactccatcctgctctctgccatcccagagagatgaccacgtcaattccagaggtgacaccactctgagtccatttctagggtctttgttctagttgagcttttcattgttaaggtctaaaatcttgtcacatggagtttttaagatttttagggatgtctattaagaaaagcatggctgcttttcccaactgttcagaattcattcagttgaaaagttacccaggatgagttcctatgtttgacttgaagagggaaggaaaaaataacacaaaaacaaaaccaaaaacgaagtgaaaacatgttcttcttgcctcttgctgactcactgttccaaccaatcaagacatcttccacctgggcctccaatttgggaggctgggagacattgcagggacgctgggagctggcctgggagaggtggagtaagaagttccaagcagagcctttgggaggcatggcgatgagcctgctaagaactcaccggagagggcaggggcaggacagggcaccctcccaagtacctgtgctcaagcaactctggtcagaagacctgcctatccggttctgctgtttacttgctgtgtggctttgggcaagccatccaacctctctgagcctcaatgtttctcagctgtcaaatggagaattcatcgtatcctcatggggttattgtcaggatgtgcgaaataggatggtgggttaaaagacgttgtcaatgtgagttgtggggacagcctactcctgtgctggttagtaagtgatgtatcatcaattccataaaagggtctgtcaggtgggctgagccacatgtgcttagaacaagtgggcattcaagatgagtgaatgttgcacttttcaacacactgttttgctattgtgtaggcataacctacgccgctgattgggtttttgcttcatggcctgggctgggagctgttctctcctgagctgagcaaccacctctcctgcagtctctgcataaacaggacccagaggagattttgcctttgtggttagcctcagcccagcctggacaagcttaatgccttagaaagaaataccctgcctcaaaaagacacctgcctctaaactggctcgagccccatcgccttctgccagccattcctctgtagctcgaaccccagcctgtctcagccagcttcgtgcattgagcagaaccttcagggtggagcccgctgaccgccttgttctttctcctcagcctgtcaaggaagtcccagaaagcacagctgacttagggaaggtctgggaaaaatctccctgcttttgggggggcaggggcgggggatgagccagggccgagaaggaactctgaagactccgtagattgctctagaccgcctcagacactctcggcgcagcgtggagaggatttgtgcaaacatttcctctgtggaccaagaggaatgcaagaggaggctgcctgcggtgcatcttggacggctagagagatgtacccctacttgtgaaggtgcacgaggaagatgaagctgggatcgagcagggcagggcctgggagaggaagcgcgggactcctgcctggcgtccacgagctgcccatgggcatccctgccccctgggggaccagtcctctctccttccacaggaagtgctctctctgggcccctgggaggcccttcctcactctggtcctgctggtttccatcaagcaagtaagagcagt

SEQ ID NO: 17280 - DNA, 2300 bp, Homo sapien
catatgaaaccacatgtatgtggatgtggccgtctttgataaaagccatctgccatggcacactcatcacctgatcatatgacatgattatctgctgtagattagcctgggaatctgttaaaggaatgggggtggggggcgcgggtctcccatctcccagggcattaactaaatctgaatagtaacatttctcttatccaagcatacactaagttcagaacattctagcgaatatgtaattgttgtctgcaggctgactcttcgggtgcagccacgtgcaccatgcccacctccaaaagaaaaaaagaagaaagtaccttggcccgttgcctctgagcctactgaggacaatccccggctccggctgctttcagatcattttattcagaggccttgagattgacaggacactgtgaactctccctgtctttcttcacccaaaggcagtcccaggcttcaagcccttcccagctccctttgaagacctcatgggcccaggcaggtggtagtcaagccttgagatcagctgcaggaaccacctctcgctttggagaacactgctttctgaggtcaaggtaaggcaggctttcatccagagccatgccatgcacagctcaggtgagcactgccttacccagaccaggtgctgacacctggcagccaggtcgacatggtgtcccaagccagctcataacctagcaccatggtgtttctaagatttcaatgccagaaacctggccttttttttttttttttttttttgagacagagtctcactctgttgccaagctggagtgcagtggcgcgatctcagctcactacaacctccaactccctggttcaagagattctcctgcctcagcctcctgagtagctgggattacaggcgcccgccaccactcccagctaatttttgtatttttagcagagacggggtttcaccatgttggccaggatggtctcgatcccctgacctcgtgatccagaatcctggccattttagcctaatagggagcagatggtggggaatgatgcttggcttccaggagtcaggagcctgtaatattagaagtttgggacctagtctgaaatacttccatttgattccaggaggcccataaggtggagttttaaggttgttgcttcccattgccaaacaccagggtaaatcatcccctgagatggtccaagtatctaataatgatcattgaattagtgctcaaatggagagatatggcaaatggagagatatgactatatagtacttgtgttggttatgtgtgaccaaggaccttgatcttgatcctccgtattccgctggtcgttttgtacattcacagagtaagtgtgccctgggatctaattggtgaaggtttgatgattatttagctgattgtggaacataaggcactggctcagcctccaagagtcctcctgtccccaagtttctgtgaaagtttagttcatgtcggtggctgggcatggtgtctcatgcctataatcccagcactttgggaagccgaggtgggcagctaacttgaagtcaggagttcgagaccagcctggccaacatagtgaaactgtctctactaaaaatacaaaaattagctgggcatggtggcacatgcctgtagtcctagctactcgggaggctgaggcaggagagtcgcttgagcctgggacgtggaggttgcagtgagctgagatcacgccattgtactccagcctgggcaatacagtgagactccatctccaaaaaaaaaaaaaaaaaaaaagaaagaaagaaagtttagttcatgtcaaataaagcaaaatcagcatgatgtgtacattgacgtaattgaccggaggtcaagttgggcagacgaatgcacattctttgggactgcattcagcattcctgtggtccccaaatcattccccatccttgactcatctagagagtggggcacccatgctggtttctgcacaggttacaccagcttccagtgccaggaaggtgggctcccacggtgcctctgcctccatcagtggcatccctgtgctaaaacactgatgtttatcagacccttcttctctctgtaggcatattttgtaacgggacatttgatcagtacgtgtgttggcctcattcttctcctggaaatgtctctgtaccctgcccttcatacttaccttggtggagtgaaggtaataagtcttatttttaccaattttccccaaccaagtgcttttctgaagtcctcttcccccacaaacagtccccgtctaagctctcagtaatacatcttccttctgta

SEQ ID NO: 17281 - DNA, 2300 bp, Homo sapien
ttaccattcactcattcaactaatatttatgaagcacctgttgtatgccatgcattatttttaagtgcttgggatatattagtgacaaaaaccgagtaagatctctctcctcgtggggcttacattcttgcaggagagacagacaattatcaataagcatcataaataagtgcagactatgtttgaatgtgatctatgttaaacaagatggggaagggaagggatgggatggttggagtggggtgatgtgttgcacctgtaaactgggtagttaaggaagtcttcgatggcaaggtgacattttggtgaagatgtagaaaaggtaaaggttttagagggagggtgttcaggagggaaggagacagcaggtcaatggcgctctatgcggggaccatgcctggcctgttccatgaagagaagtaggcagatgtggctgtggtgaagaggggagagaagcaacaggttacaacagagagttacgggccagatcttagggggcttcgtgaaaggccagaagactttttctcagaaagcccttggaagatttggagagaagcatgacatggtgtggctaattttttttttttttttgagacagagtctccctctgtcacccaggctagaatgcaatggcgtgatctcagctcactgcaacctctgcctcccaggttcaagcaattctcctgcctcagcctccctagtagctgggactacaggagctcgctaccatgcctagctaattttttttttttttttgtatttttagtagagacagggtttcaccatgttggccaggctggtctcgaactcctgacctcaggtgatccacccacctcgacctcccaaagtgctggggttacaggcgtgagccaccacgcctggcctgtgtggctgatattttattcagcttgctctgactgctgggttgcccacagatgtgaggggcaggactgtcagaggagtcccatctcccggtgggaggtgatggttccacaggatggaagcaggaggtgaaagtggcagtcagattctgggtacagatgaaggcagggatgacagattagctagaggacctgaggaaggctatgagagacagaaggggagggtgactctgaagtttagggccgggggattggaaggacgggtttgccatccactgaggtggtaaaataggtgggtggagcagattttgaaaagaagaaaaagggtgtggtttggagtgtgttgtttgagatgtcaattagacaccctacctagcaaagctgtcaggggagtagggggctataccctttggttgtccattcattgaattcagcatatagttactgttggcccatgatatgcagggccaggactaggaaggaccaacagatttcgacttctcgtttgcaagctcagcctctaatcctccaggtggaggaccttctgggagagtctcctgggatagatgtgactgagtcacaatggcagtctgtatgcgcagagggatttttctcatcattttcacatacactttcatttaatcctttcccaaatcatggagagttggtaccaattattatccccagttcctgatgaaaacagaggaaggcttagaggttaggagagctaggcccaggacacactcatgcatggatggcgcatccggcttcagccccagtctgtcagccacgtgcccaccactttctcttctgcatggcatgagcctcaggaagagatgccccacctagcaagcatcaggagcccagattggcatctcccagctgggctgaaccttggagggcttataacatcactgagtcaccagaggctgttctaactccagagactttgggtaaacacagcagacattagcagaccatggtgtgttacaaaattgagaagcttccatgttttcctttccatcccaaataaacagtgaggatgttaatgagcccccaaaaggggaaatgaaaatcccttctccctgggattttccacagctctgtggcatgctcaggggaacgggctgtgtgttctgacctttcctccagagctttgtttactttcagagagctcaggaagggcctacagacactgcttggctcaggggacttggcagacgatagagaacgccacggatatttggcaggatgactccgaatgctccgagaaccacagcttcaagcaaaacgtgagtttgctcagctcagtgaggaggcatccagggtccaaaccaccctccttcgggacaccccagtggcctgctggctccaggggccacacaaagaggcttctccagcgcctctccccggggaagc

SEQ ID NO: 17282 - DNA, 2300 bp, Homo sapien
ccaatatgcaggtttcctgagaaatctctgaaactgtactgggcagagcggctgggagggatgagtctgccccttggtgcctgaacctctcggtccttccagagtgacatgaggtgggcctggcaggtggctttctcccagcagcagggacctaccttctgctgccactagcctgttagtaagtaggctaaaatccccactttacactttgagatgcaaggcgggcggatcacctgaggtcaggagtttacgagaccagcctgaccaatatggtgaaacctcgactctactaaaaataccaaaaaaaaattagctgggcgtggtggcagacacctgtagtcccagcttctcaggggactgagacaggagaattgcttgaaaccaggaggcggaggttgcagtgagccaagatcgtgcccagcctaagtgacagagggagactccgtctaaaaaaaaaccagtttacctgcctggagaccgtggggtttattcttcatcattctcaccccagggcaaaaagagacaactctccatccacggtggcaaggctggggttctgagtgtgtcccctcgagcactgcgctccgctaaggaaagtgcacgcccaccctcccttccttctgggtgacaagaatccaggtgtgcagcgtcctcactaggttgcttcctcgtgcttgatactccccgctgagctgcacagacgcgaagcctgcctttgcacagctccgtctctgaccactcagttatttatccattcactcagcaaacacgttttcttgcctgctcactccaagtccactgcagacggacaccctgcagcctgccatggacccacagatagattgtgtttggcccacaccatgttttgttttgtttttgtttttgtttttgttttgtttttttgagatggagtctcacacttgtcacccaggctggagtgcaatggtgcaatctcggctcactgcaacctctgcctcccgggttcaagcgattctccagcctcagcctcccaagtagctgggattacagtcacctgccaccatgcccggctaattttttgtatttttagtagagacagggtttcaccatgttggccaggctggtctcgaactcctaaccttgtaatctccccactcagtctcccaaagtgctgggattacagacgtgagccaccattaaaattttgaattaattgccaaagttgaaaagtgtggaaattgcaagaaaaattctgatttttggatttctcttgaataatttaaaaaaacccaaaaatctcaccatcccatgtgaccacgttctctggcagccccttcccgaggtgacacaggcctggctgccccctgctggtcccttcaggcagttcaccttcactccctgtgactgatggacaataacaaaacgagtgtttagcattagccatgtgccagtttctaagtgtgtcagacatattgactcacatcagcctcacaatgacagtgtggtagatgctatgatgcccatttattcaagaaagacttgctgggggcccaagcctatcaggttctggcaatggaaatgcatccgggaacaacacagacaaaatcccatccttcacggagctttcattccggtgaggggacatgcagcgtgccgatgatggtgggggttgtgctattatagatagagggtcagtataggcctggctgagcaggtgacatttaagcagagacatgactgcagtgaaggtttagaagagtgtcccaggtggaaagaggtgaagaaacaagcctggggccacacagctagttaagtagccaagctgggacttgaacccatgctggccccagagtctgtgctcctaaccattgcattctagggcttgatatgagatgccagccccgccccgagatgctcagagttagtgaggaagagaaacagggaacatggctgctgttagagggctggggctgggggtgccggaggccccagctctgagggttccaacctcctgtcctgttctagtatcgtcccgggaggccgagatgaattgcctgcctgccctgggctctttattttaatctcactagggttctgggagcacccccccccaccgctcccgccctccacaaagctcctgggcccctcctcccttcaaggattgcgaagaactggtcgcaaatcctcctaagccaccagcatctcggtcttcagctcacaccagccttgagcccagcctgcggccaggggaccacgcacgtcccacccacccagcgactccccagccgctgcccactcttcctcactcatggggaacagca

SEQ ID NO: 17283 - DNA, 2300 bp, Homo sapien
gctggagtgctggttcccctctctggggggctgcagtgggaacgcggtggtgatggtggtaatgtgtccatgacaggaagacagactcctgcagactgcagaatccatcccataggctactctttccccttcctgccatgtatttgcttggctagagtctgtacgtgaatgaacctatggagagagagacttctatccctgtctcttctccttggtgactggtacctcctgccatgtagcctccgtctgcctttctccctgtgcagttttgtcaagtgggaaggtatagggtgggccagctggatgagatgatgcactaaaaatgtctatggaagctgtagttggccataaagttgacgttggccaggagcccgttggggtcactagaggagttgccataagtagaggtacctcagtgaaaccacagtgtagatcagatccatgtatctctgagtgaggtccacagattctgcaaatcagaggtgctggcaccacctgggacctgctggatcaggcccagcagctgagagtgcagctgggactctattttggacactttttcctcagttgattctgatgcacctcaaagcttgaggaccagtgataaccatccatttgacagatggagaaattgaggctcaaagaagtcagattctctggccagggtctcaaggctagtaatcattttcttgtctgtgaaattaatgctctgtaaggttcatttttgctagacaccttaaggatatcagttttcctgagttgactttaattagcaacccaagtaagactgtatgggagtaagggtatgcgaccttagcaggggcatagtcaagctccctggtttgcctaatttgctgacgggtttctgaggcaaaggctcgccctcacctgcagatggtcatttggccaggtgtccagggtcgtgctggcctgaggggcggggtgccccccactccaagccggtggttccttcttgttgaagcccctccatcctttttctggcctttatctataaagtgacagccacttccttacattctaccaaggaagagtaaggccagactggccgcagtggctcatgcctataatcccagcactttgggaggccgagacaggtggatcgcctgaggtcaaaagttcgagaccagcctggccaacatggtgaaaccctgtctctactaaaaatacaaaaattagctgggcgtgctggcgggcacctgtaatcccagctactcaggaggctgaggcaggagaattgcttgaacctgggaggcagaggttgctgtgagccatgatcacgccactgcactccaacctgggtgacagaatgacactccatcttaaaaaaaaaaaaaaagaataaggtcatgcacaagtcctggggcacaagtgtgatggccacctgcggtgccttaggggtaagcctgcttcccaggttgctgtgtggctcaggataggagacatcccaggtcctgcttggggatctctggtattgagcccccaacataattgctaatagaacaacagagacccagaatcaaacattctttggagtcgtaggctcttaggacacgtgtagcattttgcactggcagtccttaattttctctgccagaacgatcccaggactttggcaaactgctgaggaccccaggctcagaggtacttgggactctggttttcttactggcggtggaagacatcaaaaggcaatataaagactgagtggaagctggaagtcggtttggctgagaaatccctcctggctcacggggttgggggagcggggagtcagggaggtgaccgagcagcgccccagtgcacattgtgtgtatttaggtttgacgttttggacccggggggtttcagaataaaatgtcgtgtgctgattcctcagtgccaggaggtggtggccttaactctcttctccccagtggattccgcggcttcaggcagcaagcggcacgcggaacgttcaccagcagagggcagcggaggggttaactccccaaatcacagactgagagaagaggaggggagacctggtttggagcagttctctcagagcctgtgcaggaggcttccttaattcgccttcagcccgagagctgggcgtgggaacagcgtggggtcagggagacccctgcttgccctggcccagaatatggtgacttaggattcagactgagcatccctgattccccagcgcctccaccctcagggaacctgaatggggggaaaaaatgtccaatatggagaacagctttgacgatgtttcttgcctctctccccagaacctg

SEQ ID NO: 17284 - DNA, 2300 bp, Homo sapien
tatctcactctgtcggctggagtgcagtggcacaatcatagcttactgcagtctctaactcctgggcccaagcagtcctcccccctcagcctctcaagtacctggagctacagatgcgtaccaccatgcacagctaaatttaaaaaaaagaaatgttaaggccgggcgcagtggctcacgcctgtaatcccagcactttaggaggccaaggtgggtggatcatgaggtcaagagatcgagaccatcctggccaacgcggtgaaaccccgtctctactaaaaagcagaacaaaacaaaacaaaatacaaaaattagctgggtgtggtggtgcatgcctgtaatcccagctacttgggaggctgaggcaagagaattgtttaaacctgagaggcggaggttgtagtgagccgagatcgtgccactgcactccagcctggcgacagagtgagactccgtcaaaaaacaaaacaaacaaacaaaaaacctttatttttggagagatggaggggcggtggggtctcactatgttgtccaggctctccttgaactcctggcctcaagcaaacctcctgagtagctgggattataggcacaagccacgatgcctagctcaagaacaggacttcctcacagttctggagactgggaagttccaagatcaaggtgtcggcaggttctgttgtctggtgaggactgttgtctgcctccaagatggcaccatgttgctgtgtctgccagataaaggaatagcgtgtcctcacatggtggaaggcagaaggacaagctagtgaataccgcgtgaagctgctttgataagagcctcaatcccactgaaggaggcgccctcatgggctgatcacctcttaaaggtcccacctcttaatcctaccatgttgccaacgcctgagttttggaggggacacattcaaaccatagcagagtccattcaatagatccattaagagctgggatttgttcacagatggggcacacacactttctctaactcccactcccattccctgtctgcttatttggtaaaatagcctcctcaaatatttctgaagcctagttcctactataattctcagttttcattcactcattcattcattcattcattcattcattcattcattgttctgggcactgtgctgagattaaagctgtgaaaagagggatagggacatggccctgtcttcccgaatcttatagtctgtttctttgttgatatggcagctctcccaacctcctccttccaggccaagtctctgaatctctgacctttagaagaaaatgaagactctgccggggtccagcctgtctcctgcataactactgggtgaagactgcagtcctcaggatgtgttgtgacgttgccaggggtcccctactattttctgtgcactgaaatttctgagtatggctagaaaggctgctggagttggggagcgcaatactttcacctgtgagacaggaaatgcgcccagtattcttagagacagactctggggctggtgatgtcactgttgcatgatttgtgtcttaacccagagctggaggagagtatccttctcgggtagctgttcccagctctgtgtaggagtctgcccacctaaacaggtgtccaccaggaaggcatgacgtgggagtgaattgccagtctccagccctgctgggtcttgatcttcctggtgggctctggcagccccattagtaattggttgactccctgaggagtgcagagctggcagtggggccactcctggctgctgagtccaggactactccgggactcaaccttcccaggcgtgcccagccatgccctggctgcttctgggtgtccagctgcctccgtggttggggaagagagaacttgctggagagtcctttgtggaggagccttcaagcagtgccaatcacggcactgggctcattagcaagcattgccatagcaacgggtctgccagaaagtggctcgttaggctgacaacttcagagctgttatatatagatctgggtgtggggggagtgggggtgtggggccctgtggatatgcttttctttagagctcctattgcttctgggtttggggtgtgagaggatgcagagtgggagaccttaaaaccgtctgatctggctgctaaagcgagtgtctgacgaccacccattaacaccagcgagtagcgtttgctcacggctttaggataaggtaagagtcaggtgttctcagaaacctccggagggggagagagtcccggaggtggaggtggcatccgggttgaacttgagcttgaagc

SEQ ID NO: 17285 - DNA, 2300 bp, Homo sapien
cgcacctgtagtcccagctacttgggaggctgaagcaggagaatcgcttgaacccaggaggcggagcttgcagtgagccgagattgcgccactgcactccagcttgggtgacagagcaagacttcgtctcaaaaaaaaaaaaaaaaaaaaaattccttccttcttaaggctgagtaatattctattgtgtttattttactacgacttgcattgtttccaccttctggctcttgtgaataatgttgccatgaacaggcagcaagaccctcccttcaggactctgctttcagttctttttggtatatacctattaatggaattgctggaccatatggcaattctttgtttaatttttttgaagaattaacacactattttccacaggggctgtactattttacattcccaccagaagggcacaagggttccaacagttctcaatccttactagtacctgttcttttctgttttgttgatatttgtttatttgtttgttttgagacagagccttgctccgttgcccaggctggagtgagagtggtgtgatcctagctcactgcaccctccgcctcctggattctcctgcctcagcctcccaagtagctgggactacaggtatacaccaccacgactggctaatttttgtatttttagtagagacggggtatcaccacgttggccgggttggtcttgaactcctggcctcaagtgatccacccgtcttggcctcccacagtgctgggattacaggcatgagccattgtgcctggccttgtctggttttttttttttaagaacctgtcctaatgggtgtgagctaatatctcactgtagttttgatttgcatttccctcatgattagtgatattgagcatctttaaatgtgcttattggtcatttttatatcttctttggaggaatatcttttgctcatttttttaaattgggctgtttgctttttattgttcagtctggactctttttggacccggggtaactgcagtgcctacctttcagccactggtgatagtaacaacaaaaatcctagctttcattgagcatttacttcgtccactaggtgaaatgtttacatggatgccccacccccaccccctttaatctctcacagcaatcttttgagaaagatactgtgatcatctgcattttacacttggagaaattgaagctggagccgttgcccagggtcttggagctagtatgtagtaaaacaacagcttagctctggtctgactccatccttagacgattgtacttattttcttcccccgacccaaggagctggcattgaaacctcttcataaataagtttatccatttgcttaatagggaaccactcggtcctcaggatcttggtttctctagaaaaccatatttaattctatataaagaatcagttcctaaaaccccaaaggtttgcatctgaaagcaaacacagaaatatgcggcattttgagtgctaaatagtcagctgctccaaaaacctttctaaacggagtgataggatatattcatgaaggatccaagccctgcccaagctcatttagttggtggctgcagtattgctcttggggtccaatcctttctccacttgtaactaatgactttgtgatcctcaggcccctttcagtggagacctcacatgagcctgtctttgttcgttatctgtccaggtttgatggtggcgagggcagagtgaaggcaagagaccttcatctcgcccctctggaggcaccagctttccacacagtggttctttgggggaacattctccgttctttttatgttggtttttatctggccttgggttcacacagctggggccggggccggggccaggaccagagctgtgacttagggttgggaggaagttggccaaaacattctccagcagggcttgggcaggcccaggaagtcccgcctaaaacacagtggacaaagctgcccttgtccacaggcctgggggtgggaggcatctgctcagtgacacaagcttggccattgtttgttgtgacctcagccaacgttttttagctgagaaaggggaaaaagagggagagtgggaaaaaaagaaaggcctccagaaacattgcatctggaaagtccagaacaagttgttaatttcccagcaagcactggagcggatttggaaggaactatgcaatgtagtgggttctttgtgaaagaacagcaatgagcaaagccacaggaacctccgctggggtgcccagaacactggccctgggctagcgacttgcctcagccccatttcccggagaggc

SEQ ID NO: 17286 - DNA, 2300 bp, Homo sapien
gaatgaagcctcagaacagcctgctggaagtcacatattttcctgatacaaggaattgtatctcttttaaaacttcattgggccagctatttttaatgactgtttttgatatgaagttatgcagctccgctttaagggactcttagtggtgactgtggtcaagagtttgtttctttatatttccggccaagcgaatgttcaagactttgcaattgatggactattacaaataatctgcttgtgtcactttgcccatggccagagaacagatggaggctgctcaggtgagatggcttagctgcagactagggctcagtagtgactcttaaaacctgggcatgagtatttttaaaaagttgcataatgactgtaatgtgcagccaggattgagaaccattgaactaggtgaaaggctctgtgccagggtctgattcaaagcatagacaggtgcgcaagatcttcaggctcttggagcccggcctgactggttttgtaatggatatctaggcagtcatagtaagaggtgaagctagaggaggcgttgtggagggcctgaaatgtacaggcagagaagtttgtaccaaatttaaaaggcaatagggagccacagaaggtgactgggggaggggggaaggagtagacagaggtatacaggcgtattaaagggtccagctttttttttttttgagacggagtttcacccttgttacccaggctggaatgcagtggtatgatctccgcccactgcaacttccacctcccgggttcaagccattctcctgcctcagcctcctgagtagctgggattacaggcacccgccaccacgcccggctaatttttgtatttttagtggagatggggtttcaccttgttggccaggctggtcttgaactcctgacctcaagtgagccattcgcctcagcctcccaaagtgctgggattacaggcgtgagccaccgcgcctggccgagtccagctatttacaggctaaaaaatgtactttattttatttctttaaaattttttatggagtagactagcaaagaaaccaagctttcttttacttctgtacggtcagttcaaggtcaacattctgcagcactcaggttcactggtccctggagagcagggactggcccaaatgatgtttgtagtacctggcacatcgcatggaacatggcagcctcctggtaatgtttgttgactgactacatgagtgtagactctttagccaacccatctcgatttcgggagggctggtaccctgggccggccttccctctgcaagtaaaagcattggtgctgttcctctcaccgttcgcctttcctccatttatccccatcgactgtttccaattctatcaactccgaccccgtcttctctccattccgtccctccagcgtgccacgctgccaccaggctgctgggctcaggcgccaggcttcaaacctgtctttcacccattgttcagtttccggtgagacaagttcaaccccaggttcaaccactacaatgacaaccacaaacgatccctcgcagacacctcgaagaagccgcccgcacgccacgggccgccaggcctacaaagcaggcacagaacagaggggcgtttccattcccgcggtccccggcggtgggggcgcgagtgggagcccctctccccagtgacaggcccctctgcgagggagcgcgcagccctccgcgggcgtggccgccctggccccgccccggcccgccccctcgccagtgagctaacccccgcccggccacccggccgccagctcctctccacggccgcccgccgcggagtcctgccgcgggggatgctccgggtcccacctcccgggggagctgcgcatttccgcgcgccagggcggccccggccccggtcccggccccggccccggccagccctcgcggcggcagcccgcgttccgcgttcccgggaagttgtctccggagcccgcggcgcctgggtctcctccccctgagccccgccccccagcccagagctaggatccgcgagctgcccggcccgggggcgtcgccgctcgctctgcgaagccaacgagtctctgcttcccggcgcggagcgcgcgtcccccgcctgcctgaggacccccgcgcaccccagagacggcgcgcgcccagagcgcgggagcccggagcgccgggcgcctgggaccccgcggagccgctgcccagcccgtggggctcggcgggaatgcaggctgcgctgtgaacccgggcgccaaggccatgtccggcgctcgctgccggaccctgtaccccttctcc

SEQ ID NO: 17287 - DNA, 2300 bp, Homo sapien
aaaaaaaaagtattcatatttctttactgaagggcttctcacatcccttaatatgctaatatttatgatgaatctctaacaggagggaatagagtttaacacatttcttaagctcatttaaccacaggaccatttatttcgaagcgaccctcccaatctgcattctgtcaaatctactttagaaaatactttgtggaagccaggctcatgcctgtaatcccagcactttgggaggccaaggcaggcggatcacctgaggtcgggagttcgagaccagcctgaccaacatggtgaaaccccgtctctattaaaaatacaaaattagctgggcctggtggcacatgcctgtaatcccagctactcgggaggctgaggcaggaaaatcgcttgaacccacaaggcggaggttgtggtgggcggaggtcgcgccattgcaatccagcctgggcaacaagagcaaaactctgtctcaaaaaaaaaaaagaaagaaagagaaagaaagagagagaaagaaagaaaggaacgaaagaaggaaggaaggaaggagggagggagggagggaaggaaggaaggaaggaaggaaggaaggaaggaaggaaggaaggaaggaagagaaaatactttgtggaagtcctatctctacctgctcctcctctggtctaaaattcactttgattaatgcaaactatcttttggaaatgccctacctacatgaaattctacccactggagactgattaaggaaactttgattcaacaaacactgattatatacaatttaaacagatcacactgtattgcagtaaatggctctaacttctacatatacagttgttcctacatagtcaaacatcacttatattttagcaaaaaataaaaaaactcctaagtaactataattgtcacaaagtccacgtattttcattagaacccactagagctgcactcagaacttatttactcttactttagcctgatcttaattttgtaatctctttcccaatcaataatacaaaatcaggctagtaaagacaaacttaccacagaaagaaattatacctgagaggctggccatgaaggcaaagacagaaaatctaaaaagtaaggccaagtgtggtggctcacacttgtaatcccagcattttgggaggccgaggcgggaggatcacttgaggtcaggagttcgaaaccaccctggccaacatggtgaaaccctgtctctactaaaaatataaaaattagctgggcgattatagcacatgcctatatataacacatgggattatagcacatgcctataatcccaactacttgggaggctgagacaagagaattgcttgaacctgggaaatggagtttgcagcgaaccaagatcacgccactgcactccagcctagaggagagagcaagactctgtttcgataataataataataataaataaaagtatacaccaaaattcacagcaggaacaattagtgcaggcatgatccactaagaaccagatccttgatgactttattatatcatctcccagacccccagagtgatcaagaaaaacttaaattctattcaagatagtaggttacacagagcaggataatgtaaaatacattttggaaagcttttcttccagtagatttttaaacaaacaaatacataaataagactggatgtgttaaaaggtcaaccttaaatttccagagatttctgagatgagaagcacaccatcccataccaatgctgggtaaatgaggtgtagttactgtccacactactgatcacccattgcttgacaaagcatcctgtggttctgcccttcagtgaccttcttagcacactctgctccagttccactcagcccctaggactctctaagtctcaaagatctgtgtccaacgtcaaaatccctatgcagctgacttggcattatgcagcctccactggtcatttatccaagtaacttaacaagagtgagagatcagggctacgacgcatttacatctaacaagtaaatggtgctcccccaaatatagccaagttagagtgctgggctggcagatttgggagtataaagagagctggggggtcacactcctgaaattgctgtgaccgcagcatctctaggtaagtgctcacaagtgctcacttttttgctccacgtagctatagttgcacctgatcaggttaccagtcaaggggggaagacaataaagtagcctttacggagggcctactaagtgcaaggtcttgtgttgagggcaaggttggagacaagatggaaagacaagacaactgcc

SEQ ID NO: 17288 - DNA, 2300 bp, Homo sapien
taaaaaagcttgttggatgcagtaaaagtatgtacttatatcattaaaatctgcatgataatgcagtcactaagaatggaccttgacaatcagaatgctgggtcacaaattctgacttcactatttaagctacttgaatttgggcaagttacttaatctttgtcagcctcagttttctcacctgtagaatgggaatgttaacagtaactcaggaggttcttgtggcaattaagtgaattaatgaatgcatggcaggttactatttggatgtgacatgatagtttgggaaaggggagagtggttgaggctatgtcaacagagaaccttgtgattttgaaaaacatgagctttcttcggtgaacgcaccaaccactgacagtggcagagggctttgggagccaagtcaatgtctccaatgttgttcatgtctttgatgctgctgtctggtgaggcccaccagctgccaaagcctgtccactgtctttttagtcctctcattctacccagtatatgtagccaattttctgtgtagattcattcctccccacatagcagtaaaacaaaacagggaagataggagcctggatatctgaaagtaggtgaccaaccatgccaatttgtttggggctaagggagttcttgaaactttccattttaaaaccaggactgtcttgggcaagtggtggtaaattcatcactatacctgataggttgttggagggtatcatggcaaagtcctcaaaatatctacctaaattttggtttaaatcttttcacattttttccatgtttttatgtattcttttttgtttgtttgtttgagacggagtctcactctgtcactatgctggagtgcaatggcacgatctcggctcactgcaacctcctgacaagacaagcctgaccaagacaaggatagatggaatcagtttgagatcttctagaatgatccaagctacaatgatgatgaaattcccacctggaactgttaattgcaaaactgtaatacatacatagggcttagcagagagctagcaacatggtaaacatgcattcattcattcaacattcgttgaaaccttaccatatgctgggaggattttaagtactggagaacaaaatagataaagtcacaaacagatatatcaattaaagataaatgctctgaaggaaagaaaagcaggataaggaaacagtggctgtgtggggaagtttctctgaagaggtgatatttgagcagacacctagtgaagtgaatgagtaagccatgaaaatatcaaagggcgacagtatttcaggcagaggaaacaaatgcaaacgctctgggagatggtgggccagtggggcagagtgaaccagtagtagggaatgtagtggcagaggtaggcaagagccagatggtttagagccttggaaattaaggtaaggacttcgggtttcaaatgtcagctgttgttataaaggctgtttttttcctcctttttctgtgttgagtgttggatctgttaactgctctttttctactcaatattggttcattctgtccaacaaaatttattgaatgtctgctcttcattcaacagaaggctaatgaagacattttttcgggaactgaagagaaagtttgttttctcaacaactatgatctagttgtgggggggagggagtgggtcaaagtgctgataatgcgtcaaaagacggcagcagtgcgccgagcgcggtggctcacgcctgtaatccagcagtttgggaggccgaggcggcggatcacctgaggtcgagagttcgagaccagccgaccaacatggagaaacgccaagtctctactaaaaatacaaaaattagccgggcgtggtggcgcatgcttgtaatcgcggaggttgcggtgagtcgagatcgagccattgcaccccagcccgggcaataagagcgaaactgtctcaaaaaaaaaaaaaaaaaaaaaaagacagccacagtgtgctttgaaggagacaccctggcactacaggagagaaacgatgttttcaattgtccagagaggaggggagtcacttccggtgcgtcccagggcatcatgggaagggtcagtctgtgggaaggaaaggccagaagtgactcctgccgtagctgcggcaggcctggaggccgtactgggacctggccagtaagtgtgcatttaagagtttgcgagtgagcaggaccttgttcgtccccgcgatttatttgtgctgtgtaattccagacagtagatccgtgaaggactgtgtggtggggagggtatgaaattgagtgtggagagg

SEQ ID NO: 17289 - DNA, 2300 bp, Homo sapien
cacacagctggattacaaatctcactattttttaagcatcagattgaaaatacaggattacacatctcactatttcataagcattagcttgaaaatacagaagaatatatgtatgactctgagttcttgagttagagaaagtttttcttatacaatacacacaaaaaaccaaaaatataaaagaaaattttttataactctgactacctaaagatgtaaaacttctagaagattgagatcgcatagtaaagatcattattaaatcaggagaaactttttagaacttgtataaacaaaattattacaatcttaaacctacggaattttacacagaaatttaaaaatgagtaatatcaaaataatccagtgatagagggaatggtgagaatatataagaaacaagactgaccatgaactgataattatcagtgctggatgatgaatatactaggttcattatgctatcccctctacttttgcatatgtttgaaatgttttcatattattatttatgtactaacatggcaaatgatccaagagtgtagaatgaaaaaagaaagtttgtaaataaataatcatactatctatattttaaacatctatattatatattataaattttctatggcccaatttccttagaccagttttactaatttatattttcccagaaaatacatatgtaaatgtacagaaaaggtctgcaatattacaaactaaacgggtatccgtagttaccttgggagaaaagggagataccagcattgtgagtgttcatcaaagggaaaatttagcctaatctctaaggctttaatttttatgtaattacagtgtaagaggttacacacctgcatatatttatcaaacccataggcctggaattgttctgcatcctatctgtggtggtggctacatgaatcaatacgtgtataaaaactcatacaatcatacaacaaaagaagtaaattttattataaagtttaaaaatttttaaaaataaaagcaaaaaacctcataaaactgtcactttaaaagggtgaatttgactctatgtaaattatacctcaatatatctgaccttaaaaaaaggaaagagtttaattaaaaaaaatcataatttatttaaagaatagggtataaattacattagtgatatgatatattaattattaaagcatattacaaggcacacatgtactatatatgcatctataatatgatcccacttatacgcctctatcttatttctgcattagagattacagagactttttttacttacctgtatttttttctgtaataaacatattattttctactaataatgtttttcaaagttagatgagtgggcactggcccaatggtggagactcaaggtagaatctctgctgtctaagcctggacttcaagagtgagcatctgtagtggcccaagggaatgcagtggggggttcccgtggtagcaaataaggaaacgtgcttaaggccctgacagccgtgtgccccgggtatctgatcatttggctaccacaggcgtgcatgaaagagtttgccaaattgaatatagctcttaagaacttactctgaggccccatcaggcactgtcaaagattcccttcccagcacactagaaagcattctctgctggcagatcggtctctgtcaaattatttataggagattggtttgcatacacaaaatgatatgaatacttctaattatatccaaacatgacaaatgtcactacaaactatgctgagggttcatgttgccaaatgtcttgccctaacaaagaggaggtagttgcagcatcagcacattagttcctatataagcaggactgccccttgtgccttatttccaccaagaacccagaggtaagtgatgaaggccttggaactcgaaaaaccccaggtggggaaaagagctgacctcgtagttatctgtgagcattaaactgctctctcaatcttaacttttgtcttcatagaaccaagctttggggtagggaaacttcaattctgtaactataataacaattctgtaactataatattggaatttcggagcatcactaataagaagcttgttgttttacagagtggaacacttctgaacctgcatttttatctggaactccagaggtaagacttggctttattaatttattgatgacagaggggatatagtctaatgaagctgtgaacaatcctgaattatacaccatttccatgtttttgcagttatatcaggaaagagtgtttccgagtgagtgtttataaatgctagaaaataactttt

SEQ ID NO: 17290 - DNA, 2300 bp, Homo sapien
ctagtgaagaaatgtttgcttcagctgcccctggtgacactatcctaagcagtttacatacgtgcatgtatgaattacataagattgcatataataaagtatacataatctcccatatgtgatataataatataatttctgatacctatatatataaaatctaatttaattcatacaaccccgtaaggtgaaggcagtatttgattttcaccacatttatgtttttaatagataaggaaatgcaaggttatagaagcctataatatttcctaatctgaggaaagtagagagcgagcagcttttacacagactgcttaaagacagtttccaaaataattctccttatttagattggagccattcttcccactcatatctaatcacaaagaaccatacaaatacaaaagccttcgcattaatctcctgtgttttctatgtagacaatcctttaagaggcaagtctaagggaaatgtgtactccctcacccagtgctgcttctcttctctccttgtccaagctctgcaaggttctctgatccactcctggtggcccataataggggtcccactagaatattatggtcttgtttcagagctttcaaaatctgagtgatcagtctatctgtaattgatcagagttttaactattatgtaaagagtcctcactatctgtaatcctataactcatctatgtatcttggtctcattcatattttcttctttcatctttcaacttcaaatacagtaaatataatacatacttattatgtctgcaagtcagatgttaagttccaaaagaagtaaaaataaatgagttgtgaaaatctgagagaaaaaatagaacaagtttccttctggcctagagcctagcactttgggtaagtcgctagacttcggtgagttattttcatggagattttgtttttaacgcctgatgacctatttcatagaattttatcaaaataaatttttaaagtataaaagattcaatctatcaatgtgtcaaagataaattctaagtcaacagaattataaaaacagtgatctcattaattggtaatttaagccagctaatgatagttgaaaatatctcaccagagctcagttagggtcacacttagagtaggtatatttcctgccatattcagtaacagctgtgtatgtagcaaaaccatcaaaagccaatttatgagtattatgggcatatgtgatggcccatccatcttttcaatccacagggagaatatcgtggataccatgactttcctcccaccttaaataaaaatatgtggttcccacctcattagagctatagctagtcatgagagtctgcccatgaactaggaatgcatgtttgtgtctccttccattatgcagaggaaacatgcatggaacatcacacagcatcctgttgttccttcagtgaaaacatacaagctggagatatccatggaaagtcctccagaaaaagaacagaagtgtttatatctattctaaatcccttatgcctcccccagtggtccatcaccactgcctaatctgagaattcactttcaccttcatatttagactttcagactttaaaagaatctatcgccagtctttctaaaatccagactgtggctaggaatgttgtcttaaaatccatcgctcactgcttccaatcatagtgtcaggtctaaaattcattccagactccttaatggctctaagaaccaacaaattaattaatcctaaattcctcacatcagactcattctgttggaccaattttataggcagaggagtaagtgggaatctggctttgaattctgtgatgaatgatgcaacagccaaactggagaaacagtgttagaagccctgaatccccatcccctatcaaatgcctataaagaaccctagatcatcctctgttaaattatttatgggtgtcaagaaatatttctaattatatccattcacagccacagtcagtgaatattgtgcaaagagattgccaaaaacggttttgccaagtaggttcccagctaggacagctgaggtggctgctgtgtttgcagaatggtctctataaaagtggagctgagatgcctctttcccatccttcctcaaaattcttgaaggtatgtatatgtggaagaacacttacttttacattcctgatgatgatgatttttcatttaagggatgtctactgcttcccaaattttaattattctttccaacattcttaaggacgacattgtagacaatatagttactagtattttgtgattaaatggggaaaaaaaagcatccca

SEQ ID NO: 17291 - DNA, 2300 bp, Homo sapien
gagattgattcatatacttaacccaatatgagaggaaatatttctaattatatccaaacatctttaatatgaggggaattaggcttggagaccttcaatgccaaaaacatgttttgccaaatatgttttaagaaagaggaggaggttacgtgttttccatatttgagcctataaaagtacccttggaatgagtatgacttgtctctcctcataaagcttcaaggtaagtgtgtgtgaggacagggctctgtctggaggacggtaagggatgtctggctgcccgcgtgcatgccacacatcctggctcccactgtccctggcagccctgccagtgaagcaccagcttactccgtagcaattttaattagatgttgtagtcttcccagtcatttcctggttctcagttaagaattgttctataatcgggaattgttataatttaatcagaagaggtttgctctttttcttacagttctgatccactttaaggtcgcatctctacggtaagattctgatttttttttttctcattcctcacagagtgcaaggaatcttctgcagtggtttggacagtggtgaggggcggggtgagggaagtgataaaaaaaatcatttccatttcatggttgatcacgcttctcttaaaaaatggagaatgactttagaaactggttctccttaactcatatccctcgcaatatatgaaaatgctttctcagagtccttgggaattttattcacaatagtgaatttcattcactatttccagcattgtagtttatcttttaaatgactgcattacaatatgcaatgtaacatttcaaagtgttactcaattatagagaaaatttaaattttctataccatggcttttcctcagcactataaatataaaaacctatgagagatgatgtctaattggataaatagaatggtctgaatctttgccttggaaaaagttgcttaactgcatgttgtttcacaatctataaaataaaaattaacgaatatatacacacacacacacacatatgtatatatacacacacacaatacgaaacatgattgtcagcatattcagcaagatgaagcattttaattatgttatctgagtcaacatagtttcaatgggagaaatgtatccaaatgagcttccctggaaaaggtatctttattattataaagtagaatatacatgaagattattgacagcattaatgaatgctagctaatgtggcaagagggggatcctgaaaagaacaagttttgtgaaattgttataaaaatgttaataatagagcaagaaaacataggtaataacgttttataataaatatttaagaaatgctaaagatcagtgaagaagttgagtttgtcaaaattattatacagagacaacagaaattgatggataacagaacattttttaacaatgcaaaacaaagagccacacatttctgctttcctgtatattaggaagtcttcgtaactcccaagtttataatgaaaatatttctgtcatgtacagaatagttcctaaaattatagcaacatattcctattgttcttttaattcaccaagccagctttgagcctttctctgtgtccagcatttgttctaagaggtgtgaaggataccataaaaagaagagtgctccctgcctgcaaggtgcttataatccagttgggaagataaaaactataagtgaaagaactggagactatcctgccaccattatagctttatgttctctataagccaatgataggcagcttataaagattaatatacctaacaaatgaaacagagaaagcagctaagagactgcaataggtgagccagaaacaacagtctctttccaaatgcatgattaagtgtctgtcagcactggcacagaacaaggagactgacattttatcctcaaccaagccagggaggtggtcatacccaatgcaatgctaagcactcaattggtcagtaaatttttttttaaagttttaaatgtgaatctaatggtccagtttcttaatttctacaatttcttttcttcctctcccagccagggtccttaactgggctaccatcaataacctgcagccatgagttccgactctgagatggccatttttggggaggctgctcctttcctccgaaagtctgaaagggagcgaattgaagcccagaacaagccttttgatgccaagacatcagtctttgtggtggaccctaaggagtcctttgtgaaagcaacagtgcagagcagggaaggggggaaggtgacagctaagaccgaagctgg

SEQ ID NO: 17292 - DNA, 2300 bp, Homo sapien
gacgttttcctagaggatcaagatttttaaactggatgcagctgagatgcatagccaaaaatataaccttcctcgacagaataaaggaagagctaaatggtaacttcccatcaaatagaaagcaagagtatcttggtctaaatggcactgtgtgaaaatgatgtaaattagacatggtagtttaacaggtaagttggattcacactgtcgcactggccttagaaagggtgtggaattgctcttctcgctgcataagcccctctttcactttgttcctgtatcacgtggaattgcttaagtgctttataacgtggcagtaataaacaaaaacaatatcttacttcctacttattgaaaagtttatccagagcaagacaaaaggttgtctgaagattcccatcagatcctattgagagcattattaaaatgttttatcttcctgaaaatcattacccacattttgcaggtgcctagtaaagaaacagacatgtaagaaagtaaaattaggtacctgtggtaacaaagcaggctaatagatggctaggaaaggccctctcagacgcacatccctgcaatacccttcctgatggctttaatctaccccaggtagaagagtgtcacaagtgagtacgctggaccgcaagtcagatgaccagagtctaaactgctgtgtgatttgtggagattctcttctattttttggatctcagttgctttattagtaaaatgagaaagatgaattagatgatcccttatggtaataaaactatgtgacctttacaactagtatatccagatatctcctttcataaggcaagctatagccattaaatcaattgagatataagtacaataatacagatgtgggtgcaaaaccaggtatattaagcaaatgttgtcccagtcctagccagacaatgctgacagacagagacgtgaggccacaaagacagtaaaataaacttttttaaaaaattaaaatagaaaacaatattcaggtattgtttgtaagcaaaatactaaatatatcccatggactgctgatagaggaaaaatcatcgatgctgcatatttagacagagaaataccctgtttccaatattttcttatgttgagtttcatagaggaaacaagatttcacaagcaacttgggcaccaaaaaaaaatgagagaagcaggacatctctgtttggaaggcaatgcaatttcggagcaagtccgaagtgccggtggaatgatttgacaatgaataagaggcgactgattgaaggaaacaaaagaagctatctttggctgctcttcatgaagcaagtttcaaaattaaatttccaagcaactttgaaaaagcacaataaattgcaaaaaaaaaaaaaaaaaaaaaaaggaaatctttttgagagaaagcaacgtttttataaccctctgctaaagagcagaagttttcctcccgagtacactatctgtaactgcgcaggcagttgaaaagacttcacacaggcgactctgtgaaacagaagagcagtaggcaacaaagtccagggattccagaacttagctgtctttgaaacaacaccttacattccaaaggccaacaactttaagattgccaacgactcaaattatttataggagattgattcatatacttaacccaatatgagaggaaatatttctaattatatccaaacatctttaatatgaggggaattaggcttggagaccttcaatgccaaaaacatgttttgccaaatatgttttaagaaagaggaggaggttacgtgttttccatatttgagcctataaaagtacccttggaatgagtatgacttgtctctcctcataaagcttcaaggtaagtgtgtgtgaggacagggctctgtctggaggacggtaagggatgtctggctgcccgcgtgcatgccacacatcctggctcccactgtccctggcagccctgccagtgaagcaccagcttactccgtagcaattttaattagatgttgtagtcttcccagtcatttcctggttctcagttaagaattgttctataatcgggaattgttataatttaatcagaagaggtttgctctttttcttacagttctgatccactttaaggtcgcatctctacggtaagattctgatttttttttttctcattcctcacagagtgcaaggaatcttctgcagtggtttggacagtggtgaggggcggggtgagggaagtgataaaaaaaatcatttccatttcatggttgatcacgcttctcttaaaaaatggagaatgactttagaaactg

SEQ ID NO: 17293 - DNA, 2300 bp, Homo sapien
ttttgaaacttgcttcatgaagagcagccaaagatagcttcttttgtttccttcaatcagtcgcctcttattcattgtcaaatcattccaccggcacttcggacttgctccgaaattgcattgccttccaaacagagatgtcctgcttctctcatttttttttggtgcccaagttgcttgtgaaatcttgtttcctctatgaaactcaacataagaaaatattggaaacagggtatttctctgtctaaatatgcagcatcgatgatttttcctctatcagcagtccatgggatatatttagtattttgcttacaaacaatacctgaatattgttttctattttaattttttaaaaaagtttattttactgtctttgtggcctcacgtctctgtctgtcagcattgtctggctaggactgggacaacatttgcttaatatacctggttttgcacccacatctgtattattgtacttatatctcaattgatttaatggctatagcttgccttatgaaaggagatatctggatatactagttgtaaaggtcacatagttttattaccataagggatcatctaattcatctttctcattttactaataaagcaactgagatccaaaaaatagaagagaatctccacaaatcacacagcagtttagactctggtcatctgacttgcggtccagcgtactcacttgtgacactcttctacctggggtagattaaagccatcaggaagggtattgcagggatgtgcgtctgagagggcctttcctagccatctattagcctgctttgttaccacaggtacctaattttactttcttacatgtctgtttctttactaggcacctgcaaaatgtgggtaatgattttcaggaagataaaacattttaataatgctctcaataggatctgatgggaatcttcagacaaccttttgtcttgctctggataaacttttcaataagtaggaagtaagatattgtttttgtttattactgccacgttataaagcacttaagcaattccacgtgatacaggaacaaagtgaaagaggggcttatgcagcgagaagagcaattccacaccctttctaaggccagtgcgacagtgtgaatccaacttacctgttaaactaccatgtctaatttacatcattttcacacagtgccatttagaccaagatactcttgctttctatttgatgggaagttaccatttagctcttcctttattctgtcgaggaaggttatatttttggctatgcatctcagctgcatccagtttaaaaatcttgatcctctaggaaaacgtctctgagtggtccagattgctatgatatctactttttgtaccaaactcatacccatcattatgtgtgttgaatatagatttgaataacctactttgagatcatattttcttgacacttttagtcatttattttggctctttatatgattatctgggagaccataaagattggaaacataagctaatagctcatggatactacattataacgtaaaaataatattctctatgtctccagatttgatagacaccctgtagttttcatagggagaagagtcatatttaatttaattttgaaacttgcttcgtgaagaacaaggtcgtgtcaaacccattacccagtgcacctactgtgggcatatggtacattggaattgataatgtaaatatccatgggctaattaagaatattttgtatttatattcttgataacagttattcaacaaagagaattaatgatacaattcagtttgaatcccctatgtgagaatatagctagtactatcctgaaaaaggttcatgttaggggaagcaggagctttctaagattttactgtactcagatatcaggaaaggttagaaagaaataaaatagacttccaaatttctgttcattagaacagtctttctggataagtgacatctttacagccttaaagtgttgccgtagacccccaaaaaagtcaccaattgaatgtgattgtttgacaactctggtgactattcaaactttgacatggcttcaggaaagagaaaagacaagaccagtctaaggatattgtttgcaaactaccctatgctttatttcctttgcaacagggtagaatacacaataattacagagggaaatgaccaaagatgtcacattttgtgcctgtcttcagtcattccatggcatcaggacatgatcactcttcacttatgacttttgtgtgaacctcccggctcttcacccgcagtttgttcacctgggactcagc

SEQ ID NO: 17294 - DNA, 2300 bp, Homo sapien
gcctgtagtcccacctacttgggaggctgaggcaggagaattgcttgaacccgggaggcggaggttgcagtgagccgggatcatgccactgcattccagcctgggtgacagagtgagactccatctcaaaaaaaaaaaaaaaagtgaagatcattttgtaaataacataaaataagaactatttaataaaacataaggaaaatgcccattggcagcagagatggaacaagagaatattaaactattgctgtgggcactaaaaatggctgtttagtttggaaaaacagctcaacagctcaccttaaaacagagcttcccaaccagtgtatcttggcatcaaaaaggtaactgatgtgccataaaatgttgatctcttcagtctcagaatggctggatggggagggggaccttgggaggtggctcctagctgggagaaggctgactaagggttcctcagagtgttgactgggctgcattcgagtctgacagcataacctatgattcctacaggaggcaagcacaatggtggtatttgccatgtgctggatggaaccaagaaggacttcagcagccagctgagaatgtaatgctgtcttctgcagtcaagagacccctggaattgctgggagggttggtgttccaggatgcctgggacaaggcatgcagcccagagagcatccagccagagtaaaggtgccagaaggctaagtaggttgtactggaagaggtagcccacagtaatagctccaaaccttagactttgaatagatcaggtacttgtgtgtatttgtgactggtgtgccctttgaccaatgctgatgactcctttaacccatgaagtttttgaagattagagcttcattatcctttgaaatatttgatatgaaagagagagtttaaatggattaaaaacttattttcactgtacgagaatattcaacattatatttttcaatgaaggagaaagaagaactggtgaatttttaaaatactccaacagttgtaaattacttggttttccattttcatccctccttcttggacaaaaatccccgctatggtaattatcaagaacacagatactgtttgtatcatttttgaaaatttgatctggaaatttgtgtcatatttcaagaataaagtcagaaacaaacaagttttatttgtaggatatagctcaaatttttccttaggattttcaagaagatattatttgtaagtttccgacatattcagtatttaatattttccttaatgctatgtgtatcatagttattatatttatattacataaaggaatgtaaaaaaattaaaaatattctccccaagccctttacagatatagacaaatcccttccacattactctagcatgctacactaatattgtcatttttttctcagcgggctatgacacgaaaaaatgttgaaaagtactctctaaaaacacctctgctactagaaaatattcaaccttttttatttcaggcaagtcaaatgggtagggggacaggaaatggtgtgctaagtagagggaacaactttggcaaaagcaaaaaggtgagcgagcaaggaaattcctgaaactacaggaatattggaataacagagaggaccttctgtctctttaagttgttgaaggcacatcgcttaattttgcagggctggaaagaaaggaccaacaggtaaaaattaactgtcacaaaattaaaatacatatttgtattttatttatgtgacttaacacgtgaaatatgcgaaagtgatgcgaggcaagcccgaatgctgtgcccagcaaagccaaaaagaagttccgagggaagccaggtatcctggctgcccagccactgcctttatccaccagcttgactctttcagatcatcttctcaaattatccataggagatttatccacatactcaataagaaaaatatttctaattatatccaaccattcttaatatgaatgagaattatgcggggacgctagattgccaagaggtattttgccaaacaattccttttgacttaagaaagaagaggcagctgcattgtttccatagctatccatataaaagagcccttggaatgaggctgactcgtcctgctttaaaaagctccaaggtaagtgggagcaggacgggcctttcaagagggacactggtcacaccgcccagtgtcagcagcagctgctagttctggtactgctccttctggaactgcacgttttacctctatgaattttgttacttctgtttacaatagcaagccatgccataaatgggattttttccccctctt

SEQ ID NO: 17295 - DNA, 2300 bp, Homo sapien
acgagaatgggcaaaagcgtccgacatactttactcttctcttgaggctttatttttccactcctgatttagagatgaccacatttgttagacagcccccccttgtccgccctttctctgcaggccaccaccgttccccctaccccatcccagccagcagctggtctttcctaattggtaatctgtcttaatagccacaggtcctcaggcagctgtcgccgggaatacgagctggcagcatagatccacgtcactaacttaactggctggtcctattagagcttaagaaagaattaagttaataatgatactaatgagacagaacgttgcataggagaaaataagagaaagaaggagaggagtagaaggaggagaagggagaagagggcaaggggggaggggaattattgctattaattattattattattaattattcctggcacaggttttgcaatcacaacccaaggttgtgataaaatcttgctcaaaattcaaaaaggatttcaacttttcactctcagtcttattcacttttccatatgatgagatttctaagtaagccacccgacttcagtccttggtgcccaatagctaggggctcacgccgcgttcagggtgtgatgagcgcctgagaacggaggtggctgcccccgcaactcctcctggagtgaggccatcccatcccatcaggggagggagcaccggccccaagttcagagaaaggcatcccaagctcctgacattctgcggtcggaaaatggtgatggatcctgctcatttctaattatacctttcccttggcaacgacaaagatacgtgtggaagaagctggttctcggcttgggggggccactcatcctcttgccaaatatagagaaggaatgagccgcgggggttaccaatggcctataaaagccccggggagcagccagccctctgtggctcgcttgtgggcggaggtaagtcacaggctcctcttctaggtctcagctgcttggagcacacccacccggtgagcacatccacaccccgtgcgtggttccctggccctgcctggctctgctgaggtggcgcctcatgcctttctgagttttcttaggataagcaaggtgtagagagcgaggttccctgggcccaaacacccagcaccctctggctccagcacctcccccaagcaggagccctgcaggttctctctcctccacacactctcccctgtcctcctctccaagtgtcctcttgggcaggatccttttggatgccccgtgagcccagctgccatggcttgaccttctcccattgcctctgtgacccatgaagggtcaacaggactggggacctcactctgccctcaccttccccacctgggctgtacatctgccaggtgtcttgtcctctcaagaccacactggctgtgggcattgcgtgtaaattaatctcagagatattgcctgttcacagacaaggagacctgcccctgccctcgaactgttgactttaagcagggatgcggtccctgctgtccgattctaaatgggagtgaggaagactgaagaaggtgccagtgcaggctgagagaaaccagatttctgcacagctgagggtttttcctccctgcctggcttcctgtgggtcacgtcccatctgctcttccatcttccagcctgcctctttaaagtattagtcttttttttttttttttttttttttgagacagaattttgctcttgtcgcccaggctggagtgcaatggcacaatctcggctcactgcaacctctgtctcccaggttcaaatgattctcctgcctaagcctccagagtagctgggatcacaggcatctgccgccacgcccagcaattttttaaatttattttttatttttagtagagaaggggtttcactatgttggccagactggtctcaaactcctgacctcaggccatctttccgcctcggcttcccaaagtgctgggattacaggcgtgagccatggcgcctggcccctttatcctttttagttaactcgtcagaagccgattctacatggacgcagccaccccaagtgccgctaagttgtgtatgtgcatattcttccaggtctgggatctcctggctgttgctgtcttctgctctcatcctgcaggtgggactctcaggtgagaagttgggccctgtccctcggctgttggagatctccaggcaatccaagcttgccagttcctttctccctcctcccaccggccataagggcacagagggacaggggaactagcacatttagacaaggacaggtcg

SEQ ID NO: 17296 - DNA, 2300 bp, Homo sapien
tttcactcttgttgcccaggctggagtgcaatggcgcaatctcagctcactgcaacctccacctcccaggttcaagcaattctcctgcctcagcctcccaagtagctgggattacaagcatgtgccaccacacccggctaattttgtatttttagtagagactgggtttctctatgttggtcagactggtctcaaactcccgacctcaggtgatccgccgcctcggcctcccaaagtgctgggattacaggtgtgagccaccacgcccggcctcaaggctgtgtttcagtgaaatatcccttgcaaatctttacctgggtgggttacagtgttttcactagactcttcaatagaattaatattttaagaaatgccacttgtttatttgaaaagtataagaatcctatcaatgcagtaggcatgaatgtattcatgtgtctggctgttcatgaagcagctgatatcttaagtgtaagaggtgagatttactgactaccagtaaaatatgcgagttgggaggctaatgattttaaattgtaaatgcgtctgcataagatcctttaaaatagcttttattgttcttaaatttatgtttaaaagaaattgacattaatattttcaaatcatccataatctcccaaaccttttttggttttctgtttagtaccatttaaatctttgtgtatgtgtatatgagctacctttaaaagagcagtcacccatgcgagcatttgttacccaattagtttgtacttttttttggtttttattttgttgttgttatttgtttctttttgagatggagtctcgctcttctcacgcaggctggaatgcaataatggcataatcttggctcactgcaacctccgcctcccaggttcaagcgattctccagcctgagtctcccgagtagctgggattacaggcgcccaccagcacacccagctaaatttttgtatttttagtagagacgggtttctccatgttggtcaggctggtctcgaactctcaacctcaggtgatccgcccgccttggcctcccaaagtgctgggattacacgcgtgagccactgcgcccggcctagtttgtgctttttacttaccagttaggggttatattactgtgtaacaaaatggacggttatttctattcattaacaagattcaagtaatagcctctttagccacatattccttaataacacctttagaccttataggggtaattattttctatatacttttccaatgtatttgaaagtttgttggctcttcttccgtaattatactatatcctcagtaaagaaagtttggcatacagaaaagttgaaggaagaaaattttcaatcactgttgttccactaccaagaaataatacttggaggtatttcctttcaatcttcaacatgaggatgctaatgtccccctcataaggggccttaaagtcactgactctgtgcactatttcatgagaacattgatgtgggtatttaaccgaaagaaaacttgagttttctttttttcctttttattgtgaaaatttggaaacttattcaaaaagtagaatagttaactaattgatgtacccatcagcaagcttcagtgattaccaccatttaattttgtctgcacccccccacccactgccaccccagcccattcccagcatgtgcctctgaaagagaccaactttgtcctttaaaaacaaccacagttggctgggcacggtggctcatgcctgtaatcccagtactttgggaagcaaaggcgggtggatcacctgaggttgagagttcgagactggcctgaccaacatggagaaacccgtctctactaaaaataccaaagttagccgggcgtggtggcgggtgcctgtaatcccagctactcgggaggctgaggtaggagaatcgtgtgaatctgggaggcggaggttgcagtgagccgagatcacgccactgcactccagcctgggcaacaagagttgtctcaaaaaacaaaaaagaaagaaagaaaaaaacaaccacagtttcatcagcacagcaaaaaggtttttgtttttgctcttggattttgtcgtttggtttttgcttaatatcaaatatccagtcagtgtaaactcgtttataatttggtcctttgatttcaaggagctatgatgcagttcgttgtggggatgtgttgtctccatgtcatacatgtgactttgtccatgtttgcacccagttcaaggaagacacaaccctagggaaagacaaccctccccgccaagcctctcttcccattcttaaacatagggt

SEQ ID NO: 17297 - DNA, 2300 bp, Homo sapien
tgtgccatttaaaatttcttagtcatgaaaaatgtgtcatggttatacaagatgttaatattaggggaagctgggtgaaaggtatgtagaacctatgctatctttgcaattttttggtaaatctaaagttgtttcaaaacaaaaagctaaaaaacaacaaaaaaggtgctagtccatagccaggaagacctttatacagggctgagcagatgataatctacttactctctgccttttctttcttgacgtgcttcattccagccagtaaagctcctccaatagcaaatgtgattgctaaagacttccaggaaacaggctactggggcagggatttcaaacataaaaattctagtaagatgcaaacatttaaccatacaaacttattaaagtagtttttaatatacatacacacaggccatgatgttaaatgtgcaaaatgtttcagggatgagaaaatgctcaaagtttctgtggatgcagttaggtctgggatctgaactacaaaggcattcatctccaggggaaagttccctaagtcagttctcttcatgtaaataaaaaaaaaaaaaaaaaaaaaaaaaagctcaagtaccacgattgttactatgtgtgaccctagctccagtaatgactttaaaaccaattatggccgggcgcggtgggtcacgcctgtaatcccagcactttgggaggcggaggcgggtggatcacctgaggtcgggagtttgagaccagcatggccaacatggtgaaaccccatctccactgaaaatacaaaaattagccgggcgtggtagcggacccctctaaacccagctacacgggaggctgaggcaggagaatcgcttgaacccgggaggcggacgttgcagtgggccgagatagggccactgcactccagcctgggcaaaagagcaaaactccgtctcaaaacaaaaaccaaaatccaaaaacacacacacaaaaaacaattatctgcttatgctgatactgagataaatagaccaaacgaaatttgggaggttaacttaactctggcttccagaagtaacaatgccaaagtagaagaggaatctaaaagtggagcttcttgcaaattacacccattatttctttgtacccttattcaactccccaaatgaagatgatgttggccaactagactaggcctaactcattaaccttcccgtagctccaaaaacccacttctcttaccacagggtagtggctctcaagttatttctgggtcagaattagaactcgagagaaccccaagaaaaaggcagatccacacataactaagttccactttttgtttcaatttcaacgtatacatggaactctggatggggctcaagtgacaaattataaaagtcctctgacttctcaatcacggtaaactttaggttcatacccttaagaaaacctgaaacttaattttttttttttttttgatggaaacgctaacataaaatccaagtcggggcatccagccacgtggagagggtgtaaagtctcaagttctctgtggagaactgggactacccgcaaggcacgggaaatgtaggatgaaattccatgacccaggtaaggcgcgcaagctaaggacaactttaggggaggcggagtagtgtctgaggttacgaccaagtgggatgtggccgctgggctggccgacagccgcgacgagcaccagaagggttccaggtgtgcactcaccccgggcttcgaggggcgcgtggagtctccggggcccttctgcgaccacgggggtggcggcctcgcagtgctgaggggccgggttcccaggcaatagccagggcgccccgaggcacgccacgcctccgcttgccgcgcgcagaactgcctcagcaagactctcgcagtcccctcggctgggccccaaaactcgagtccgcgaggcaagaagcgccaaagttggccacccagaggccgcataactcgtccgggtactaggaccagcatcgccatgagcctcggagaccgggtctcctttgaccctccccgcgatttccggtagcgttccgcttcctccggaagtcggaaggagtcgctctgtccgtcccgctcgttggtggcgctgttacatagcccgtagtcagaggcctttcagcccaggggccggcgcacggtaggtagttccctgcggctggaggcgggtctggcgcgggctgggcggtgctgcggggccgcgggacagcggagcgccgggaagggggctgccttaggggtccaggtgcgcggctgggccgaggcaaggcggccccaagcgctggggg

SEQ ID NO: 17298 - DNA, 2300 bp, Homo sapien
cctctagtcccagctacacgggaggatgaggcaagagaatcgcttgaacccaggaggcggaggttgcagtgagctgagatcgcaccactgcacactccagcttgggcgacagagggagactttgtctcaaaaaaaaaaaaaaaaaaaaaagaaagaaaagaaaaatatctaacttggaaaacaaaacataaacctcatttggtgactttggtggtttcacagcagtaataaaagtgataaggtctataagggataacactgtaggcgccttctggcactaaagtttcatgggtccttgccatcaggctcaggtgttactagcaattcatccaaaatgcagttataaaacacctactttgagccaggaactatattttatatttattttatttattttttagaggcagagtcttgctttgttgcccagactggaaggcagtggcccgatcacagctcactgcagcttcaaactcctaggctccagtgacccactcacctcagcctcccaaagtgatgggattacaggcgtgagccaccacatctggccccaagaactgttttcaatgatagcattttatttaatattataaaattaatatgaagaagttgctactaaaagaagcactttagcaaataaaatttaatagatcaggtagaaacactgacttcaatcttaatttgggtggctgatcaggtaacctacaattgggcaatcagagatgaacaataattttgtatgctatctgcctgactacacaaggtacttttatgtctttttgtcaattacaagaaaaaattatccctgggcaaacaaatacacaaagataaaagagcaaaaatcctacccacaggcaactataagatagaaaaaaatagtttgattaacgacttgaagtgctgaacaaacatttaagaactttggcagaaatttctgaaaattctagtccaaccgcgaatcaagaaacacaggtaacactatgttccgttactgggttagagaacagaacagttggctagtttggctaactcatagaaaacaagcaaaccaaccatgctctggtccaacaatcatcagagcacgagtttctcctactcagagtcggtcccatgggggaaaaaaaagccacacaggagcgggatctgtagttaaggaagataattagaggacgattttcctttttttatttctctgtattttgtaaagcaaccaccgaggtaggggcggggagggagtggttaatattgcggatattaagatataaataaaggcagatgaaatgaagttagactttcacaaagaacgaaaaacctacgaatgctcttggcctcattaacaaggaacataagcagttccagatgaggaacccataacaaacttcaaataacgaaactgtagggagcaagggagtccgtgagagtattttaagaaactgggacccaggaagactaagttaacggatgggatatcatgctgtctatatttctttacacactgctatgctttattaattaggttacattataatgttaaataactagaagcgctgggcatttaaagttcttccagaccgccctaaccactcaaattatcctaattagcaattttttttaagttaaagactatttcaatcgcaatgggtcggtttctatttcaaagatgtaaaggagtcaacattctggcacttcctcttggccggcaggacgaggttgacaaagtcggccagacaaggtagggttatgggggctgcccagtcccgtgggtctctaggcagtgtgttctctcttccgaggtgggggtgtccccggcgcgaggagctagctgtggtcaccgaagcccacgaccaaagcgggggcccccagcgcttggggccgccttgcctcggcccagccgcgcacctggacccctaaggcagcccccttcccggcgctccgctgtcccgcggccccgcagcaccgcccagcccgcgccagacccgcctccagccgcagggaactacctaccgtgcgccggcccctgggctgaaaggcctctgactacgggctatgtaacagcgccaccaacgagcgggacggacagagcgactccttccgacttccggaggaagcggaacgctaccggaaatcgcggggagggtcaaaggagacccggtctccgaggctcatggcgatgctggtcctagtacccggacgagttatgcggcctctgggtggccaactttggcgcttcttgcctcgcggactcgagttttggggcccagccgaggggactgcgagagtcttgctgaggcagttctgcgcgc

SEQ ID NO: 17299 - DNA, 2300 bp, Homo sapien
tatccccaaaaggaggggagcacggtcaaccctgtagtccacatccacccatagtgcatgtggtaatccacagtactaaagacactgatcctcgaagaaaggggactgaaccctgcaaaggcaaaaccaacagacgctcactaaggtgactttgaaagtcccagccgggtgcagtggctcatgcctgtaatcccagcactgtgggaggccgaggcaggcagatcatgaggtcaggaattcgagaccagcctggccaatatggtgaaactccatctctactaaaaaaaatacaaaaattagcccagcatggtggtgggcgcctgtagtcccagctactctggaggctgaggcaggagaatcacttgaacccaggaggcagaggttgcagtgagctgagatcgtgccactgcactccagcctgggcaacagagcaagactttgtctcaaaaaaatagaaataaaaaaagaaagtcccagacaacagtgaaaactataaaacttcatggtggttgtatggcattcaagagcttaaaagcacttccatgccattgtttccttgtgggtattataatcattccctgtattaatttgctaggactgtcccaacaaagtaccacagtctaggtggcttaaacaacggaaatttattttctcacagttctggaggctggaagtccaaattcaggatgttggtagggttggtttctcatgaggcctctccccttggcttgcagacggccgtcttctccctgtgtgcccatgtggtcttccctctgtaactgtcccctcttcgtatcaggacactagtcatattggattagggtccaccctataacctcattttaacttaatcatctctgtcaagtccctgtctgcaaatgcagtcccattttgaggcactgggggttagggcttcagcatatgaattgggggtgcagggggaatgcaagtcagcccctagcactctcgctctcatttttttcttttatgtaaggaaaagcacagtgagaatagtcttcgcttgtttccaatcccagggctgatttagctgtggaactccacccagtgctggtccccgctgtccccaccccacctctgcaaacacgggtgcccacccccgccagccgccaggctccctgcctagtcccggcacgggaccttcacggtcccagcaccaggcacagagcagacaacgttcttgaaataagtgtttcgtgaaaagaatgaaactgagagggaaagaaaaaaaaaactagacagttttaggagatttagctcaaaggaaaagaggacaggcacagaagctcctgatttgaagcgataaagactctttagaacagcagaaatgaggcctatggatgtgtaaatgagcccggggaggaactaagcagaagggcgaattacaaaacagaaaaagaccagacagactaggggagaacagtgaatatttcagtgtcttcggttcataagaaattcatgagcaattttggaaattttgttggttttggtggtgggagagaattgtaaatatgtataatatgtaaatatcttttataataaaagcccatgaagataaatgagcctgtctgccgaaaagctgtgagccgtataagatgttaatataactgtcgtcactctagaaattaccataatgcttacagggatttgaaagttcctgagctttggaaggaaatgcataaatactaaacagaacacacacacacacacacacacacacacacacacacacacacacatctctttttctttctctttcttatttttgtaaaaacaatttttatccttttttttttgaggagtctcgctttgttgcccaggctggagtgcagtggcacaatctgggctcactgcaacctccgccgcccgggttcaagcaattctcctgcctcagcctcctgagtagctgggattacaggctcccgccaccacgcccgactaattttttcgtatttttagtagagatacggggtttcaccatgttggccaggctgctttcgaactcctgacctcaggtgatccgcccacctcggcctcccacagtgctgggattacaggcgtgagccactgcgcccagccctttctttccttctttctttttctttctttctctttcttcctctctcccctcccgcctgccttccttccttttttccttcttttttttctttcttctttttttttttttttgtgaggaaggtagctttagtgaaaacagggtttggagttgaacctatacgggttcaaattcgacttccgtccaccaccgagacctgcgctcc

SEQ ID NO: 17300 - DNA, 2300 bp, Homo sapien
aactttgggaaacaagagtaagaaagatacacaggggcagaggtggaggggcacttcacagcctggccagtcacctggagtggggccatggttagcgatttgccagaatggccaggtattatgagagagaacgcagaccgcggaactgagagtatgatgtggcccagttagatgggactacattgaccaaccatgccagttgacccagaaacaaaggattttccagcatgcagaaattttagtgctaaattgttgtccatggtggactagagccacacacacaggactctgcaaagggacctgggaacctgtatatggctagaccaggactcattagcccagccctgtgcagacacagcagcagtgcttgtcctggcactgggaagaggccattgctgtccatcaatagtttttcccaagagactctctcctacagggggaacaaaaaattgaaagagtcatggcttccccagcaatgtgaggtgtttctgtaggtacctggccccttccgaggacctagtgggacaggaggcaagtactgagatggagattggcctcagctacttcccactttgaggtgtccagagtgttcacctggcttggctcaagtctcgtggcgtttcagatcctaagagctatggtttaggtcatcccctgccaccttccccaaaatattttctgaaagtttctttctcatcctggcttattttacacatagaaaaatgaaggccgggcatagtggctcatgcctgtaatcccagcactttgggaggcggaggcgggcggatcacctgaggtcagagttcgagaccagcctggccaagtagagtttgaaaccccatctctaatacaaatacaaaaattagccaggcatggtcatgggcacctgtaatcccagctattccagaggctgaggtgggaaaattgcttgaacttgggaggcagaagttgcagtgagccaagatcgcaccattgcactccagccggggcaacaagaatgaaactctgtctcaaaaaaaaaaggaaatcagatccacctacttattctcaccctctggggaaggcaaaagtgagagtggaaattattttcttcatttatctgggtaaactgaggcccagaaaggtttggtgccctgttctagcctccctgtgaatcagggacagaggggtggctgtctgcagccctgccaaggactgccgctgcattttcctcatttgatgttcacccccacacccgccgtgagcagccacggggataagatcgctcccatcaatgtagaagggatgcaggcagtgtctggaagggcttacagggtcatctattatgagaaagaaaatgaacataaaatgagttcatgtagaaaacacagaggcaacaggccccggaaacatcccttgacttttgcctgggaattgccctttggtccacacagaatccactgcaggaagaggccagaagtttcttctcaccctgttgtcttctctctgtcccctctgtcttttccatctctacccctttcccgcccttatccttactgtccattatcctagggaactcagatccttccgtctgcagagtgagggctctacaagaaggcaaaacttctcttgctaacatggaccaattcttacagcaacgcttcaaaatcgattgatcttacaaactcttgtctatgtcctttacataaaaccttttcccccaaggaagagagtagggcagggaggtgaagaggaatggaaactccaccactccaccccgctatactagatgaagcagctgtgtctcagaaacagggcactcaggctctctggcttccagggattagagaacaaggcacagatcagcccctcccccagaatcacaggaccgccaacttggcagatgcatccaagggcaccctgactcctctgccacatggattgtaggtcccagcgatgagcagcccaattaacagtgatgtcagactgtttgggtccagatcattcctgagccatgaaacagttaagaaatatcctgccccactggctgccgtgctcataaaggtagacccacgtgtacttccctgtggctccaagaagcgccagctcgctcatttgctcacacccagcaggcagagaaggcagcagcaggcaggaccgccaccctcccatgcaaatcacccccgggagtgcagctgggctcctcccgctcctcctgggcaatgctcctggggagtctgtggggaagatgccatccagggcgctgtgcgctcttcctcatcctcgccctcctgctggacgcggtcggcctggtccttttg

SEQ ID NO: 17301 - DNA, 2300 bp, Homo sapien
ggtgagggggcacagcgctgagcaggagcagctacagggtggagagttagggcactgtggataagaggctaagagccatccccaggcagtgaccatccctgctcccattcccttcaacaccacagctgcagtagcggcctcttcatcccgggacactggagtcagctgcccagggaccatgatggctcctcatgcctcctcatctgtcctgctaggaagggggtctgcagacagaacagcttctaccccggacatgttctcctctgatgcttgctgcccctccaatttacatttatatttaaatatgtacttatacacatgtgcattatgtgcatatatattatgtatatattctttaagcacttgctatgagcattttctcatttaatcttcataaaagctctgtgatgtagtaatgatcccactcaatgaatacatgaggaaattaaggcccagagaagtaattcgtccaaggccaaatacagagatagcaatatacctcacatggctacctcatggagttgtatgggaaataagtgaattgctatatatataaagtgcttagaagagtgcctgacatggagggagtgatgaataagggtttaacttaggatggtattactctgccacactgccgtgccctgcagagggtgggggaatagcccgaactttgtaaaaataaataaataaatcatttgattatttgcattgcaaaataattcactctagggttcctctgcgagccaggccacttggttttacaaactgatttgagtataaagtcagaggcacctaaggcaaagcaactcacatcctcaaaaaccttcaaagtcaagttcccctggacactcaaggcaggcctctccctgctcattgccctgagcagagacgctcatcttcacagaggacagagggcgtactcagcctgatccctcacagcagctcaggggacaggctcatcctcctagctctctgcttctctaggcatggatcacacagcaacctctacagagccttctaggctcagaatctcctgctcattgcacagatgaggaactcaagatgccaaatatgggagagtctcatacctgccttgacagcagcttccttggatggctcctaggaaagccctcccggcagaccacagaggaagcccctcagggtactgttcccagtagcaaggatgcccacccaccagttatcctgaggaacaacagctgcccacgttctcaggttagtgtgggccagggcaggagccagcatgccttccagaatcataggcaattttgctgacctcagtgtatccgtcagcatcttgagaactggccactcaacagctcacacccagcttcccgaagcacagtctggtaaaggtttatagaggagaaaaccttttcatcctccttgcactgatttgcatcattctcttctcatcattgtggcagcaggcatcccataaaaagcaacagggcaccatgaggaatgattggaagagcgatggggaacaagctcttttgcctctatttgagatgtcaggcctgggatggaggtaagtcgtgttgtgggctcctggcagtttgtaacatagggtgcccacccgtgcattggaaagttccaagaagtgtccctgccatcttgcaaccaaggatgttttctaagtctgcatgtgccccctccaacatccagaacacagagagttcccagatcaaattattaaggcctgcactgaacagagccagtgtagcctgagtcagccggagggtctgatccactctttggcaactcatccccaccaccatggccactacacacctccaccaacccagaaactccaggtcctctgatttctgagcctgggtcaggagaagctgccctgcccaggcaccaacggaacgcacgcctccatgaaacttgaagacagactgcagagaagcatcatgaatttttcacaagattcatctaattgtggctgagcagagctgagaaagccacagtccgaggacccatgccagcagctcacaaagagttaacccattaggccattgcctggtgagctcatccatccctgctggagcctgctcagttgctgggattcacaacacactgacttctggacgtggtcagggtggctttctctggctggcatggacttgagcagaaactcattgccggcttcctccttgcacgagcaccaagtgattcccaggtcccccatcctcccctgggacatcgaggacagtaagtaaggagggaatgtttccttctgcccttccttccatctcgctgaaggaaggagcaga

SEQ ID NO: 17302 - DNA, 2300 bp, Homo sapien
ccatcgctttttgttctcagttccccctacctcctccaaggacacacgccaaggatggtactatgattctcttttgggatggcctcgtagctgtgaaagttagactcaggcctcctttccacagacccagacacgcaactaccccggaaagcacccccgccctgcacccccatcctcctcacctcccataggagctgcagcacagagatttcaacacaggggttacaaagctgagtctcagaggttcagatagctttctaatggcctcgaggctccgcggggaaaaaaaaaagtatagcaaagagttgccatccagtcctggggctgtctagcgcctttatgcgtagtgggtacggggttggggaaagagtgaccaaggggaagagagtgtaggctcagctcacgggtcgcccaacagcctcagacaagccacttgacccctggactcagtttgggaacctgtagcaatgggtttgacctcttctcctggctgcgagtatcaccactagggagaggcaaaggcttgcagaaaccccaactcccgctcaggcagcgcgctgccccgggctccggtagggtggggactggtcgcgaaggctagagaaggcaatggcaggggaggtcagtccctgccgcgggccggctgcagagcggacgttccgccctgctcccggccccctcttcgcccgccgggttcgccgtgtcgaataactgctgtccggagctttcgtgacgcggagcttcaactgctgcgatccggaagaagcgaaaaggagtcccccccgccccgcaccctgagcgcccgggcgtgcaaacgtgggtggcggagagcggctgccctcccctcccctgtcccccctcccctcgcggcgctcccgtgtgtgcgggtgtgtgagtgcgtgtgtctccctcgctcactctcgcacacgttccggcactagtgcaggcggcgagccggcggctctccgctcgctcgctccggcagctgcgttcccgcctcgccccgccgccgccgccgccgccgccgccgccgcctctgcagtcgcagccgggcatggtgagtgagtgaggtccagccgccgcgcgctctcccggctcgccgccggaccccagcctcaaccggctccgtcccagggagccagcctgcggcgggagcgcgctgcggggccgggcggctgggggacccgggcggccgagctgcgcctggaggggcggcccgtgcgctctcggttccaggcgcgcagggccgcgggaccccgtcttgggagcgggctctacgcccctcccggctccgagtctctctcctcgagggctgcgcgcaccctccccgcccgcctgcccgcggttctcctcctgctcccggagcgccagtcgccccaccccgtgaccggctccccgtcttgtcccgcaggacccgcccggacgggaccacgccgccgccgccgccgccgccgcccggagccgcgcttcgggtcctgcctgagccgagccgcgcgcggggccgcagtcaccgccggcgggggatggggctgcccaggaggcgcgccgagcccgcagggggagcgcggagccggcgcgcagcctgagagcccgagcagcccgcgccgggccggtccgtgcgcaccgcgcgccgccgccgccactgccgcccgcgcctcgatggcgccatcgccccggagccgctgaccgctcagcgcctccagcccggcccgcgcggcgggtcctccgagcccggcccgccgggggagcggcctgccgcggaagcctccccgcgccctcccgcccggccccgccatggcgctgcggcgcctcctgctgctgctgctgctctcgctggagtccctggacctgctgcccagcgtccacggagcccgcggccgcgccgccaaccggaccctgagtgcaggcggcgctgccgtcgggggccggagggccgggggcgccctggcacggggcggccgcgagctgaacggcaccgcccgggcgcccggaatcccggaggcgggaagccggcgggggcagcccgcggcggctgtggcggcggcggccagcgcggccgtcacctacgagacgtgctggggctactacgacgtgagcggccagtacgacaaggagttcgagtgtaacaacagcgagagcggctacctgtactgctgcggtacctgctactaccgcttctgctgcaagaagcgccacgagaagctggaccagcgccagtgcaccaactaccagagcccggtgtgggtacagacgcccagcaccaaggtggtgtcgccggggcccgagaacaagtacgaccc

SEQ ID NO: 17303 - DNA, 2300 bp, Homo sapien
cgtaagcagtgaaagatgccccaccaggtttaacacaggcgagtactgttaactcagagttctgcctacagggtttcaaagaacgagtcctctagtctcagcaggaaagataaacatcccactccgcaggatgcaatgaggagacaccatctgtgcttggtcaacatggaatggagaaatctttatccctacttccggcaggaggcatcctttctataaaaccccaattcctaatgtacgagaacatctcagttgaccctaagccacttggtaccgctttcagtaaggttccaacattggtcagtttcctatattgaagatgacactctgatttgactcaaaaaactaaatgccattaagaacctacaccaaagtgccctcatgccaggaaagcagaaccctggatcctcatccacgattacagaatttgtaacattcttacacttggaacttcatgcactcaaccaattcttactctgccttgtaaatccccctaccaccaaagcatgcattcccggttctgaagaaatggaggagggggcacaagaagaccctgatttattgcatgcaaaaggagcgatggtggaaatgactagagggcctggggaggtgtgatgatgccgagagtgaagaggacaggggaagcaagctgagagggtgaggccgcggggagaccggggcgcgcggcacgcggcgctctcacctgtggatgttcatctcccgtggagggcggtgggccttgtcgtaggagaccttggcgaagacgccggccacgatgacgaaggcgatcaccccgcaggtgatgtagacggtgaagttggtcttgtccttctccgggtcgtacttgttctcgggccccggcgacaccaccttggtgctgggcgtctgtacccacaccgggctctggtagttggtgcactggcgctggtccagcttctcgtggcgcttcttgcagcagaagcggtagtagcaggtaccgcagcagtacaggtagccgctctcgctgttgttacactcgaactccttgtcgtactggccgctcacgtcgtagtagccccagcacgtctcgtaggtgacggccgcgctggccgccgccgccacagccgccgcgggctgcccccgccggcttcccgcctccgggattccgggcgcccgggcggtgccgttcagctcgcggccgccccgtgccagggcgcccccggccctccggcccccgacggcagcgccgcctgcactcagggtccggttggcggcgcggccgcgggctccgtggacgctgggcagcaggtccagggactccagcgagagcagcagcagcagcaggaggcgccgcagcgccatggcggggccgggcgggagggcgcggggaggcttccgcggcaggccgctcccccggcgggccgggctcggaggacccgccgcgcgggccgggctggaggcgctgagcggtcagcggctccggggcgatggcgccatcgaggcgcgggcggcagtggcggcggcggcgcgcggtgcgcacggaccggcccggcgcgggctgctcgggctctcaggctgcgcgccggctccgcgctccccctgcgggctcggcgcgcctcctgggcagccccatcccccgccggcggtgactgcggccccgcgcgcggctcggctcaggcaggacccgaagcgcggctccgggcggcggcggcggcggcggcggcgtggtcccgtccgggcgggtcctgcgggacaagacggggagccggtcacggggtggggcgactggcgctccgggagcaggaggagaaccgcgggcaggcgggcggggagggtgcgcgcagccctcgaggagagagactcggagccgggaggggcgtagagcccgctcccaagacggggtcccgcggccctgcgcgcctggaaccgagagcgcacgggccgcccctccaggcgcagctcggccgcccgggtcccccagccgcccggccccgcagcgcgctcccgccgcaggctggctccctgggacggagccggttgaggctggggtccggcggcgagccgggagagcgcgcggcggctggacctcactcactcaccatgcccggctgcgactgcagaggcggcggcggcggcggcggcggcggcggcggggcgaggcgggaacgcagctgccggagcgagcgagcggagagccgccggctcgccgcctgcactagtgccggaacgtgtgcgagagtgagcgagggagacacacgcactcacacacccgcacacacgggagcgccgcgaggggaggggggacaggggaggggagggca

SEQ ID NO: 17304 - DNA, 2300 bp, Homo sapien
ctgccatgcactttacaacatgtggcagggttcccatccttaggtagcctgtcaggcagcccttgtttgagaaacaccttttgctgtacacccctctctcttggctgtgctgaccagctcagtgcagcccactgggcatcaggagccctctcccagaagatacatcgcatagcgcaagctgctttcttcttttctcacatgacctagagacagcccctggtaaccacagttctgctttctgtctttacggatttacctaactgggtatgttacagaagcatggtcttttatggtgtgcttctttcacttagcatgatgttttcaaggtccatccatgtgatagcaggtatcagtatgccttttttaaatgactgaataatattccattgtgtgaatagaccacattttgtttttcctttcagcagttgatggacttttgggttgtatctaccctttggctgttattaatactgctgctatgaacctttgtacacaagtttaatgcaacatatatttttcattgttcttgggaatacctaggagtagatttgctgggccatatgttaattctgcgtttaaggaacattgcagttttgaggagctgctaaactgtttaccaaagggattgcagggttttccatttccaccagtagtgtatgaaggctccaatttctctacctccttgccaatacttggtattatgtggctttttggttatagctatcctagtgtgtatgaaaaggtatctcagtgtgatttacagttttgggactaatatctaggtatataatccattttgagttagttttttatatggtgtgaggtaaggatccaactcccttctttttcatgtggcgatccagtcagttgtcccaggaccattttgtgaagaaactattctttcccccacaatttactcagatgcatttttaaactgctgcagttgtcacttttcatgggggcagagtgttggagctggactcctggtaagagggaagccttggggtgggcagggccccacccatcagagacacccctcgagaagatggaatagtctttgcctggcatgtgcaaaacgggagtgcattgaggactggggacctggatctgaagtgacagtatccaggtgtagtttcttgtggctgtccacactcatctgtttcccactgccagtgggtatctcacatgtcacacccacagagggcatcctgtttgaaagcaaataggagagcgattccccctaaattatgaacccctagatggcaggaattgggtcccattgatctgtgtctcttcaatgactgatgcatgctgaatcgtcagtcaatgcatgtttggttgttgaagctaggcgctgagttaacaaaagctgctttctctgagtaactggacctcttgcaggggggcgggtctctcctgctatggcagagtctctgcctgtctctctttcttcctgtgtatttttcccctgtgtttgtgattgctccctcctctaaactccagttgtcttcaatgtctgcaccatccacgtgttttgatttttatcttttcatctctatgtcctgtctttgcagctcaatcacacccttccttgatagcaggagctgtgtgttgtacttatttgggtctccagtatctagtacatgatactcagtgtgtagttttggatgatgaagtggtcccctgatattagtgacctgctgctgaatttgaggccgatggtttcagcccttcaccatagtggcattccactggccagctgctatagatacctgcctggcataggtggatatttggggagccagtattttgaaagggctcagagtttactgatgtgaaataaattaaagaaagaaaccgtagtcccagccttttagtctgtacctccaggcatggtaacctttaccctgtgtcccccctgagaccaacaccagatgtagctgactattgagagctgaatgctgtctctgtctcttcctgcatctctgtaaatcaaagggcatatgaaagtaagccaactcccctcatggttgtgcacacctgctcagtgaatctcattatgtgatctcctccttgtttagggctctggctgacatcttaagacaacagggaccaatccccatagcacactgtgaaagagaaactatctcggctatcgatacctctcccaaagagaacacgccggtcagatcgtcctccaaaaaccactacactcctgtgcgtacggccaagcagactccaggtaagtaacagctgggcaccttgattctttgctgaggctggtgagaggtttcaggatg

SEQ ID NO: 17305 - DNA, 2300 bp, Homo sapien
gcctgtcctttcagcgggctgtgctccttccctggccctgaggatttcacccttgagttttctggggttttggctgtagccttcgcagaggggagtagcaatggggtgctggccctcccagacacccgatcatctccgcactccctccaggcctctagacctgaccatgactgccactcaggctgccttctccacccctgctctgctcccaggaggcacctgcggtggccagagagccagggtggggagggccactgtgatgtgcggggtctcgggctcaacattcgcatcctgcagggctccacctgttcccacatgcacctccggcaggacctagacagaagtttctagagagcagcttttcagcccccagacaaggaggatgagaggtggttgtcctgcatcctctccgctcatccttccttccccatctctgtctacctgctcagttcagagatcactcctactgcctgtgtccccttcccccacatcctccctgcaactttattcctcctagctgatccttcagatccgtgcctcctctggatcaaagggacaaagacctattagcaaaagcaaacaaaggtcctccaggcgactggcctaggggctaactgggcaggtccccacagcatcatccctttgtgcaggcactggggtacctggtagaccatggtcctcagctctgttgggggaccgccactgcccgcccacctcagcctcttccccgcctccagcctgggggttggcatggtgtgacggcctcctggggaggtgacagtgaattcagcagcatccgctcccccaagaccagagagcctggtgggggaaagaaggggttccctcattctcagggccagggcacccgctgggttggggctgggggaatcaactccaggctattgggtgaaggtgtgatcctaaaaacagtcagatccaacagcagtgcccttataaatggggttttacctgccctcagttctgcactcatggccctttaaaaaggcgagtgtagaaggagaatttattggtgtcagccctggagatttttaatctaaccaagtccacaaaccacagagaaagcaatggactgtgtcctttcactgatttcaagagttccaaagctctcatctccttctcccctctgcagggtgtgcctcccaacaggaacaggaaaccatcaccctggatcttagggggatggaggctgggggttgtgaaagccactgtcagaccccacactggggatgcattcctggagtcgtgcggctggaaggccagggactaccctctctgctttcctcccaacagacacataaaccttcttaagggctggtccccaggggtttataagagtttgttccagaaggtgaggctaagagggttggaaaggaagaagtgagtctgaatagagcaggtggctcccagctgggcccctgagcccagcacctttgaatcgtctaatctgtggccatcccttggaaggcaggatgctggtggtgaggggaaaggacctgagtggctgagaatgcccttcccaggtgtctacatgcaggtatacaccaaaccagaaagctgatcccatctccagtgtcaaagcttctcagcaccaagttctccagcccccagggtgacacttttccccaggggtcctccccaagccctgtctctgacagggtttctgtctctctcaggggttgttgatgagttgattccaagacatttctcatcccagccttaccactgtctggctgaaaggctctgatgtcagttgggttggaaaattctactgcaatgcttacttcttttcaaggatttcttctgcttcacctttgggtctagaagcaaggaatgaagggagggagagagggagggagggaggggaggagggaagaaaaaagaagtagagataggtctacagacttgctccaattcagtcccacatttcaaaatccagaaaactatgtcatagctgggacagagaggtatcccatttattcagctgtcccatccatcttcatggaacaagcaaagccacatcaataggcaagttcacgtagcagataaaagaggcttctggggctggaacctagatgccatgatttctagcccaaccaggctggtggcctctaccatacatagaagtaccatccacccttacagtaaaagcctccctcctgctcacaaaggaagcctaaagcccaagatttccctctccttgttttattcatttttgcacatctctgttgctctaacagaaatgaactggaatctgcacaggttctctcctgccctgaaag

SEQ ID NO: 17306 - DNA, 2300 bp, Homo sapien
caatattttaaaatgtcagttgttttcaataatcccatatcaatgcctcccaccaatcaccttctaaaatgcagataaggtatctttttggagagaaaattaaaaactgggattgctaatattcaggagccttcaccttacacagaaatctttaagtcatattcacagactcctttgttcctatttttatgtatgttggggcaaggggacataggagattaacggcataatagagccacagtgcggtggcagaaattttatttcaagggtttactgaaagttaatggtcctgaagtcactctgtatacgaaacatgagcatagttgacacatttgaagtccctaagcactaaaacaataacgatgccttcctatgtgcaaagataaacaaaaaacgatatgtgtaagaagcccctgacattactatttttccctgatgcttcttcttgaaatgtcagttaccaaattcatcctaaagattgttttagtttcccactttttccctttcctcatagttggttgattattgtttaatccagcaatgatgaaacaccctttacaaacataaagattcatttctaacatgaacattttttattacagcaactcctttgctccagttattatgaaatcaatcattttacttcccaaccactggtgttttcccgaggggctcttgttagccaagctaccattgataagtgcttattctgttaatattcctttgaaacccattataaacattccttttacccagaaactcagcagtccctgggaggtgactaaagggaggatggcagggcagaggggagctcattcagtcctgcagacctcatgctgcccaagttgtttgtccattttttcagcacccatgcactgtcaccttacatgcatgcaaagggccaagctgtttatcctgaccatggagaaggactaagcaggtaacaaatgctaatttctgaggtcaggcaaggcactttatattatccctttttgaagccaatatccaggtatagggcaggatgggaaggttctgagcatcctgcatatttacaagtactttgctacatttagtaagaactgattagtggtcatacccatggaagtcaaaaactctagcatggtggctcatccttataatcccagcactttgggaggctgaggcagaaggatcagttgagtccaggacttcaagaccagtttggacaacacagcgagacctcatctctacaaaaaatttttaaaattagctggatgtggtggcgcctgtattcccagctcctagggaatctgagaccagaggatcagttgagcccagggatttgaggctgcggtgaactatgatccggccactgcactccagtctgggcaacagagtaagactctgtctcaaaaacaagcctcttacagtttggttacatttttagaagattaagcacatgccttaaaaaacatgggcaaagaaaggcacggaagaaaacttaaaaaaacttgatattaaaattttgaagctgagctgttcgatataactacagtcacatgtgactatttaattttaagtgaaaattaagtaaaattaaaaatttcctcagtgggacgagcatatttcacctcctttataggccatgcgtggctagaacagatggaaaacatttccatcatcgcagaaagttctactggacagcactgttctgaagtgtttaatttgccatcatggaaaagaaataaaattcactgaatgtccttaaatctgttttatgatttggcattgtgtttaagtctggattgcacatttaggatagaggtaagaggaccacactattttcagtgtctggagacctctaaagactctaattcgaccttggccaaaacgatccttaacagcatttatatgcttgatctcctctccacgcagcccatcaataagccattgcgctccacggtcacacttcagcactcccaatacaccaggcagacactgagtacgagtctcggctggtgtcctagcaacagcgacgcgaccccgccccttcccgcgtacacctcctaccttattagcctggaaggggcgggaccaggggtccgtgcccaataggaagggagcagaggagtgagtcctggccgcgtccccgtcgctagggaaaccgatgcagctggaggccgcgcgcgatgcggctcgcggaggagcgggccgcgctcgcggcggagaacgcggatggggaacccggcgccgaccgacgactgcgactcctggggacctacgtggccatgagcctgcggccggctgcgggcgcctgggag

SEQ ID NO: 17307 - DNA, 2300 bp, Homo sapien
cccatagatgtcattcccatgtcagccatgaggaaaagtaagccctattgctggcgtataaagcacgtttgtggaaactgcaaggtggttcaccttcctccagacacttcactgccatctgctggaaattgttcataatgtactaatctacattgacacaacaggcatggctcttcctagagttgcacagtacagaaccaaacatggtggccatgggaaaacatctatccccctccacacctgttcccaacattagtgcaaaaaagaatcccagggctcatcctagacataggaggaatccatctgaatatagcaatattgtttgaaaaaaatctcaaattctgaccccaaccaaattttgcaggaaggcaccttaccttcacatgagcctttatgttccagattcattaaaattggagacaaagaatgtgaatacaatcccaagttccggctcatcctccacaccaagctggctaatcctcactaccagcctgagctgcaggctcaggccaccctgatcaacttcaccgtgaccagggatggcctggaggaccagttgctggccgctgtggtcagcatggagaggccagacttggagcagctgaaggtgaggacagaagggagaaaatgttctgccactagagcctgcagtgtactccactctgggagaggttgcagaggggggctgtttttcctggattgagttaggtgggttctgctagactctggaagactgctgaccccatgtagcaacctgggaataccatactggggaaagaaggatgggtgagctgaagaacagaagcaaaaacagtttgaaggccgggcatggtggctcatgcctataatctgagcactttgggaggccaaggtgggcggatcatgaggtcggtagttcgagaccagcctggccaacatggtgaaaccccatctctactaaaaaataaatattaaaattaactgggcatggtggcgctagcctgtagtcctagctactcgggaagctgaggcaggagaatctcttgaacccgggagacggaggttgcagtgagccaagatcgtgccactgcactccagcctggaaatagggcgaggttctgtctcaaaaaaaagaaaaaaaaaacagcttggagactggacactcctatgaccaagagcagagcctggcatgaacatgagtgctgctgatcacacaggtccacgtgccagaactaagcggaatgaaattctacaagggtaacagaactaggtccaacagtgttagggtcatgtcttagcttgggctgccataacaaaataccatagacggggtggcttaaataacacatatttgttctcctataattctggaagttggaagtctgcgatcatgttggtttttggtgaggcctcttttcctgccttggaggcagcggccttctcactgtgacctcacatgacctcttctttgcacataaagaaagccatggctccaccctgatgacctcatttaaccttaattacctccttaaaggccacatctccaatatagtcacatgggggagttaaggcttcaacataggacttttaggacaacacaattcaatccacagcagataacgtgctttttgtcctctctttaaatgtgattagattatacaatatggcggggtcggtaggtggaattccagtgcatgagagattgagttcagggctccctgggactccgcttcctgcaatcattcattcattgaacagatacctagggagcaccacctctgtaacaggcaggatttgaggtatggaggattcagcagtgaacaaagaaaaccatgtcccagccttcatggaatctacactctagtggaggaacacagaaaacagcaacgtaaacaaatgaacaatgccattcagatagtgataagaatttttaagaaaataaaacagggtaatactggaaagccagagggcaaatttaaacagtggtggtcagaaaaagattcggtgaggagttggcatctgagctaattcctaaataattgtaaagcctctgggcatagagcattcccagcacagagaacagcaaatcctggtcttaaggcaggatcaagatatgtggttttaagaaacaagaaaggtcagggtggctgtggttggaacctccaacaggaaggttgttcttcccacgaatccaaaggctgtacaagggcaaagacactacagctgcctgaagttagtgctttaggatatggagcataaagagaggaagagatgagatccacttggataccagcaccccactccagcctcgaggaagcttt

SEQ ID NO: 17308 - DNA, 2300 bp, Homo sapien
actcctgcgactgcaagaccaacccttccttctccttctcctgttccttgtcctcttcaggctactcagtgtgaagatgatgaaggtgaccacctttatggtgattcacttccacttagtgaatagtaaatgtagtttctcttccttataattttctttttcttttttttttgagacggagtctcgctctgtcgcccaggttggagtgcagtggcacgatctcagctcactgcaagctctgcctcccaggttcatgccattctcctgcctcagcctcccgagtagctgggatcacaggcgcccgccaccacgcctggctaattttttgtatttttagtagagaaggggtttcaccgtgttagccaggatggtctcgatctcctgaccttgtgatccagccacctcagcctcccaaagtgctgggattacaggcgtgagccacctggcctggcctcttccttataattttcttaataatattttgtctaacttactttatcacaaaaatacagtaacatgcaaaatgtatgttaatcaactatttaaggcatcagtcaatagactgctaagcttttggggaatcagaagttatatatggattttctactgtgtggggggttggcgcccctatctcctgcattattcaatggtcaactgtaattcttttgacttcgctttttcctttctcaggcccttgaaaaaaaattgtttttcttttttagtttttaaatgattttccaatgtcggataaattattttggtgaaacggtaaggatgaagacattgtttcctacaccttaagaaataagcagctacaaaaagctagagtattgtactgatctctgattaagccagatcctcaagtgatggggtatctttttttaaaaattgctgtgattagtcttagggagaaatgatgaccaccaaattcttcataacatttaaggatttacccagtaatcctatattgtgattacttgcaagaaagttaactagaagtagtggatgatcctttttagaataatattatttgcgatttaatatttctctttctactgtcttagttgtgatcttctaaaatttgataccattcacataaaatagtgattatttatatcaacaccataggagtattttcaaggtagttagtcttctcaaccctcttttttttttttttttttttttttgtgagacggagtctctctctgtcccccaggctggagtgcagtggcgcgatcttggctcactgcaagctccacctcctgggttcaccccattcttctgcctcagcctcctgagtagctgggactacaggtgcccgccaccatgcccggctaattttttgtatttttttttagtagagacggggtttcaccgtgttaaccaggatggtttcgatctcctgaccacgtgatccacctgcctcggcctcccaaagtgctgggattacaggcgtgagccaccatgcccagccttctcaccctctttaaccccaaggttgaaagtgtcaggtatgatacttgtttttttcataaattctcaaatagacctattttaatatggcactcaaaagacctctcttggaagtttcattacacctttttggtatacttttggaagtacttttggtaccttttggaagacttaacttgttctctttaacctcctatttattacagaagcatgtaggcattagcttttattcctagggcattaatatctttttccagctttattttttagtatgcagatatatagatgaagatgtagaagtgttttgtagaagagccgtttacctggaaacctatagtgaaaaagtttcgtatggtgcattttattcttcattttgtctggacatttgaagaccaagaaagaacattataaaatgggcagggaaatggtggctgtttagatacagtatcagtagtttgctttgtggcttcaagtttataatctttcaaaatagaatcgtgtatccattgagcaatttcaaaagctccatagttgaccccatggcttctcgggtagggcatgtgaatttgttctttctgaaaatgtgtccccttcctctgtgtagcactcaatctcattccctttttagtgtcctggtgaagacctagttcttgccggagacaattccactgcagaagcactttacttaaaaggacttgccaggctggacaatgcccgttgacttggggcaggccctaggcctgctgccatcgctggcgaaggccgaggactcccagttctcagaatcagatgctgcccttcaagaggaactctccagccctgagacc

SEQ ID NO: 17309 - DNA, 2300 bp, Homo sapien
atagatgacaccttttcattatttcctaagctgaggtagatatctccctattttaaaaaatattttgattgttcagcctgtttcgaaataagtgtttatgccttttcctaaggtgccagtttataaagaaattattaaacttcaaagtgtcattttcatatcaggaaccatctaccaggattagagttctcaaactgaggtttgtgggttccaaggatgggtttcaaggctgtgttagctccctggatttgagtgcaaagtgttgtatgtagatgtgtatgtgcatttttcttgggaaaaattttaccttccatcagattcacaaaggagtcagaacccaattaatggttttgaattactgttatcttccttgggtgttgatcagctaaaagcgaacacattgaagataaaactcctataatcttcccctctaaaccaccttatctcttgactttcttagaagcagagcacattgatgttggaagcaatacccaatgaaggtgtccctctaaatgtgcctggtaaattgttagccatgctgtcctcaggaactcaaagcagcgccatcaatcacatgaatgttagaaacgtccagctaggtgccatggctcatgcctgtaatcccagcactttgggaggccaaggtgggtggatcacttgaggtcacgagttcgagaccagcctggccaacatggtgaaaccccgtctccaccaaaaatacaaaaaaaaaaaaaaaaaaaaaaaaagactagaaacttccacctatgtcaggctgaaacagtagtttcacacataggatcttgttcagaccctgggacttaagagaacatgtcgaatcccttttccgctggtcacttttcaggtacatgaagatgtaatcccatccccgcatcaagctttatttctccagaggaggatctttaattcttgtaaacatgggacaggtacaggacatgttatgataatgacaggtacaggacatgttatgataatgacaggtacaggacatgttatgataatgacaggtacaggacatgttatgataatgacaggtacaggacatgttatgataatgacaggtacaggacatgttatgataatgacagctcttctttaaatttttattttttatttattttatttccataggttattggggaacatggcagctttttttgaataccctcctctttgccagttgcccaaggtggaacacccaaactttgacatgatacttccattaatgcaacttagtatcacaagttgatgtcgtggcccagcacaggatggcctggaaaccggcaacactggacgctggggaaagggtaagaaggtcttgaccattacaaatggtgtggaactgagccgagggagggatagtgagaagggagagagggtgaggtgtctgagagacaatgaggtcaaatcagaggattcagccattgttggcgtgtgggaaagggaaggagaagggaagagtcagggatgacatttgttgagagagagagagagaagagagagagacgcaggtggaaagaggatggcaccacattggactagccccaacggaatggggagaagtgggagaggacccaggggatgcagagctgatgagagtgggagaaccaagacagaggaagaaggttggggcaaatcaagtgtctcagggaggcccagtgaggcaagaacggaaaggagaaaggcggcggttaagaatcagggataatggcagagcgttgcagctctgcgggtgggactgggcggaagggtttgggagagacaaagaaatgatctttgaaggcctcgcagtgcttggccgagtgcctggcacagaataggtgcgcaataaatgacgggtgagaagtgaaggaactcaggaacagtgattagtgagtgagtgacggaaggaacggaggatggcgttggctcgggaacctcgctgccatgtcggtggaggctcctgggctgcaacgccagagagaggcggggcgtccccgacggccaataggagcttcggtatcagctccgcccccgccccctagctccgcccggtgccgcacgtcgttcgcctgccgcctgaggcgcgcgcagccacccagctcccggaagtgcgcccggagccggcgccgcgggccgaggtgagcgcgcttgcggggcggtcccggcctccggccgctcggggtcaggccttgcgctatctgcgtccgcacctgactcagctgggcaccccggagctacggaggggccagcgggctcccttgcccatgcgtctgggagcgcgcgggggacgtggcgagtgc

SEQ ID NO: 17310 - DNA, 2300 bp, Homo sapien
caaagtgctttcttgtttttgccatatgcacatctaattattggctcttactagtttacaataccaacagcaatgcaagtatatgtcagttttatcacaaactcagaattaggtattcttaaaaataagattagttatatttttattgtatttctcttttaattcagtttcccaatttcccttaatgaatttgctaggttgaaggttttcctatatatatataaatataactatatatatacatattttttttaatagatggagtcttgctctgtcacccaggctggagtgcagtggcacaatctcggctcactgcaacctctgcctcccaggttcaagcgattctcctgcctcagcctccctagtagctgggattataggtacctgccaccacaccggctaatttttgtttttttctgtatttttagtagagacagggtttcaccacgttggccaggctggtcactaactcctgacctcacgtaatccacccgccttggcctcccaaagtgctgggattacaggtgtgagccaacatccccagccttctttaatatatgttatttataatattggatgtgtgtgtgtgtgtgtgtgtgtgtgtgtgtgtgtgtgtgtgtttaaattaattttctagtagttgcctaatctgtagtgctgcttctaggatttctattaaaagaatatatattaaattcttattaaaggccagttatgatggctcataattaagatgccctaggagcaacaagagctgggtgggctactgatttccagatgggaatctggccatgtttataagacctggacttgaagatattgggcagccaacgaggcccatggaggagaattctggcgggctctccactgaagtacacctacctgctctcaccttcaatttgcctttaatgcctctccacttgatgtttacggctagccacttttaggatctgagccatcaagatgatggatgaaattgggtttggaacaagaaggcagggctattttgacccaggacacatttccaacatgctgtgaagaactctcagcatcaaataacatctgggtggaagaagttttgggaaagaagtctagctgtagatcacacaatgcttctaaatgggagaaaatgtccagctccatggcttagattctttgggaagtaggataactggctattccattttaggcaaggctgcctggccagaaacccatgtcttaccatttcgagtacattatggttggcttacaaatcgtagcctcatagagaactttttcttcttttagctactgtcttcctaaaataaaagtctctgtgcaaagcaatggaagaaacctcatattgttttttggggttgtcattttatgtaacttacaataatgactacggctcgtcttatacaagatgtaaaggatttgggagagggaatccagtgtgcatttaggggaagatggtgatgtagatagcatatttcaggaggctgggaagtgtcgagtgcttaaatatatgcttctcaaatttaatgggcatacaaattacctggtggtattattaaaatgtaacctctaattcagtagttttgggatgggtccatggacagcactttggttagttccccttgggactcccctttcccctcagagaagtgtagagggttggggtattgggcttaagaggagttccagactgtaaccatagctctaggtaactcccttctggaagtgatgtgttagcgactggaggagaaagggatccctgggatccttttcagctttactattctgatttggggttctgagattccaacaaagtggacttttgggagtcacagacctccatgggaatgatgaaagctgcgtaccttctttccgcacaaatgcaggcccacctttaattctgcaaaccactttaggccccgcgggcccgcagccctggtccaagacagctgtctgcttcacaggtcgcgcacccagagccgggcggttctgcagctcagcatctggcccgggctgcgcgtcgggctctggcgggggcgtgtcaggaggcgtgtccggggcgtgtcggaggcggggccaaggcgggggtaagcctcgcccctcggccgtgcgagaggccgagcttgctgcattgcagccgccgcggcgccgctcggctcttcactcccaacaatggcggctccgagcccgagcggcggcggcggctccgggggcggcagcggcagcggcacccccggccccgtagggtccccggcgccaggccacccggccgtcagcagcatgcagggtaaggaacgcggccg

SEQ ID NO: 17311 - DNA, 2300 bp, Homo sapien
aacttactgaggatgagaggaatacataatcaactattccgtacttgctccttttctcttgcaacatacggattcagtaatgtgaccacaccctccctcgtccccctgctgcctgcttttcctctttaattattgaagccctcaaaatcatatttggagaaaggcacaaacttccctttcaggcatgtccttaaccgtggcaagataaacttctaaattgattgagacctgtctcggatttctttttgtcttagaatactgttattgggagtggaattaaaaatattttccaatattttgctattattatatagaaatacaactgctttgcatgtgttaacattggatcttgtgaccttgctagtttagttttactgttagtttcagtaggaattttctgtgtctgtgaataaaggtaatgcttgttttcccccttgcctttctatactggctgggtcctccagtagaatcctgaatagtaataataatagtaggcatatttgccttatgcccaatattaattaaaaagaaagtgttctatatttcaccagtaagtataatgttaactcttggttattttagatgccctttatggaaatgaagatgttttcttctcttagtgtgttgttatttctgttgttattagtgggttttacattttgtcagatgctaattctacatttattgagatgatcacattattttcttcctttctataaataatggtgcattgcattgattttcaagtattaagttagtattgtattcttgagataaactctacttggtcatgatacattacctctttgtatgttgctggattaggtttgctcatattttgttatttttgtgtctttctgtgcaagggctattaattgtcttgtaatgactttgtcaggttttcaaaaatcgttatgctggcctcatgaaatgagttgggaagcgtaccatctctcacttttttgaaaaaaaaatttgtgtaaggccagtgttatttctcacgtatttgaaaagagttcaccagtgagcccatctgggtgtggacttttctttctgggcaggtttttaataacattcattaagtaacatagtttaaaggttattcacactttgatattctttttggtaggttttcattttcagaaaatatttctgtttcatctatttctgtaagaacagtagtaatggcccctctttcattctgattttagtaatttgtatcttttctttttctgtgggtcagtctagccaaaggtgtgtccattttattgatcttttcaaagtactgttggttttcttgacttttctctattgtttttctattcctgttttacttgtcttcacgttactttttcttacgttcttcctcctgcttgctttgtatttcatttgttcttttttttctaattctttaagctataaagtaggtttgatttgagatgtcttctcttctaatgtatgcattttacactatacattttcttctgagcactacttctatatcccacaaattttgggaagttgtaatttcattttcatttagttcaattttttaactatttcttgagacttttttgatccatttgtcatttagaggtgtgttgttaaatcttcagatatttgaggactttgcagatatcttcctgttactgatttctaatttatttattttgtgatctgagaacatgctttgcatgctttccatcttttaaaacaaggtgtgttttatgccccagaatgtggtcaggattaatcaatgttccatgctagtttggggaaaatgttgatcttgatgatgttggatggagtattttttctcttggttgaatatctgggattttaatgtgtaccttatcaggcaaatacttatatttacaacaaaaaaaaacaaagtaaatagcttacagtgaattttatgcagcacagtactcatgctcaaagcaatatacagatgtctttagttgatgctcacaggcagagaatgtaatacagtcaactattatgcttctctgggcatttctttcaacagcagttactctcagacttagcgaaggatccattgtcaactctgtgccaacaggaccctctctctctcttcccttttcctgacacatcatttagatggtccctaatttcaaggaaatgtaaagatgttctttcacagaaattactaaaaatgatttctgcggtacataggataatatattactgtcttggcagtgctttaatttggctacaaatgactaacagacaaatatctttacacatatgtgtagtgataaatttagcgttattgtgaa

SEQ ID NO: 17312 - DNA, 2300 bp, Homo sapien
accatgagttttactctccctcctttaacttttccctcccgtgaagaagaaagttattttcaaacctccatctgttttgtgtttaacgtgcagaaaggttgcacattttcagtcagggaccttgttcataagcagtagatcgtacaacagtttattacacaagtggagatttttatggctggcctttgttgagttgccaactgggagaaagaacataacgtgcttagtggtccctatcaggaaaaatgagaaagcattaaataccagtcaaatcgtcaagcattggaaagctggtaatcaaatccagaaatccctggagtatggttgatgaggagggttttctcatcacattttttacatccataattgttttccaagtcacttgtgtcacaggcagtatcccaaagcattatgtgagaagtgcctcaatggtggaataaacgtttgacctagaaagactcacgtccactttgaaatctggccctggtcaatgcagggcatgaaactggcaccccaggaagagctttatatatttttaattacattatcatgttgaggacatcagctacatagaaacttgctcaagacttactaggcttctttccatacccaggccatattctctgtattcctaggagggaatgtaatttactggtggtttgtccccagccatgagacagagggtagaaaactccacaaagcatcctagtaaacattgcatctgaacaattccaactgtaaccagccaatgccaatggtaatggatcactcttgccccttcctttttaattttcccaaaagctcagaccatcacagaggctgcccaataaaagtcggtagagacctcagaaacattccagtcttccagcagttctcagcccaggctgcacgtcagagtccctgggggagcctcatcccagcctaattaaataaaatctcttggagtgggcgaggacattggtacattctccaggtgaccctaatatgctgcctggattagaaatcacgggtctagtctagctacctaattttactggtggaggaaattgagcctggagaagttactgtccacaatacttgattcacagtgccttggttctttcccagggaggcgttttctcacaatcacgctgtaactccataacttcatgtctcacatctcctaactctgtgtttataaaagcgacgcattcaaacctaacccagtccgctttttgcttgtgcacaaataccgtgcagtagcttgtatgagcagtaccagcagctctgtgttccccaaggtatatgaagaataatgtcaggactgtggagaaaatgcaggtaaagaacccacttttttctccagatggtccatggagaagggatttaagaagtggtccttaaacatgaaggagattcaacttcatttttcttattagtcccttattaaatccttctctgtttgtgtttgaaaaaacagctgtgtgttgtgtgtttgaaaaaacagtcctactttattcctgatgtcaatgttaatggtctccccatcaagtcccaaaatgttctaagatggttattaaattttatgatcaccctactctagatgagtcccaccaaaagtgtcacacttgctgttattgaaagatccttcctttttcaggctgagaatctcaagcctttttccaacccacaggccacgttctaattgctttcttcctgggagtctgataaacagtgttctcgatctgatagacagctaataccccggggggacattgctcggtagccttggacttctcagcttaatcgccctagctttaatgccacttaaatcagaatgtaagcactgaaagaatttcaggaatccaatgatataaattgtatttttagagccgtgaatgacttgagcgagtgaaacagtgcagtggcttaagatagttctctttagttttcccatgatttatcacaagcaagttcacagcaggttaaaataattgaatgcggtgatagcatacatactggcatgattttatgagccgtcattcataacatatttgtcccaaagcataatttccatgatagaactctgattcacatgtaatttttttgcagcgacgacacagttgaaataactccttcgtggaggctggctacattttcacaacgtctggtcccaagctagatcttcgggaaaagggatcaaggaaatgactattcctccaaataaaatgtaagtatatcctgataaaatgttcacttttttggagaataaagagaaatgttctttccgggagaattgtgactcggaggttatgccttgc

SEQ ID NO: 17313 - DNA, 2300 bp, Homo sapien
cttccctgtagagtacctccctgccacacacatctcaaagccggtcagagcccttccagactcctgtgtgcacccgttcccaaacctccctccactttccttcttctcattgaagaccagggggctgggggttgactgaagaccaggagaggtagaagagaaagaaagatctcaggcggaatcatgccctctcctcccatgttcatgtcctaatcccaggaatctgtgaataggttacattatacagcaaagggaatccaggcagtggatgagattagggaggataataaactgactttatgatagagtttatttttgccgtaaggttaatgtagaagagggaagcagaaggtggggaagggagcattaaagcggtaagatgcaataggaacttgacccacgattgctggcttcaaaaatggaggaagcggccatgagccaagtactcgggcggcctctagaagctggaaaaggtgaggaaatcgattttcccctagagcctccagaaactaacgcagccccgctgacaccttgattttgaccccctgagacccactttggacttctgccctccataacagcaagataattaatgtgtgctgttttaagccactacattcgtggtaatttgttatagcaggaatgggaaaatgatgttacgtaatcgctgagatgctcctgcacacgaaatcagcctatagacaggcgcccaggccaggactagatccccaaagggaacatggatggattgttcttcctcgtctctgacacatcagcaagaaggtgtctatccctgaagaccttatttacaaaatcgccccgctcagatccagagagtaagctctagggctaacccctctaatgtgttttcagcaacaggggatggggcagaggccgggaccaggacattagaggttgtccccatgagctattgtcacctcgggtctccatctgtcaccgactgatcttttaaggactcgtagtatgcaggcaggcttgtgtgtaatagacgacacccggggtccacgtgcatatgaagttgcaaataagccctaattatatacgtatacagagtggtttttatgttctgagccaccaactatttaacgggcttcttgagagatgggtctttgttttatttcattgatccatgtgcctataacacctcggccagatgcacaaataactctgggtcggttacggaatggattttcccctaaggagagactcattcgcaggcaaagtttttgagccttcccaagctaagcccagcccgagctctgacttgccccctgctccagagcccctccctatttagagcccagtaggtttttcactccaactcaggtatcttttcccattccctcggggttgtgaggtgggagcgttgtgtcgcagctggatctccagatgcgccgtgtcacatttgtccccccaaaaagcatatcctagaaaatgaaagcctttccatttccccgtggaaatgcatctaagtccagtattggagctgcgagatacagaatcgtctctgccagtgccctgagcccctcaaaccgaggggaatgcgtgggcttcggtccgtcggaagcttttcttctcaggggtccagcttatttccaaattgccccgcgtgaactgtcccgcgggcgcgcacgccctttcgcgcagcctttgcagccggctggcgggagatcccggccgcttccctttcgccggcagaagcccggccggggaagccccggctgcgcacgcccatccccaggacctcggagctcccagcggctgccgcagccccgcgaaccacctgcaagccccgcggcgtcgcagcccttccttctttcctccgggcatccgctctttagctcgcgcccctctcccagattcccgacccctggccctgctcccgccctctgtgcctcggcggctgcggggcccgccgcaaagagttaagagccggttcccgagacggcttcggcggctccgggtccccagaccccgctcgccgctcctgattggctgagcgcctgtcagtagtaaagggtatcagatggcaaagttgggaccttcataaaggcgtggtggcgattctccgcaatcgccggcagcctatgacatcagacaggaacgcctgggatgccgcgctgctcctggccaacctccgaggaggaggagggtcccgccggctaagagttaattagccccgcacggcgaggggggaggcgccagttttctggggacactggctgccactgtactcctacccaggggagctcacggagagttggatgaattctgggttg

SEQ ID NO: 17314 - DNA, 2300 bp, Homo sapien
caaactgcagaaaatgggaccatattagatgtaggctttgggacatctgaaaaacctcttaggcctctttaacctcagtttcatgaacattaaagacaaacagggactggggtaggtcaggggttttcaaactctattctgaagagaaccagcactgcagagagaattatcagggggcttctggaagggacaaggagaggcccagtaattggggcatagatccttgacactgcctcagccagtgcatatatatgtatatatgtatacacacacacacacatatatatagtgcataagacgtaacaattaaaaaattagaaaatcacagaattaggtaggctctgaggatgattaacttttcttcctcttttcctttctccttttcttttactttctgtttcaaaaaatttaaataatagaatgaaaaaataaagtcttcttgtgtaaggtaatgagttgcacactggattatgcttctgtgtgcttttttaatttttatttacttatttatttatttattttgagacggagtctcgctctgttgcccaggctggagtgcagtggcgcgatctctgctcactgcaagctctgcctcctgggttcacgccattctcctgcctcagcctcccgagtagctgggactacaggtgcctgccaccacacctggctaattttttcttttttttgtatttttagtagagacgggttttctccgtgttagccacaatggtctcgatctcctgacctcatgatctgcccacctctgcctcccaaagtgctgggattacaggcttgagtcaccgtgcccagcctgcttctgtgtgctttttatcagctttccccctaatatcttgactctctctgagggaccatcttgcttattattgttgtccctaaagtgcctggcatggtcccgtgtacatagcctggtttataataaaatttgttgaattatattgaattgaaaatatcctgaggcccttggttcctctttccttctcccaattgtttgcatttagacatgtttccttaggtgccagaggaaacacactgctctgctgaaatgcatgtagattgcatgtttaatctctgattggactgaagaggctaaccatcagcaggtgaagagatgcatcctatctctagcttcctgagaagagctaagtagaaaaggtctgtacaggcagggcctgcagtgtgcaccagccgtgacttggacacttttccacagcagactctacactcttggaaagcctggttgaaaggaggtagctgcagattggggaaaaccttcatcatagtgtgtgattttaaaatgctttattatttcatgatttgtaggatttttttctagaaattatcttaatgatgccatggactaatgatgcaaaatttctaataagtggtattttgttaatatgcatattatttgattctggaattcctggggaacaaaatattatatttcattggactctactatacaaatgaacatttgatttatataacttacatgataggtgttattttacaatgtatgctagggttaattaccatcttcattgggtgtttttactaattttcagatttaaccccgtatccctccaaaaatatttattctcagccaaatgccagctgcaagacccaggctcagagtatttaagcacatgagtccaactttaaatcagatgtgtacaacttgggcttacggaaaggttgcaggtccatttgctccacttgcctttccagaattaaagagaaagaaacatcggtgaagggatagattatcagctttgagtgaaattgtcttgacctgatctgacatccgcagacctttggtttcttcctgtctttagcacctccaaagaaaggctaagatgaaacaggccacacatagacttgctcctttgcttcctcagcatagttgtcaacgttgtttaaacagccttgaaatcacagggtgagctgtttcttttgtacttcacaaacctctaacagagttgtcccactttaaggtcacatactgtttactattctagagcttagccatgaacaaaggattacttttgaattacaaaacaagaggcctgaaaaattcttagttctgttctggctctgaaacaaagactaaactttcaatgtttagccatgggtcatagcgcttcaatataactaactacacaacattttttctaactaatgtaactaactacactatatagggctatacatagggcttcaatacaactaactacactacagtttttcaagggcaaacttctgcttgttgtatactgaac

SEQ ID NO: 17315 - DNA, 2300 bp, Homo sapien
gtttgtgccctcagagggtctcacagtataacagaggacacgagaatcacatttacaatccagcatgaaaagaaaggaaatgcctggtgtggtgggtgtatggaagaggatcaaagaaaagagccatcggaatcagaatggacaggggaggagtgaggaaatgggctggaacgtgagggctgagccaggtagaaaaagatggaagggggtcgcagtctgagggaacagcctgcacaaggcctgcatgctatttctctagaatgtggatttccttccaagactgaacactagctttaaagcgcacgaaagactctgaaatatatcctggaaattgtgaaccttggttctttgagtgacatcatttgttatttattctggctttccaagactgaccctttttcaaccctaaagtaggtgggatattttaagacggagaactgttttcagggtagggaaaagaaagaggccaatgctgaactcaagggaaggctgtgtgggatgggaggctttgatctgcgtgaggcagccaaaggatgccaggtgtctggaaaacagaaaaaagtccctcaaagggaggtgacagaattcttacctcctttgcaatggtgtctacaagcctagaagcagctgctatgtcagcacaaaaatcactgctgcacaaaaatccaaacgatgtcatttcaaatgacatacagacctttcaggccgggtgtggtggctcacgcctgtaatcccagtactttgggaggctgaggctggcagatcatttgaggtcaggaattcaagaccagcctggctaacaccgtgaaaccccatctctactaaatatacaaaaacttagccgggtgtggtggtgggcgcctgtagtcccagctactcaggaggctgaagcaggagaattgcttgaacctgggaggcggaggttgcagtgagctgagatcgcgccaccgcactccagccggggccacagagggagactctgtctcaaaaaaaaaaaaaaaaaaaaaaaaaaaaaagacatacagacttttcagtgatcaagttaacaaataaaaataagtatcatgtgtggcaagagttacatgcgttcccatacactgctggtgggagtgcaattggatcaacttttcaggagggcaatttgataacctgtatcaaactccttaaaaatgtgcccaccctttagctcataatataatgtctagtattttattcaaagaaaataatcagacaaagatttatctcacaatgatgcttatcgtggaattactttagatggtgaaaaatagtgaaatgtctaacaatagaggattggctgaataaactatggatcaaccatacaatttaatgctaatacaagagttattaagaaattatttttaggctgggtacagtggctcacgcctgtaatcctagcactttgggaggccgaggcgggcggatcacctgaggtcaggagtttgagaccagcctggccaacacaatgaaaccccgtctgtactaaaaatacaaaaaaaaaaaaaaaaaaattagccgggcgtggtggcacgtgcctgtaatcccagctactcgggaggctgaggcaggagaatcgcttgaacccgggaggcggaggttgcagtgagccgagatcgtgccattgcactccagcctgggtgacaagagcgagactcagtctcaaaaaaaaaaaaaaaaaaaaattttaggcagctagaaagggtaaaagaattctcggtggaattttcctttaataaatagcagctccaaaccatttcttctctgacagaaagcagtctgaaatagatatgcagactaggagcttttatatgtaaatgtcgttagctgtacctggaagccaggaatattgaaaatggcgtctcccgctcttttccttgtcaccacgtttaccagtgtcatggcagcctccaggtaccacatgtacagggatcatggccgcctccaagtggaggccgtatttgcataataaaagactagggtgggagggccagtcttttcaggggctatgtaaatgacacaactggtcaaaccaatcccctgggacctatgtaaatcaatcaccgcctcctcaagcctctgtacaaaatcgattgctctctgccacaaaccggagacccttcttgggcgatccgctttctcagcatgtggaaggtttttctctctctcttctttttctactaaaccttccgctcctaaacccattcctcgtgtgtatccctgtcctgaattctttctcgaccatgacaaagaaccaggtatatatcccagacaacagacccatt

SEQ ID NO: 17316 - DNA, 2300 bp, Homo sapien
acatgtgcatgtgtctttatagcagaatgatttataatcctttgggtatatacccagtaatgggattgctgggtcaaatggtatttctagttctagatccttgaagaattgccacactgttttccacaatggttgaagtaatttacaatcccaccaacagtgcaaaagtgaggaaccaaattttgaactttaattaacttaaattgcaacaaccacatgtggctaggggatactatattcaacagtgcagttctggaagttaccagagatagtgttgctaaaagtcatacagtgaccttaatgtcttaccgtttatacacataaaaagcatgttgtactttgctttttaaaaaatctcaaaatggaaataatttcacttaatatagacatcatattgacattataggtacagcatagttggttaaaagcaaataatgccttcatttattcactggctggagttgtctgacctaataagcagaggctaaattcacaattaattaaagatttcatgttcattcagccaagacatgcctcaaaccactttttgttcagctagccagcaagatacttagagccatatttaggacatcttgcaactataatcaacatatgcaaaatatcctatttcaaagaagatccttcctttataagattagtaattctgttgtatgaacaggatttttctctattatgctaaatataatcattttgtagtaaatgaatacggcaatgtactatatgaaaatttatatgtaatttgattattgtaatttaacaaatagttctcttactgaagatcaggcagcatatttttctatttagggatgaggaaacagaggtttggagaggttaagctgttttcctaaggttatataacaggtatgtggaattctgatgcaggaactcctatctgtttaatccaaagtgcctcacacccaacaatactgcttttacttgatatataatgataaaaccttgatatataatgataaaacctaactgcaatcaccaatctttttcttttttttcttttcttttttttttgttttttgagatggagtctagctctgtcacccaggctggcgtgcaatggcgcgatctccactcactgcaacctccacctcccaggttcaagctattctcctgcctcagcctcccaagtagctgggattacaggtgcccgccaccacgcccagctaatttttgtatttttagcagagacagggtttcactgtgttggccaggctggtgtcgaactcctgacctcgtgatccaccctccttggcctcccaaactgttgggattacaagcgtgagccaccgcgcccggctcacctatctttttctaaggatagagaccaaagaagccacaaccccttccaaggagtcaactgacgccaatgggatgctgtggtgcaggacacttggggggtgctgcagctgatgccccttggtctcctggtggtggaagggaaatgggactagatacgagattggcatctaagccatacaaaaaagctgtctcagacaggttgggccagtaagcacaacgtcacttatctatattggcttctggttacctaatgggtttggtttggtaaaaattaagaatcagacttctgggatgcaagctatgcctgttcaaaatctgctgtcagcccctgtgtttcaagcttaaccttgaacctcatcattaatcaggtgaccttagaccgttttatcagccacgtatctgctagcataaatctcccttctgtgaattcagaacactgatacctcacattcactaaaaatacaatgagagacagatgctcactttctttatttgctgttgtattcttggtcccactttgccatttttaaaacaggaaaacgtttcccttactcgaacgctaaagtgcaaagctgctggtgacgctgccttctcccacctccgcactccactgtccttgcaaactttggacagaggaaaggtgggcacggggcgcgaaactacaagtcccggcatgcacggcgttctccgcacaggcgcacggggaccgccgggccagccggccagccagcctgcggagactcccgggtccccgcgccggactgggactgggagcaggcagcccgggcggagcgggccggtgccgaggacggccccaggcattgctctgccccgggcattgcgcggcgcgcgtgagggggatgcggcaggaggcggcgcggcgggaggagtaggcggcggcgccctcgggagggagctgcgcgcgggccagacggcgcccggaggctccgcagtgccgccgccgt

SEQ ID NO: 17317 - DNA, 2300 bp, Homo sapien
gaaaataaaaaataaaagcgtttcaatcagtgatgagtgctgtccagaaatgaaaaaatgatgagctggaggtaaataggggaggaagggcctcttgaaggccttggaaccaagactgaaatgatgagaaaaagctacttggaaggagcacattctcagccaagcaaaaaacaaaaaaaatgggaaaacagtaaaaacgaaatcctcaaggtggatatgagctcagtgtgtttggggcaagaaaggccacacggctagagctccatgaatgtgaagagatgagaatggggagaaaaagagttaagaaaaaaggccaaccaaggatggtcctgtagaaccctggcaagatatgagatgctaagcacaatcagatgtcgctggaagcttttcagcagcaaggtaacatgaactggtttttgctttaaaaggcttgctctggatttcatcaaaagcgatacaggctggccctcacctggcccagtgcacaacacaatggctaccaacggagaaaggcagaattcatccataggccaacatccaccagagccccaacaaagaagaggaaagaacctcttggtaaccagctgcttggacttccaagaacgtgctctcaatacctaagaccactttttctgaaatccaacctcccctcaccattttgcattccccccatggatgaggctgaaaaataagatatgatgccatggcgcaaaaatctcccccatttaaaaacaggtcctgaaaaaaagaagaattgtgtttcaggaaggccagggaggaggcataaacatgttctgaacatttagattctagcacggcactgaaaccccaagaccaagagaaaccagcaacccaagtctagtgtcaggggcctcctggtcacttggctggtctgaggtgatggccaatgcccgcctgcagggtgacgaagaagccaagacattaaagacgggtcggcttgactgtcatctgctaaacaacgaataccaggaaacactatctcggcatccaacacatcaaaaggcagtccacgtgaggctatatctgtggcaataccatgccagaaatctgggctaatctgactctgctattcataaattccccctcatgttaaagcacatgtgtttgggaaggaaaaatgaatccaagtcaattttagacattgttacttggaaaccatctggagtccctggaagcataagaagccaccgcatcccctgccctcaaatgcccactgtaactagggcagtatgctcagacgggagttcagatgtcccctattccccagggatgtccccacccccatcctaccagatgccagttcaggctccacttcccacccaagaaaggtattcggtttctccgtaaacctagtggagagccctcgaggtgttgagcttgcatttgaactgcacccaaggctggattctttgctttctgattgctttagaacagcacacctgaattcctttgccacagcagcaacggaaatccctccccaggagtaggggttccaggaaaaatcccttctacctaacgctcctgtgttcaaagaatgtctagtcttgggagcgacccaccaggatttttatgtaaccttaatagatgttggcaccctgcagagccgctcctggagtccagatgtagcccattttcaccgtgatggcagcaggcggggtcttgcagcttcccggggcctgactcttctgactgtggggcctctgtccccctcccctacctggctgcgattctctgcttatctcatcttcccgaggacttgggcctcctttttgcagcctccctccctccactgaaatcagtcctaacatcaagcaggcagcaacgccattccaccagcaccttccttcctctcccacccctcaccctttccccccaccaaacgccttaagaaacccggccaggaaagtgatccagaatctcgtacagtcatagtccctgaaaacaaacacggcgggaggggcaggccgaccaggcccagcactttccctggacccgggagcagccctgaactcggcgcaggggaggggagggaagagatctccggagaccgactgcggttcggctgcctccagcacaatcagagcaaacacctgtttccaggaagacaggcggccagagggagaagggagtcccggggaaaggcagggaggacgaagcgaaggggcagccggggacgcaggtaaaggatgcgtcacactttgcgcttggcaaccggagcccggagcagaaggcggcgagtgagaagagctccggggtctgggaagttagggaggaggggt

SEQ ID NO: 17318 - DNA, 2300 bp, Homo sapien
caggtggaggagtatgagttgagctcgggtgcggggtgaccttgggctgctttttggcccctgcccgtatctccccacatggcccgtttacctgcccctcactccatggcctgctctcctgctgtctctttcattcctcagggtttgggtcccctatttgtatgccctggacatcttctttttcttgtttttcctctcactcttcccagcacacctgaaaggcagctgagctagggaacaccgggctttgagacagcaggagtgggaccatgtttggccatgtagtaacactgcttggggcaagtcactgaactgtttgaacacctcatcctcattaccactcctgagctcagcaccactcctcagggggagctgcctcctaacagacgctgcaaatgccgggtctgtttcttcacaggtttgggcctgacacccagcacttggtcctgaatgagaactgtgcctcagttcacaaccttcgcagccacaagattcaaacccagctcaacctcatccacccggacatcttccccctgctcaccagtttccgctgtaaggtagtgtctcagaccggccccttgtcggcccagctctcgtcccctctctttctctccatgaatgtgttttgtctctttcagaaggagggccccaccctcagtgtgcccatggttcagggtgaatgcctcctcaagtaccagctccgtcccaggagggagtggcagaggtctgtgccatcttgaactaatggaatcgtctcagtcgagttgggaaacatttctgtaaatagccacatagtaaatgttccaggaggctctccagaccatatggtctctgttgtaactattcaactccgctttgagcacaaaagaaacacggacaataagctaatgaatgggcttggctgtgtgccagcgtgaatttatttagaaaagcagcctactccaggctgggttgaggtgggcggattggggccagtagttctccttttccaaaattgccttgcatgggaatagcagtgatagagctcgtgtgtttcacagtatagaaaataggaaatgtgtgatgaacaaagtcacccataatcctgttgcccagagataatgattgataacattttgtgtttcttgatttgtgtatgtgggtttatattgtcagtcttttcctgtatcactaaacagtcttaagtaacaagatttttattggtattccaaatagggatgtttactcatttgggatgtttccaattttttgttgtttttaatgaatgaaacaataaatgtcttatatataaatctttgatgggaactctgttcccttcaagtcattcctaaatgtgggattactggcccagagtgtgagacttgttaaggtacttgataaatgtaagatgccatcttgaaagcctcttccagtacaatccaaccaggaaagtgaacagccttactgccccacatctttattttaattaattaatttatttattttatttatttatttatttttttgagacggagtttcactcttgttgcccaggctggagtgcaatggcgtgatctcagctcactgcaacctccgcctcccgggttcaagcatttctcctgccccagcctcccgaatagctggaattacaggcgcctgctaccacgcccggctaattttttgtaattttagcagagacgggtttcaccatgttggcaggctggtctcgaactcctgacctcaggtgatccacccacctcagcctcccaaagtgttgggattacaggcgtgagccgtgcccggcctgttttaatttttaaggatctgaaccttgattttaagtttcctgcccactccacagtatttgtattagaatagagcatgtgctggattatgactggatgctgtgtgctgttgaggttgggtagttggggccctttaagagactatactagcaagactcgggcccacaggcaacatcacggggttgaagaacctggtgtccctttgttggcatctgcgcaggctcttaacacacagcagcgatacacagccctagccgacattcagatttaccttgtgcttgtgaaaaatattgcacagggcctgccctagacctagtgaattagaatcttgagagttaggcttgggactcacaagctcccagatgattttaatgctcagcgaggttgaagagccgcctgtccaaggagttgccactccgtgtgatctggggcttgctaggaaagtgggatctcaggcctcactgcagagctgccgaactggcttctgcgttttgccaaggttcctgggtgtgaaca

SEQ ID NO: 17319 - DNA, 2300 bp, Homo sapien
agtagagacggggtttctccacgttggtcaggctggtctcaaactcctgacctcaggtgatctgcccgcctcagcctccgaaagtactggaattacaggcgtgagccaccgtgcctggccaacattattatttttttttaatctagaaaaatacacttctaagaaaattgattaaaaccaaccttcttcattagcccctaagatcacatctatgttctctttgttgcagcttcacttaaagagaggaaacttcttggtgctcaaagcaaaggagatgggcctcccagtgtgagtgtggggggtaaggcttctggggactcactgggtacacctgtccacttaaggaaatcacatttcacagaggccttgcctcttcatttcagtgggacagctgccatcgctcccatcattgctgctgtcaaggacgggaaaagcatcactcatgaaggaagagaggtgagatgcctggttttcttgattcagcagttacaggtagggtctgaaatgctgggcagagtctgtcttcttcaggccctacagacaccacttttgaaggacgtggaacagtttggacatcactcagctaagtgataaaatggcctcttttatctgtgtttgtcccgcatgtcaacacggctgcattcgagcatttttgtagattgtccatttaggatctagtcaccgtcctccttaaagggtgcatgctttccttggtacttgagctcaggacagtgtctaacaacagaccccatatggatgggcctggggtttatggtccagaggaatgccacagtattctatgtcaagatatttcctctgacttctgaggacattaggaccagtggccacagactgaagaaaaccttaatgccaagcctcctttcctggccagtgtaggcctgaagtgcctcaacctgacagttacctgtttaggtatccacaaagagaccagaagggtgttgatggtgatgtgtaaagttggttttgtgctttgtttacctctcagctcactggataggatatgtcatgttagcagttgccttgaaggcagttcagtttggtggctgagctgtgacccccagtgggcgggcttatttggttttgcagattttggctgaagagctgtgtactcctccagatcctggtgctgcttttgtggtggtagaatgtccagatgaaagcttcattcaacccatctgtgagaatgccacctttcagaggtaatgaggggtctctagggtgggagaagtgagagctgaaacccagcccagcatcgacatgggcatcttgtggcaagagctgtgtttctgggaagaccactatctgggtttacagttcagaggccggcactcctgccttaagtcactgttggtagttggtgggctccggtgtacacagcctcaaagtgaaattagaaaagattgaaaactagaaacaactgaggactagaaattcaactagaactcttacagctcttataccagaagaaattctagaacttttttgaattctaactaatgccccagattatcatttggattattttgaactgaattaattttcttccattacctgcattgaaacaaatgaggtgggtcagagtgtgtgagactgtcgtggtcaagagtccgtgttatgggatggactcacagctggggaatgtcttttgggctaactgccactctgttgttgtcctctatcgaagttaaccagttttgcggttcagctttcattccagatggaatcatctttgacccacctatctgagtttgaatcttttcccccactcttaatggtttacctgtatttttcctgttcctagtttgtatctatctgtattttttcacttgtttttttctacttaccacaacaaatccttttgggctgctgtaccccttccgagtcagagcgttaggagttgtttcatggtctgctttattctctgtgggtgaatttggatgcgctggtagccccggctttgtattttaatccagttttgggcagcaaaacctcttcaatgaatcaggtgtcatttgagagccatgtgtggatgtgtgatgatgctgggatagataaaaatagctactgtgtatatttctttttaaagggaactggagggaaacacatcagcatgttagtaagtggtctgttgtccaggtggtgaaatttcagatgattttcatttctcgtgcctgtgtctcaggtcctctggaaggcagacaccagggtggcattggaggtgcaggaggtttattcgaggaaatttgactgtgagagaggaaggagagagggagcaggag

SEQ ID NO: 17320 - DNA, 2300 bp, Homo sapien
gctaatttttgtattgttagtagacacagggtttcgccatgttggccaggctagtctcgaactcctgacctcaagtgatctgccttcctcagcctcctaaagtgctggggttacaggagtgaaccaccatgcccagccttcaattaccttttatttattttatttatttatttatttttgagacggagtctttctgtgttgcccaggctggagtgcggtggcgcaatcttagctcactgcaacctcctcctcccaggctcaagtgattctcatgcatcagcttcccgagtagctgggacttcaggtgcccgccaccacacttggctaatttttgtgtttttagtagagacggggtttcaccatgttggccaggctggtcttgaatttctgacctcaaatgatcctcctgcttcagcctcccaaagtgctgggattacaggcgtgagccactgcccccaacagcaagtaccttttaaacattagagacatttagttgccatcctcaaacccgtttgggtgtgtggagagaatgttgggtcgtgacatggttgttagttatctaaagatgtcagccatcaatcatcactgtgtgatgtgcacactgaagctgtaatccttcatctaggatgatattttttaagatggaaaattctacaaccctgagaataaggatttcagatccaaatttgagactcagccctacgagtaactctttaacttcagagagttaaaagaagatgcacagttgatgaagatttaaaggagaaaatggaaatcaaatgtcatttagcactcaaaggcctacatgtcatttctgacatttttctgtttgtgtgaaattttttttttcctataaaatgattgtgaagttttctggtagaattattgtttgcctttctaatgtaatagcatattagggtttttttttttttctttttctttttttgagacagagtctcactctgtcgcccaggctggagtgcagtggcacgatctcgggtcactgcaatcttccgcctcctgggttcctgcctcagcctcccgagtagctgggactacaggcgcacgtcaccacacccggctaattttttgtatttttagtagtgacagggattcaccgtcttagccagggtggtcttgatctcctgacctcatgatctacccgcctcggcttcccaaagtgctgggattacaggcatgagccgctgtgcctggctattagagattttttattataatttatctccaagataaaagcagtgacattatattgccacataattgaaaaatacaagagaaataaaaatcatccatgcttttgttagcctatcactgtcattgaaatattatgttacatggcagtttgcttgctggttgctctgttaggcaacgctctggtgacattcctttagctattaattgaggaatgtagaatgacagaacagtgtttctcctcaatgatacttgaaggatatttattaactttcatattgaattacattttattaaatttataatgagttaatgctgggaaataaaacactgatttaagtcattttggcttttagtactaaagcatttgacaataaatgacttcttcagaatatggtataccttctgaaagcaataaacgcattttaatgaattgtaaggaaacaacatcattttattttttatttttttttttgagacagactttcgcttttgttgcctaggctggagtgcaatggcgcgatctcggctcactgcaacatccgcctctgggttcaagcgattctcctgcctcagcttcctgagttgctgggattacaggcacgtgccaccacgcctggccaattttgtatttttagtagagacggggtttctccacgttggtcaggctggtctcaaactcctgacctcaggtgatctgcccgcctcagcctccgaaagtactggaattacaggcgtgagccaccgtgcctggccaacattattatttttttttaatctagaaaaatacacttctaagaaaattgattaaaaccaaccttcttcattagcccctaagatcacatctatgttctctttgttgcagcttcacttaaagagaggaaacttcttggtgctcaaagcaaaggagatgggcctcccagtgtgagtgtggggggtaaggcttctggggactcactgggtacacctgtccacttaaggaaatcacatttcacagaggccttgcctcttcatttcagtgggacagctgccatcgctcccatcattgctgctgtcaaggacgggaaaagcatcactcatgaaggaag

SEQ ID NO: 17321 - DNA, 2300 bp, Homo sapien
gcgttctggctctcatcagtcttccagatactctgcattcctcagagaggaacatatctccatgggttgagttcagctcccagggagatgggtttccctgccttaagtcggcaagtacctttttttttctttttttgagacagagtctcgctctgtcaccaggctggagtgcagtggtgcgatcttggctcactgcaacctctgcctcccagggtcaagcagttctcctgcctcagcctcccgagtagctgggactacaggagcgcaccaccatgcccagctaatttttgtatttttttagtagagacggggtttcaccatgttggccaggatggtctggatctcttgatttcctgatccgcctgccttggcctcccaaagtgctgggattacaggcgtgagccatcatgaccagcctttatgtttctttgtttgttttgtttttctgagatggagtctcgctctgttgcccaggctggagtgcagtgttgccatctcgacttactgcaacctctgccttccaggttcaagtgattccttgcctcagcctcccgtgtagctgggatcacaggtgcctgccaccatgcccggctaatttttgtattgttagtagacacagggtttcgccatgttggccaggctagtctcgaactcctgacctcaagtgatctgccttcctcagcctcctaaagtgctggggttacaggagtgaaccaccatgcccagccttcaattaccttttatttattttatttatttatttatttttgagacggagtctttctgtgttgcccaggctggagtgcggtggcgcaatcttagctcactgcaacctcctcctcccaggctcaagtgattctcatgcatcagcttcccgagtagctgggacttcaggtgcccgccaccacacttggctaatttttgtgtttttagtagagacggggtttcaccatgttggccaggctggtcttgaatttctgacctcaaatgatcctcctgcttcagcctcccaaagtgctgggattacaggcgtgagccactgcccccaacagcaagtaccttttaaacattagagacatttagttgccatcctcaaacccgtttgggtgtgtggagagaatgttgggtcgtgacatggttgttagttatctaaagatgtcagccatcaatcatcactgtgtgatgtgcacactgaagctgtaatccttcatctaggatgatattttttaagatggaaaattctacaaccctgagaataaggatttcagatccaaatttgagactcagccctacgagtaactctttaacttcagagagttaaaagaagatgcacagttgatgaagatttaaaggagaaaatggaaatcaaatgtcatttagcactcaaaggcctacatgtcatttctgacatttttctgtttgtgtgaaattttttttttcctataaaatgattgtgaagttttctggtagaattattgtttgcctttctaatgtaatagcatattagggtttttttttttttctttttctttttttgagacagagtctcactctgtcgcccaggctggagtgcagtggcacgatctcgggtcactgcaatcttccgcctcctgggttcctgcctcagcctcccgagtagctgggactacaggcgcacgtcaccacacccggctaattttttgtatttttagtagtgacagggattcaccgtcttagccagggtggtcttgatctcctgacctcatgatctacccgcctcggcttcccaaagtgctgggattacaggcatgagccgctgtgcctggctattagagattttttattataatttatctccaagataaaagcagtgacattatattgccacataattgaaaaatacaagagaaataaaaatcatccatgcttttgttagcctatcactgtcattgaaatattatgttacatggcagtttgcttgctggttgctctgttaggcaacgctctggtgacattcctttagctattaattgaggaatgtagaatgacagaacagtgtttctcctcaatgatacttgaaggatatttattaactttcatattgaattacattttattaaatttataatgagttaatgctgggaaataaaacactgatttaagtcattttggcttttagtactaaagcatttgacaataaatgacttcttcagaatatggtataccttctgaaagcaataaacgcattttaatgaattgtaaggaaacaacatcattttattttttatttttttttttgagacagactttcgcttttgttg

SEQ ID NO: 17322 - DNA, 2300 bp, Homo sapien
gtctcagccttcagagtagctgggacaacaggtgtgtgccaccatgtccagctaatttttacttatttttaaattttttagtattttttggtagagatgaggtctcgctttgttgccagagctggtttgtttgtttgtttttgagatggaatctccctctgtcacccaggctggagtgcaatggtgtgatcttggctcactgcaacctctgtctctggggttcaagtgattctcctgcctcaacctccccagtagctgggattacaggcccatgcaaccactcccggctaatttttgtgtttttagtagagacggggtttcatcatgttggccaggctggtctcgaactcctgacctcaggtgatccacctgcctcggcctcccaaagtgctgggattacaggcataagccaccatgcctggccacagagcaggttttgaactactagcctgaagctattctcccgccttggcctcccaaagtgctgggattacagatatgtgccacggtgcccaggctttaagcaacttttaaaaactatcatttttatttcaaatacttatggagatggtggtatgataatcttttcagtttgtaacgccctctaactgtgtaaagtagatctgaagtgttttcctgaccctcactgggatggttatttcaagtacaaaacgttttcacaccgtgggtgataatcttccataaaaaatttcatatttgaatgaaaacagctcaagaaatacactaatgagcaaaaatatatggggaaagaggaacgtgtagttttgacttaactgaagaaaccaagaggaaactggtctccatatgaaaatgtgatcctggaaagtcaggtgtcaagattttcgagtaggaatctacatgacttgaatctcccttacttcctgaataaaagtgacatctttcagtatttatttaaaaaaatcatatgtcagtggagcttccaggtaaattatctttaaaaaatcatatttgagtggagcttccaggtaaattatcttcctcttttaagggagctccctgtatttctagcggctttaactgatatccctttcagtgagaaatcctcattagctacataagaggggactgggtgtttttttcaaaaagctggtattgggacatctacctctgtgatgtccctggtcagctatattgtctaggagttgaaacattttgtattaattttctatcatttactgggtgcctcttctgtgacagtgccactcaaaggtctattgatatattatcaggtgactgaattctatattctgaagtaggagatactgttattgctgttattacattttacacataagaaagctgaggctctgagaggtcaagatcacgcagctaacaaatgagccaagactcttgctttagagcttgtcctctattcttgcttttctttccaaaaaacactacaatttttgttttgttttgttttgttttgagacagggtctcgaggtgtcacccaggctggagtgcagtggcgcgatttcgactcaccgcaacctccgcctccgcgcttaagcgattctcctgcctcagcctcccaagtagctgggactacaagctcgggacaccacgtaaaaatgatcaagttctaacatgtatgcatacgaattacaatggaaataaaattagcaaagcgcttatgctaatgctcaatacaattgatttcctcacatttaatcctcacaaccactacaaccacctctaactcaagctctgagggactgacgtgcccggaggacacagctcttatctggtgagaacaggagcgttttagcgaaactccaaactcctaggtcccgccttccccaggaaggcttttcctggcactgtgcttccggaagtcccgccccaggagaaaaacagcttccggaaaaaattgcggccggcaaaccggaacagaactaggggcggggccgcttgagacgctctagtattcctctactctatggccactgtcaattgacaagtcccgagcggtaaagctcctttctattggatgagcagcctcgcgtaggcgggaagctcggtgcacggcgcgctgattggctggatccgccatgcggagcggctaggtggtgcacgggaaacgcgggcgtaggtgaccggcggctttctcagttttggtggagacgggcgcatgtgggcgctttgctcgctgctgcggtccgcggccggacgcaccatgtcgcagggacgcaccatatcgcaggcacccgcccgccgcgagcggccgcgcaaggacccgctgcggcacctgcgcacg

SEQ ID NO: 17323 - DNA, 2300 bp, Homo sapien
tagcagggcacaaattcatggatccatgcaagcccagagttagaaccactaggtgccccttggaagctgaaaaagtggaagctgacttccacttccgtggtcaaatagagcacagaaaggctgcgaagttcctgcatggggacgcagaaatgcctggtaagtttcctgcaccgtggaccttgagcctgcggtgggcccttgttagcacccgcagaggtcccagaaagctgcctccacagcttgcaggggctggtaagaagctcccaagctaccgcccacatggtgaggcaacctgtggaggcaaggaagccaaaaaataaggaacaaataggattagaacaaaaaaccacctcatgcagcttccacgggccacctccctccattagacagcaaggcggtttgtatcccttcctgacctgctctccggggagcgcacgaagaggatatagggtcaggggaggcaagggaaagaggaaaccgcagtttatgaaaggacatttaacctctttgcgagcgtgcatgcgcgcgcgcgcacacacacacacacacacacacacacacaaaagtacaaacaacattaaggaaatacacactacattaaaaattgggcatagggacttggaatcggagttgaattttttttaaattttaattttgcctttgatttatgcattggtttttttttttttcgtaagaggttgttcctttctaggccctggaggactgtatcatcttatacaaatccaagggaaaacaatcaaaataagaaaagaaaagaaaacaaacaaacaaaaaacagactgatacgagaaagagctttgctccaagacccgcagcagacagttgagtaggtagaagtccaagctgctgcagaggaattcggtttgctccagacaaacgggggcgtggcgtgcagcgcagtactgggaactgctgcaaacaaaacttccaaggggacgaggagtaggttccaggcgatggaaagcagtgggatggggaaggatagggcaacagtgccaagaggggagcagagcgcggggaacctggagagggagggtcagggctgcggagggctgagctgcggtggagagctctggggcccctcaccaagctagtggcgtcttgggtggaagtcaggcccccagagatccggccggccttagctgtcactcaggcaaccccggagccgccgcagacaccggatccactggaagggggcgaagccgcggggaggaatgggggacactggggaaggggcgtcgcccctgccgcccccgccctctccagtgccattgggcggctgctgcggagcccgcgccaccttttctccatcccaccccgcccgtctggccccgcctggccgctggtccgcgccccgctgcgctcgtccgggggctggtccggcccgggcctttgacgtcaccagcaagtttgctgccctcggcgtcccacgtgtggcggcggccagcggcggcccaggaggcagccggtgagcgcctgcgagcagagtggcgggggccgctgacaggtcccgcgcagcccagcccagcccagccacgcggctcacaggtggggtccaagagcagtttggagcaacccggcgctacggagaggggtggacggctctgcacgggcctcctgtctcccgctcgggcagagggactcggggggacctcgctccttggctgagagaacctgaactcgggcggagagaacgcgcccaggcgggcaaggggaccagagaaagccggggctggaagtcactgtcgctcgccactgtctggagcgcacggagcgcagaggcccggcagccgcgcgtgccctcacggggaccgagccagtgatgcaggatcgctgagcggagatccgcgccgagaagtctctcggggccggggctgagacgcacgccttcgacaccgctgccaagaccccgattccggcgactcttgcggggaaccgaggggccaaggctgccccaagctcaggacttgggcgagtctaagacgatggtttcttaagcacggacccgcgttccccttcccgctccctcgactggaggcagggatcctgcgcggggcccccgggattccgtttccccgcggagccccggccgctgcctcccgggacagttcgcacggccacaggggcgcacggcgatgtggcctccgtccagcgcgctggcccgccggggggatgctctggcacctgtcggggtccaggcctagcatggccggcgcgttgcccgacgtcgcctccggctaggatggcccctccgggcccggccagtgccctctccacct

SEQ ID NO: 17324 - DNA, 2300 bp, Homo sapien
ccagcctgggtgacagtagaccccatttcaaaaaacacagaaaaaaattactagaaattgaaaattatccatgcagcttttatttgtggctcacattttgcttctaaagtgcagagctgccctacatgtcatgcaagtgatggtgagaaccatgtttcctacatcgagcatctttaatacccacgtaaaggaaagacctgtgctcagaaagtgaaagactaaacacatgctatgatgtcatgttggagctagaagggaacttcgagtccatcattttccagtccaggaaactggggcatgtttataagcattcacgggactgcatgccttcaaaacaacttaaaaatggtctttgttttgttgtcttccttctgcaaatctgactgaagtacttagggaaaaaatgtgaaaacacaggaaagtttaagttagcattagatctcaactggtttgtcaatatccaattttagaacacaaaaggacattacagcttggcagggcttgtccatcctcgtaaacgcccagcgctttacggcatcagaatctaaaaagctcttcactggttgtcgaatcagttgggattggtagttcataaacataaaaccataaaccatatccagcagtgagtatttatctagcagggcacaaattcatggatccatgcaagcccagagttagaaccactaggtgccccttggaagctgaaaaagtggaagctgacttccacttccgtggtcaaatagagcacagaaaggctgcgaagttcctgcatggggacgcagaaatgcctggtaagtttcctgcaccgtggaccttgagcctgcggtgggcccttgttagcacccgcagaggtcccagaaagctgcctccacagcttgcaggggctggtaagaagctcccaagctaccgcccacatggtgaggcaacctgtggaggcaaggaagccaaaaaataaggaacaaataggattagaacaaaaaaccacctcatgcagcttccacgggccacctccctccattagacagcaaggcggtttgtatcccttcctgacctgctctccggggagcgcacgaagaggatatagggtcaggggaggcaagggaaagaggaaaccgcagtttatgaaaggacatttaacctctttgcgagcgtgcatgcgcgcgcgcgcacacacacacacacacacacacacacacaaaagtacaaacaacattaaggaaatacacactacattaaaaattgggcatagggacttggaatcggagttgaattttttttaaattttaattttgcctttgatttatgcattggtttttttttttttcgtaagaggttgttcctttctaggccctggaggactgtatcatcttatacaaatccaagggaaaacaatcaaaataagaaaagaaaagaaaacaaacaaacaaaaaacagactgatacgagaaagagctttgctccaagacccgcagcagacagttgagtaggtagaagtccaagctgctgcagaggaattcggtttgctccagacaaacgggggcgtggcgtgcagcgcagtactgggaactgctgcaaacaaaacttccaaggggacgaggagtaggttccaggcgatggaaagcagtgggatggggaaggatagggcaacagtgccaagaggggagcagagcgcggggaacctggagagggagggtcagggctgcggagggctgagctgcggtggagagctctggggcccctcaccaagctagtggcgtcttgggtggaagtcaggcccccagagatccggccggccttagctgtcactcaggcaaccccggagccgccgcagacaccggatccactggaagggggcgaagccgcggggaggaatgggggacactggggaaggggcgtcgcccctgccgcccccgccctctccagtgccattgggcggctgctgcggagcccgcgccaccttttctccatcccaccccgcccgtctggccccgcctggccgctggtccgcgccccgctgcgctcgtccgggggctggtccggcccgggcctttgacgtcaccagcaagtttgctgccctcggcgtcccacgtgtggcggcggccagcggcggcccaggaggcagccggtgagcgcctgcgagcagagtggcgggggccgctgacaggtcccgcgcagcccagcccagcccagccacgcggctcacaggtggggtccaagagcagtttggagcaacccggcgctacggagaggggtggacggctctgcacgggcctcctgtctcccgctcgggcagagggactc

SEQ ID NO: 17325 - DNA, 2300 bp, Homo sapien
aaacctgttgttgaatatttgttactttatcagtaattattccacttttattctgaaaataatcctaagttcttgttataagctggagactatgctcagataactgaggccaccactttgatggactacgagttgttctggtgaaggcaggtgttataccataaaatatcttgaaataaaatgttcagagtcaacaggagctgtgtgggtaatactgagaaaaccaatagccctacaaaaaaaagtatgcatacatgtataaagttcctccaaggaaggggacagggaggtagaggaagactgctactttctatgatgaggccttctgttctaattaattttttttccacatgggtatgtgttacttggagaatgtctttggatgaatcacattaattttcagtttctctatctttgtaatgcagaaaataatgtcttctcacctacctttccagaaacgtaaggaaatgtatacaaaaatgtttcaaaaatgctgaagatgcatttaataggaaatataggtacagcaggacaggctataacaagacctagaggatttgacagggcatcagcccagtgctgtccaatgaaaacataattaaacactttctggtagccacttaaacaatttaaaatgaggcagacaaaagtaattttagtaatctatttggcacaatgtatctaacatattatcatttaaacatgtaaataatatgaaaattgttgagatgttttacagtcttttctttcatgtgacgccttcactatccagagcgtatttgatgccaacagcacatctcacattggaccagccacagatcagtttctcagcaacccctgccactagtggctactggactggacaccacagcttgaggttgtgcccagctggcaagcatcttccaggtcacccctaatacccatgtacttctccaggagcactggaatatgccctacaaataagcaaaaatgaccaaaagttagagaccaaattccaaaagtggtgtcatttctagtccttaaagtggtcatattctttttttttttttttttttttttttgagacggagtcttgctctgttgccaggctggagtacagtggcaccatctcagctcactgcaacctctgcctcctaggttcaagcaattctctggtgcctcagcctccccaagtagctgggactacagttgcgtgccaccacacccagctaatttttgtatttttagtagtgacagggtttcaccatgttggccaggatgatctcgatctcctgaccttgtgatccacctgcctcagcctcccaaagttctgggattacaagcgtgagcgaccgtgcccagccaaagtggtcatattattattttaaaattttatttttagttgttatggatatacagtaggtttatatatttagggggcacatgagatgttttgatataggcatgcaatgtgtaataatcacatcatggagaatggggtatccatccttttaagaatttaccgtttgttacaaataatcaaattatactcttttagttattttttaatgcacaattaagtaattatcaactacaatcaccctgttgttatcaaatagtaggtcttctttattcttcctatttttctacatagtgttattattaataatacctaatatatgttgaatatttactatgttccagacattctgctaacggttttacaagattatttcatctattactcacaaaaaaactatacaaaaataattactattgttttatcaccattttacaagtaagtaaactgggtaaaaattatacgatttgcccaaggtcacagaacttttgggttttggagccaggattaagcaccagtcaaatgttcccagagcccacaccactaacgatcaagctatgcactcatttctttgtcttctgcttttttcactgtcaccactgcctcctcctaaatactaactcttgtcccctgacctgacatggcactgtgttgctgaagcctggaagcagagatagcattttctgcaagctatgagtgatgctatatttaaaatgaccagtctcctggaatgccagtctctccctgccaacacaaacacatagtcttctactttcagctttccaatgtcttctgaggcagagcattgaatcacttctctttcttcttttttaaatttttatttgaatcacttctctagaggaaggctagagggctcctcattcacaagtctacaattcttattcattttgctgactaatatgaagcggactctgttccccattcttataagacgggccag

SEQ ID NO: 17326 - DNA, 2300 bp, Homo sapien
atttaataatggcatctccataaaaagcaataattcatattctactttaaaaatcctttctcttatgtagaggagtaagtggcatcctggtggcaccagaaggatgtactggtgagcttgtgtagtggtcactaagttaacgcgtgttgctttatttgactgatactgatgttgccatcttagcttccggcagttaggtgggcagaaaacccaaagttagtaactttggacagttgcaacaatgttagtaactcaagggccaaagtgatggattaaacggccagtccaggcaatctctggttcaccctcatgatgacagagtgcttttaggtagtgaggcagtgcttagtctcaaggcagcctcccttcccctcatgcattacctggtgtttgtgggcaggagtgtggatcctgtatacatgcctggggttgtgggtgtggggaggggcctccagtgtgctggggtataccctggggcctctgtaggtgcctgatccatagatgctccctgtggcctcgtcacaggggtcaccaggcccctggtggcttacagtgtggaagttggaggcttcaccataatctgtggcctgagcttggcctcagggaatatttccgggtggtgtcagctgtatctcctccttactcagtgtcgtaggggagcagcgactctctgggacagtgggatgggtggtaaaagaatttaccaagacagttgtaggtaaagaaaggcagattcattggacaccacagagcttacatgtttgtggtgatgtgggtgtgaacatacgattatcgacagtgcataatgcttgatgaaaataatagatgctgatgttattgttttatgtatttaatatcctatattttttattgttattttagagtatatgcttactacttttttttaaggtaactgtgaagcagcctcaggcagtttcttcaggaggtttccagaagaaggcattcttatcaaggagatgacagctccatgcctgttactgcccctgaagaccttccggtgggacaagatgtggaggtagaggacagtgaaattgatgatcctgaccctgcttagccttaggcgaaagtgtctggttgtgtcttgttttttaacaacaaacggtttaaaagtaaaataaataaataatgaaaaaagctcatagaataaggttaaaaagaaacaaaatatttttgtatagctatataatttgtgtggcttttttgtttatttgtttgagacagggtctcactctgtcacccagactggagggcagtggcacaatcacagctcactgtggtctcaacctcttgagctccagagatcctcccacctcactcaggaggacgtcagtcctccaggcagacgtcagtccccaggtggaccctggactcaaagtgtataccaggccccaagttgacaaccaggccccagatggacaccaaggccctaggtggacagcaggcccatgttgaacaccagactcatgaggacatcaggccgcaggtagacatcatgccttaggtagatacgtaggctccgggtggacattagacccaaggctccaggtagacattagacccaaggctccaggtagacattagacccaagtccccaggtgatcatcaggcccaggtgaaaactcaggccttaggtgcacatccggcctcaggtggacacccaggccccaggtggacacaaggccttaggtgaacaacaagacccagtaggccatcaggcctcagttggatacagtccccaggtgaacacaaggcccccagagggacataggcccaacgcagacatcaggccctaggtggacatcaggcctgaggacatccggcccctggtgaacatcaggcacaggtgtccaagcagaccttgggtggacataacagtgtacaggtaaggagttgacgtggggggagggtgagtagtcagcagcccagtggagtcctggagtaggtcttatggaaggaaggggtctagggaacagaaccgtaaagaagcgacgtcacttcctggatgatgaccacacgaacagaacttagaactctggtaaccaggcacccatatcctagagtcagcgccgtaaacagctcacttggtgggagacgctcaagagagcaagatgttctcgtgttgcttctccactttgagaggttgctgcttcaggaacggagggagtgagagccttttctgacgatgccgaagaaggctcatccctcaccccagacgcctgtcgcccgttgtaataaggcgcatccaggtaccacaggacagcctggggcaggccctagca

SEQ ID NO: 17327 - DNA, 2300 bp, Homo sapien
agtattctcagttctgtatatcattatcaccagcggtgctttaaagagaaaattataggtctctctacatctatcatacacctcctcagattcaatgggtctagaggtggcttagacatctataattttttaaagtcctacatttgattctgataggctgccaaggtgaaaaacactaagttttataaatcacagaagctatgactcttcaagatgcttaggtgagtaatgccttatggcatggtgaaaataacaccctcacaggtttcagggactcaggtcttggttctggcactcaacagctaggtaactttgatcagattacttaaaactctctgggccttaatgtgccagacttagagaggataacttttgctctaggtttaaacaacaagtgtttataaaagcacatggaaaattataaagagttcaaaaacttttaacgtagtacttaatgctattttcctctttatggagtgtcctttccctttcttttatgctgtaaaaatcttttttttttttttttttttttactttcagatctagggtacatgggcacaacgtgcaggtttgttacatatgtatacatgtgccatgttggtgtgctgtacccattaactcgtcatttacattaggtatatctcctaatgctatccctcccccctccccccatcccacgacaggccccagtgtgtgtgatgttccccttcctgtgtccaagtgttctcattgtgtatgctgtaaaaatcttactgttccttccagagcaccaagtttagatctctgaagctttccttaaaccaactgcacagaaatgttacctcatcagggtttctgcagcactttgtatactacccctatcacactgatagtgacaatcgacaacctcttgtcccctcattggtctagtgttaagctcctacagaatcgggtggggggggtgtcttaatctcttcagcgtcccctgtgcctagcaatgttagttgaggtgaaccaaaacggctatcctctcatcattgaaaacacagaaaaaaatggcctttttagaacccaattacctattttttctcttctttttcaaaagcggaatcttttcttcaatctactttttacttgtggaaccccaatctgaaaagaagatcgaggggttgggggatgctgagatctaccctggtaatcacaacacttatgataacacaggtaataatctattagtgcctgtacctagtaggtgtctggctacccatgaaacacatttatctaattctctcaacctcttataaaagatgtaccattactactccattgtattgctagataactgaggttcagaggacttaggtaatttgctccaacaaggtcaaaaggccagaactagaatacggatttcactccagaccaccaaatctgaacctctacatgcaatctggagatatctggatgattcagttcctttagtgtggctcagaaacaagtaacccggagttcctctgggctcccatttgatagagactacggtaaagtgtaattgattagacgtggaggtggaagcatccccacgagaaccatttcctcatgatgctcctgtcaccgggaagtgttctaattttaactttatttttattttaaaatttatttttagagacagggtctcactgtgtcgcccagactgcagtgcagtggcgcaatcaccgcaacctcgacctcccaggctcaagcgatcctcccgcctcagcctcctgagtagctgagaccacaggcacgcgccaccacacctggctaattttacattttttgtagaggcggggtctcgctttgttgcccaggctggtctcgagttcccaggatcaagcgatcctcccgcctcggtctccctaagcactgggattgcaggcgtgagccacagcgcccggccgctgtaactttaaattgcccgggaggactctgcagcccaaccctgcccacctcacccggtcaccggaggatgcctgtcaacttctgggagctgcaagcgcgggccggccagtcgtccgcgcgcggctttttcttcaggacagcggaggcacaccgtgctttgcggttcccggaagtccttcaggcctcagacctgtcagcccgccacactccagccagtcccttccgatcacctccagacaccacgctctcctttcggagcccgcccgccggaagtggcggcccggaactactcccacaggggggcggggaaggaagatggcggcgcccagcgtcccgtgaggagagaggacacagggatcccggggagcggccccagactcgta

SEQ ID NO: 17328 - DNA, 2300 bp, Homo sapien
tagaagcaaaatcaggcatgatactactcgatcactaacactgtcccagtttaccttctctgccaccttgtcccaccatgctgcttccccatcaagctctcttagtagatcttccaaatggatcacagggagttatacagaccacttactagcagagtttttggcaattatgttcacagcttcagggagtaagctgtctattaattccttccataccaccactgcaaagactgatgcagcaacaaaccatatgggccacatgcagcccacctactggaactgggcaattcacagtagtcaagcagaattgtcctatagctgacaatatagaatggaaaggcagaaaaacagctaatctgaaggatgcatgctggaaaaacctccatacagagaagatatttgaagcaacataaaaggatgagttctctgagaatgagtgcccaggatcaggatcaaagaacattcacagtcaggtatggtagaatgtaacaaagaagtgattcaaaaaagaatcacaggactttaaaaaacaacaaacaacaacttttcattatggaaaatcacagccatgtgtaaaagcagaagagtaccatgagcccccattacttatccccaagcttcaacaattaccagaccctagccaatctattctacctctccactttacaaaccaaacaggacctttgagatcacctacttcaattacgtcattttatagatgagtaaactcaattccagaaaagtcaaatgaattgccctggaatcacacagaccagaagacagccataaaataacattatgaaaaagaacgaagaacgcaatttcatggagtcacagtgtcaacatcaccagatggtgcagagagcttgtgtgtggtaggtgacaagtgaaaaaagtttctgggatgtgatcaaaaggcagtccctggcttctcttatctggcctctaatatgcaccaccggcatcacattcctcacacaaccattagttaatcatctaacgtcctctttaagatctccatggggacaaattgcatccatccacaaataactattgggagcaaacaatgtacactaagtactgttctgggcactggaaacacagaggtaaaccagagatggacactgtccctgccatcacaaggtttatattctagttgggaaaaacaaataataaacgagtatataaataaacaagtatagactgtgctaaccataatgaaagaaataaatggaatgatgtgaaaagaaagaagtagggggccctagtttatatagggtggtctctataaaggcctctctgaaaaggtgacatttgagatgagccattaccaagagtcaaggaagaacattccagctccaatatacatttgtcactagtttcttcgagtgaaaggatattaaagaccactctggcggtacagagacaaaagtctgatggggactacactccgctgtctgcaactgtcattatcatcaacgttgtcatcatgaccctttatattggaacaaggcttctgagtggaagcaaagcaccttccttgtcattgcaagccagtggctagaagccgaggctctgataaggaggactgtggaaccccaaggttctgctctgccctctcctccagcttccactatctgaaaacctaaagaagcaggaagacaccgctcttccgcagaagccggatggaggaggctgtgtggaccactaaagccacagtgcaagactggaccctagctccgtgacctcttcactccaagctactccagaggtcatttcccccaccacaccggtggccggccaacctcgccaagggctccccaaggttgcagccagccggaaccacggcctcgcacgtggtaataagagaagaatttcccccaaggtcgtgcccaaggcgggtacagtacctgtcaggaggcgtgaggagagagtgtgcggagatgcggccataatttacgagtctggggccgctccccgggatccctgtgtcctctctcctcacgggacgctgggcgccgccatcttccttccccgcccccctgtgggagtagttccgggccgccacttccggcgggcgggctccgaaaggagagcgtggtgtctggaggtgatcggaagggactggctggagtgtggcgggctgacaggtctgaggcctgaaggacttccgggaaccgcaaagcacggtgtgcctccgctgtcctgaagaaaaagccgcgcgcggacgactggccggcccgcgcttgcagctcccagaagttgacaggcatcctccggtgaccgggtgaggtgggcag

SEQ ID NO: 17329 - DNA, 2300 bp, Homo sapien
cagtctcccagggcactgctggtccgtagggattcattggtcggggtgggagagttaaacaacatttaaacagagttctctcaaaaatgtctaaagggattgtaggtagataacatccaatcactgtttgcacttatctgaaatcttccctcttggctgcccccaggtatttactgtggagaacattgcataggaatgtctggaaaaagcctctacaacttgttacagccttcacatttgtacaattcattgattctcttttccttccacaataaaatggtatacaagaacaggagtgtgtgtgacgtcattggaagtaatcatcctgtgctgagttcgcacagttcttggtagaaccgacacttgatcacgccttcaagagctggcagagggtgcgtgggaggttggttttgtttcgtaaattgacaaattgtagttgtgtatatttatgaggtaataaagtgatgttatgatttatgaagacaattgaaataatgaaatcaagctgatgaatgtattcattacctcagatacttatttttgtgataagaacatttttaatgtactcagtaattttgaaattagaatacattatttcctgcattcacacagtgtgtgatgtacgtcaaagggaggagacgtactcatcataactgactttgtaccctttcaccatcttgtacccattccgttcaactcccagcctctctaaccaccattctactctctgcttcaagtctgattattctggattccacatagaagtaagaacatgcagtatttatctttctgtgccatattaagttgagaactttaaccttttcgcttaagagcagcaccttctggcttctctgacatctctggattgccagcatcactatgtgaggccatgattaagcaaaataaagcttactgagcacaagctctgcaatgccaccacagttggatttgataaccgagatggctgctaagtgactcatgggtgggacagtattcagcatggatctgctggacaaagagataattcaggtcccaagcaggtgacgctagattgcatcacactaagtacgccacacaatctgaaacttatgaaatgtttatttctgtcattttctatttagtatctttggaccttggttgaccatgggtaactgaaacagtggaaagagaaaccacagataagggagaactgctgtacatatctgccagcctggagaaatgagagcaatatacctgcttcttgtttgttggaaacccaaatgtaattgacctgctggacacattacactttttggcatcttttggccactatttcctaattgtaagatgtgaagatacgctctggatcaaagaggctctcatgttcgcttaataattcagagtccatcactcagtggctggactctgccatgcacatcacagagcatctgagaggcaaggtatccaccagcgtgggacaactctatgcttgcattctgatcatgcctcactcctcacacttcagcttgtgtgatgccaccagtttgagccctctgaaaatcccatctgaccactgctaacctcctctaccaccaccaggttggttgaaccaagcatctatccgagacacatgcctgcaagacatgcctgcagtttattttcctctttgccccagccttgtctgtttttctcatggcagccagcatgatccctctaagctaccaggcagatcctgccattcccattctccaccctgtagttgctttcctacctggtcccatgccatctggtcctgctcccatctctgatcttggaaataccttcttgccacacctactaccctgcccacagatctccacgcttttcttcaatactcaggcacacccgctgtggggtattcatattaatacctcctgttccctctatgtggggtcctctcatttcattgagaggacacctccttagagagggcttttttggccactttatcaaatagctcccctgtccccacctccttgctgtgctttgctttttttttttttttttttttttttttttttttttttttttttttgagatggagtctcgttctattgcccaggctggaatgcaatggtgcgatctcggctcactgcaacctccgcatcccgggttcaagcgattctcctgcctcagcctccagagtagctgggattacaggtaccatcacacccgggtaattttgtattttagtagagatggggtttcaccatgttggtcaggctggtctccaactcctgacctcaattaacactatttcatgttctatgtctatttacata

SEQ ID NO: 17330 - DNA, 2300 bp, Homo sapien
tataaaatttaataatggcatctccataaaaagcaataattcatattctactttaaaaatcctttctcttatgtagaggagtaagtggcatcctggtggcaccagaaggatgtactggtgagcttgtgtagtggtcactaagttaacgcgtgttgctttatttgactgatactgatgttgccatcttagcttccggcagttaggtgggcagaaaacccaaagttagtaactttggacagttgcaacaatgttagtaactcaagggccaaagtgatggattaaacggccagtccaggcaatctctggttcaccctcatgatgacagagtgcttttaggtagtgaggcagtgcttagtctcaaggcagcctcccttcccctcatgcattacctggtgtttgtgggcaggagtgtggatcctgtatacatgcctggggttgtgggtgtggggaggggcctccagtgtgctggggtataccctggggcctctgtaagtgcctgatccatagatgctccctgtggcctcgtcacaggggtcaccaggcccctggtggcttacagtgtggaagttggaggcttcaccataatctgtggcctgagcttggcctcagggaatatttccaggtggtgtcagctgtatctcctccttactcagtgtcgtaggggagcagcgactctctgggacagtgggatgggtggtaaaagaatttaccaagacagttgtaggtaaagaaaggcagattcattggacaccacagagcttacatgtttgtggtgatgtgggtgtgaacatacgattatcaacagtgcataatgcttgatgaaaataatagatgctgatgttattgttttatgtatttaatatcctatattttttattgttattttagagtatatgcttactacttttttttaaggtaactgtgaagcagcctcaggcagtttcttcaggaggtttccagaagaaggcattcttatcaaggagatgacagctccatgcctgttactgcccctgaagaccttccggtgggacaagatgtggaggtagaggacagtgaaattgatgatcctgaccctgcttagccttaggcgaaagtgtctggttgtgtcttgttttttaacaacaaacggtttaaaagtaaaataaataaataatgaaaaaagctcatagaataaggttaaaaagaaacaaaatatttttgtatagctatataatttgtgtggcttttttgtttatttgtttgagacagggtctcactctgtcacccagactggagggcagtggcacaatcacagctcactgtggtctcaacctcttgagctccagagatcctcccacctcactcaggaggacgtcagtcctccaggcagacgtcagtccccaggtggaccctggactcaaagtgtataccaggccccaagttgacaaccaggccccagatggacaccaaggccctaggtggacagcaggcccatgttgaacaccagactcatgaggacatcaggccgcaggtagacatcatgccttaggtagatacgtaggctccgggtggacattagacccaaggctccaggtagacattagacccaagtccccaggtgatcatcaggcccaggtgaaaactcaggccttaggtgcacctctggcctcaggtggacacccaggccccaggtgatcaccagtccccaggtggacacaaggccttaggtgaacaacaagacccagtaggccatcaggccccagctggatacagtccccaggtgaacacaaggccccaagagggacataggccaaggcagacatcaggccccaggtggacatcaggcctgaggacgacatctggcccctggtgaacatcaggcacaggtgtccaagcagaccctgggtggacataactgtgtacgggtcaggagatgacctgaggggagggtgagtagtcagcagcccagtggagtcctgagtaggtcttatggaaggaaggggactaggggacagaaccgtaaagaagcgacctcacttcctggatgatgaccacacgaacagaacttagaactctggtaaccaggcacccatatcctagagtcagcgccgtaaacagctcacttggtgggagtcgctcaagagagcaagatgttctcgtgttgcttccccacttcgagaggttgctgcttcaggaatggagggagtgagagccttttccgacgatgccgaagaaggctcatccctcaccccagacgcctgtcgcccgttgtaataaggcgcatccaggtaccacaggacagcctggggcaggccctagca

SEQ ID NO: 17331 - DNA, 2300 bp, Homo sapien
ggctccgaccccagcgcgacccccggggctgagtgtcactcacgaagtgactcaccgggagccgccgcccgcactgtacttacttcactgtcggcgacggcgggcgcagcggaaccgacctgagccctggtccctcgaccactctgtccaggaccagccaccagcagccggcccctctcacttcctgagtaaatgttcccaagtgtccccgagtttacgcagccccaccctgggtccggtcccccctcgtcggaagcaaacgcagaaagccagattgacgttagcacccctggtttgaaaatgtgcctgagcagcggtaatggccagagaggattcagatagcacagctgccagcaccggacccgtgcgccccggctgtgctacgggagacttctttgcaactactttgagcccaagacgttttcttacaaaactgttgagggagaaataaattagacagaggatttccctcccgcttttatattctcagcaataacttctttctagcttttctttccgtgtctcactggaacgttgtgtttgttcttcgaagtgacttattcgctcttaatttgataatctaatccatttattttaaacttctaaaacatgagaacaaatatatttctgagcactagcccgactctatttggaaatgtgaggagaaaatagtgtctccgtagggagtgtcttcaaattttatgttatttaggtggaaaattcatgttgtataggtgtgtgttgggcgaactgtagctcccatgtggctaacttcaggcttgcctgggtgtgagtctttcagtgttttaaggattttgacaatcccaatataaaaggtccctgtcctgaggattagtaaagtctaataagtgagcaattacaaattgaggcagctgaatacatttggcgtttcttttttccgggggtggattaacggaaggagggagtagaggtaaagatgtgggcgtcggaaattgctctgactgcagcgcagagctgagctcccacagctaagtctcgggccggacccacccggcgtcctttcaattccaactattgagaaccacaggggagttcgcggtgcgcaccgcgccgcggggccttcccggcacaaggtcggagggtcgtctggggcctggacagcgcctgggcgggctgggaagcggcgccagaggacgacctgggcggcgaactgacgctttggcccttttgcccacctagctgatcctcccattgctctagagagtcgtaggctgtgccgtgaaattcccacgcgcggcggtcgctctcggtccacccttggcaaaggccatctctcccaaccgtcttcccattccgcagatgcagaacccgaggctcaaacctggacagagctggtagccaaattaaccgtgaacccagtttgagcttctgcccttaacctttgctcagcagtgcggggttccccacgcttggaccctgggcatcagcaaactgccaccactaaaaccgagggaaaggtttacctctgataaactcattcaaaatgtttgtattcggaaatgtagaaaggagagaattgtatttcagcacgtctataaggtttatgttttattttggttggtttatttggtattaccgaatagggtgcgcagctagggcctctcagggctctcatctgggaggcagcccctctcctttaggacagggcagggccgccacgggggccctctcctctcgctcttcccccaggtcctgctgccaacagccctctgtgcgaccccagtcgggtcactctaaaatttcacatctgtagaatgggagacttgagccaaaccatccccgcagtattttccgcctgaaatttctccgattctaggctcgggatgggaggctccgcagctgctccagcctgcggccagctccgcctccccaacagccaccctctggggccgagctcctctataccctctgcggcaccgcaaagcaggcatttcctggggcagcctgaaccggtggcccagagccccagttcctgccaccggaatccggaccttcctcccgctcccctcgccagcgaggcggcccctcgggggttagcagctgcgagctcgctccgccttctccagcggcccgggcgcgaagggcggtcggcgccgcagcggctccgatgcccgcccggaagggagcgctctggccccggcctcgcagctgcgggacagccgggagcggagcagagggcagccgcggccagttgtctccccagcggactgggaagggaactttatctcggcctggactcccgctgtacctttgttggg

SEQ ID NO: 17332 - DNA, 2300 bp, Homo sapien
ttccacctaaataacataaaatttgaagacactccctacggagacactattttctcctcacatttccaaatagagtcgggctagtgctcagaaatatatttgttctcatgttttagaagtttaaaataaatggattagattatcaaattaagagcgaataagtcacttcgaagaacaaacacaacgttccagtgagacacggaaagaaaagctagaaagaagttattgctgagaatataaaagcgggagggaaatcctctgtctaatttatttctccctcaacagttttgtaagaaaacgtcttgggctcaaagtagttgcaaagaagtctcccgtagcacagccggggcgcacgggtccggtgctggcagctgtgctatctgaatcctctctggccattaccgctgctcaggcacattttcaaaccaggggtgctaacgtcaatctggctttctgcgtttgcttccgacgaggggggaccggacccagggtggggctgcgtaaactcggggacacttgggaacatttactcaggaagtgagaggggccggctgctggtggctggtcctggacagagtggtcgagggaccagggctcaggtcggttccgctgcgcccgccgtcgccgacagtgaagtaagtacagtgcgggcggcggctcccggtgagtcacttcgtgagtgacactcagccccgggggtcgcgctggggtcggagccggaaggaatgttctgtccccggaaccgcttgcagccaggagttggaggccctctggccccgcagaggctgggttgcaggcatcgaaaacttcctgaacacgaccagtaagaatttgatctcgagcttccgaactccaaacgcctgggcaagaattcagcaaagcgcagcaccgctcacccgcacttcccccagctagcggttgctgtttcttggaagacgcgtttatccgccccagtcccgggtgggtgggtcattttgccaaagaaaatgtggttgggggtgacttcgagtagactttcactattaaataagtgcacctcagtgatggatttgttccaaattgatgtttgacttttaaaaaagcggtggtgaatgacaacacgaaacaatcagtgtcacaggttagcaaatcacactgtctcctaaattaaggcaaatgttggctttatatctattcaggaaaaagggggagatggaaagttttctcaaacctaacgtctccaacaaactcatatccagataaaacttcctacacatgactcccacgcacatgtttcgaccaggaaacttttgtttaccagactctcttcctggtaatttctcctgtctcttttcccctccccaacctactttcggcagtttggaaggctggagatttttgttaaggacactttacactaatctcagttaaccggcaggccaagctaacctggcaaagaataagaaggaaagacacacacacacacacacacacacacacacacacacacacacgacagcgatttccaaacatcctttctacttaaacttcctaatcccgtgcctgtcccagaagggtctccgaatgagtccccggcgtgggttggggggggggttccagtgcctagtgcatctcctaccctgctctccctcctccaaccgcctccctactctgcaacacgtaagcatcacgaaacctcctgcgaaacatctggatggggactggtgtcccaacatctgggcaactaccgccaaggctggcttctagggaacgagtgcggaaatgcgtgcgggtgtgggagcgcaccactcagtagggtaggacctctcccagcgctaggtcactgcagcattcttcccaccatctgctcctgtcaccagcccctaactccgcccctttgggcccgccccttgttccgaagccaatagcaacccctgaccgccctacaccgcccagaagcctttccacaccccctcgtcctgggagcgggttggctgctgagctctcggagaagcgcctgtatttgcatggcgttcggggtttttggtaggtagagcagcccgtcactctggaaggccgggaccgcccactccacctcggtccacagctctcttcctgcgcagttcgcctctgcagcctctgcggggaagtgccggggctgctcgaggctcagttcttaggactgcaaggaggcagccccggcgtgcggcggtgcgcacagtctagagtggccagggcgcgagagtgcaacgtcctcctggccccgagcgcgtcgtcgcgccccgggagcagaccctcgcccagcagttaccgccgtcccg

SEQ ID NO: 17333 - DNA, 2300 bp, Homo sapien
tacatatgtgatatatgtatattttatacatatgtgatatatgtatattttatacatatgtgatatatcatatattttatacatatgtgatatatcatatattttaaaaagacaatattaggttgtagagcaactggaactctgtgttgctgatagggacgcagcaatggcacggacaaaaaatctgcttggactgggaagcgattagctgtcacctgttaatcatgcactaagcagagaatgaacaatcccattcctgggcatttctctgagagaataaaaacacccagaaactgtgagcaaatgttcgtagtgacctttgttcaaaatttctccaaactggaaacaaaccaaaatgtcggtgaatggctgaacaaaatataatgcattcatgcaatagaatactactgagcaatgaaaatgaatgaaataccaatcaatccacacaacagaatgaataaatctcaaaaccattatgcaatgtgaaagaagccaaactcaaaaggcaacgtgcagtatcactccatttttatgacattctagaaaaggcaaaactatggggccagcaggtgggggattgaattgaccataaggcagaatgagagaattaattttaggcagagaagaatgatggagctgttctgtatcttgattgtgatggtggttatgaaccacgtgcatttttcaaaacacatagaattgttcattataaaagagtgaatttactgtatgtaattacagtaatctttttttttttttaagtgaaaatgcaaataactgtgagcaccaacactgggctagagtccaatgacattaaaatgaggtcaattagccaacaacctccaggggttggtgtcatgacaattcctgattttggagagcaaatgttaagaactgtggagtgctgggggcttatggagggcagggaaaaagcctgcagatgagataggcaggagaccagctggtgaggcttcctcatgtggctcaggccagccctgctgtagttcatctgggcacacttcaattaaactattcatttgctaatgcttcttagggtgctgtttatcagcagctctgttgccaagccctgagccccaggctctgcaatatcttgggggggcacaaaaacttattttccttgatttgccactaaaatattccccgaccaagatgatccatcgtagttatattgaacacttaagccaattcttgcttaagtggaaagcctcacgcaaccttgtcttaaaattccttgctgtggtgcaatctgttgggagatcttgggacgtagtgtctgaattctgaggttccgtccaggccacatcactgatctatgtcctctaatgtctcattggcaagtatcagttttcccacctgtccactggaaatagttgctgttctgagcaataaagcacattctgtatgggtaagcaatttgtaaactgaaaaaatgttatttatgcagagaagcgggggcccaggcgtcaatcccctcagacgcgacacggggccccctcgaccctcctctggattgttcagagcctttgttccatcatttttacatctgtgatatgatactgctgcctcctctgaaggatcggtggttcccactaatgcagcccctaacaatggcttcgatgaaagaggtaagcgaagaggccagagggtctccggaaagaaaggaagcttgtagcttttcaagttcaatgaggcttaggaggttggaaggctctccaaataaaggcctgtttaaaagaacgccaaggattcaaagcccgttcttttcccagacctctgaccactttcagccatcccgggacgtgtgtgtttacccatgactcccgctcccttctcgagtcgttattccactcccaagcctggatttctgaatctgtgatgacacaaatggaattacctggaaggtctcactggggtcagcccttggaacccagggcagcaggtgcagcccgcgccactattcccagccccagggacttgatatatgcaaatgcgggggccatcaggccagggacaatagagcctcttaatccccccaggcaatgggagggggagcactctcgtccacacccctccccccttgccaaagctgaactcgaaatggagcatccacagaatggagatctcctgcacaagccagggattctttttcctcaaagagcacagctctggagtgagctctgtgaaggcagcacagatgcctggaaggaccctctacagaagcctttgctcctgtgtgtttccgctgcatagcccaaccagacctccatcgccggcatcag

SEQ ID NO: 17334 - DNA, 2300 bp, Homo sapien
tcattaaaaatcttggagcctacacagcaaagaacgcccatgtgtcagcaagaacatttcttcctatgatcacaaatggtttccattcctgaagaaaatccaggaaacgtgggaagaaaaattgccaagtcttagtccatcccaaaaatgaaacagaaagaaaaactctggaaatatattggctcttctctacccattcttgcactcctctttggaataaatagatttttcttgtatttctcattttcaatatttgcaaggaaacagtcccttgagaaataggtagagtatttggagaagattcacttttattaatacctgagtagcccattttttttcctttctcacaaacacaaacatcttatcattctcttttaattattggtgtttttttctttttatacatggaaacaaattttagagatagaaaataccagtggtgctaatttccctagcctctgtagaagaaaatgtagcagctgggacaagtgcatgaattctactgggctcttccacagtcacctctttacaaaggctcaacttagccaccctgaccccccagcccaggtgaaggtcactgtgatggttaatattgagtatcaacttgactggactgaaggatgcaaagtatgattcctgggtgtgtctgtgagggtgttgccaaaggagattaacatttgagccagtggactgggagagccagaaccaccctcagtctgggtgagcaccctctaatcagctgccagtgcagctagtataaagcaagcaggagaagatggaagaacagacttgctgagtctttcggcctccgtctttctcccgtgctggatgcttcctgcccttgaacatcaaactccaagttcttcagcttttggacttgtggacttacactagtgatttcccaggggctctcaggcctttggccacagactgaaggctgcactgtcagcttccctacttttgaggtttgggactcaaactggcttccttgtccctcagcttgcagacagcctatcataggacttcagcttgtgatcatgtgagtcaattctcctaataaactccccttcatatatacattcgtccaactacttctgtccctctagagaaccctaatacagccatgatctcatgtttctttgcatctcaaacacctgctgaagctttgagttcacaggggcctgaatctaaaagttgtgacttacaaatggcaggttgcatcactgggttcctgaaattgctatgcgtatgtgcctaggccgccgagaccagggataatggacactggaccagaacggacatggttctgcaggcatgatgaattaccccggggtagcctgaaatctactgcatgaaacactgatgccatgaatgtcagctgtcactggaaaaaaaaaagggtgccatggacacagaagtttgggaaatactcattgagttaaagaaagtgaatcatactggtttctttattttaggactcctcagaacttttaagatattaatgtgcacgatgaagtttcaagaggggatttatttgaacacaggaaatgtatgagatcagagagtggaaaagggggattctcttgggatatttctgaggactattttgggaaaaacaatatattagataacatctactttggggctggacacggtggctcatgcctataatcttagcactttgggaggctgaagcggatggatcacttgaggtcaggagttcaagaccagcctggccaacatggtgaaacccgtctctactaaaattcaaaaattagccaggcgtggtggcatgggcctgtaatcccagctactcgggaggctgaggcaggggaatcacttgagcctgggaggtggaggttgcagtgagccaagatcgcgccactgcactccagcctgggcgacagagtgagactacatctcagaaaaaaaaaaaaatctactttgatattttctcacataaattctgtgttccaagttctaagtttctatgatgtggaaataagtcttaatgaaccaacaaaacttaaaggtgaggtctgagccagccccaagtcatgtacttatgacctaagaagcaaaccatggtgaaactttctcagtgttccacctactccctttccatctccttgctgggctaagaaaaggattctggtaagaaaaaaaaaaatccaagagagaattttaaaacattaactttcaacttttataggcatattttaaactttttatttcactatcttacatataaaatatttgggtgagaatattcttgccaagagctctatgctgcctagaga

SEQ ID NO: 17335 - DNA, 2300 bp, Homo sapien
ggctgggtcttcccagagtgggctgaggagccagtttctcggtcaacactaggtctccacggggccaggggagaagggaggtgggaggtgagaaagctcagccgcctctggtttcgagtaaaagtcgccgcggttttgcagggaccgactttttcttgaggcgcatttaaggccaagtgactgtctcctgccctccctctctcctgccccctctcctccctgagtcccgccctcccgcacacgctgacccagggacacaccctactgcagcgacgcaaacagggcgttgttcccgttaaaggggaacgccaggagcctcccactgcccccttgcttcgcgcgcgcgcagccccgcagcgcagctttggcggcgccagcagcggagccaacgcacccgagtttgtgtttgaggccaccctgaggatcgggacagctgttcctttgggctgtaagtgatttggtggggagagtgaaggagatggaggagaaatgtgggcatcttccagtgagggtgccagaaagcgcagcgcaggcgcggggctttggccagctccctggggcttctgtttaggggcacagggtcccctgtgtgtcctgtttccctccaatgggtcttggagtaatacaacgaggagagcctttatggtctataagaccttacagggcaagggtgatggtgctggtgtctggatagcggataagggcggcccagttctcgccttgctgaagaggcgttgactctgggacacactggcaaaacagtccctgtggcggacatcccgagagtgttggactcctgtggttccccagttcccagcctcctgccatcggcttaattcaaaccctctgggagtcatcagaaatccttgtttatttcttccagtgcattccagagtttctttgaatgtgatgcttgtggagaggaacagaggggcctgggattgggtactttccaaactgggttattgaaacgttgtctccctggcccaagactctgcctaaaatggtccccagagtctcagccagatctttcacagccatgcatgtcctctaacaggtcatcccagccttcagttcccccaaagtttaaaatgaggggcgaggaccgcattacttgggataaatgtcctgccggctctgaccggctgaaattctcggactcagccttttaccctctgtctctctctcccgtccgctggacatctactcccttcggtccaggctcctgggctcctgtcccaccgcacccagaccggagctcaggcttgttggggttcgtgtcctggctttgagtgcctggggtgcagactggacccctaggcgagcacgtgggtctagcgcaagagcagaatgccccctgaccccaggggctgcctggggaagcgcgcggtggacgggaagcgcagggtccgggcaaccctctcgagccattcttttctttccacactactctggctctgcaccacctctccggagccgccagagtctgcgcgaggctgagctggggccaggaccgttcctctacgctggcagagttgggtggaaacttggagacaaacggaatgcggagagcactggggtctgggaaaccagcctcctcgccgctgtctcccccaccgcatgccacggctgtctccaggtctcagacggaaatctgggcacctactcccctcacccctacctccaccccataggggaattcaccatctgaaccggggtctcggagaacgtgacctctcaccttccagggaggtcgccgggaggtgcttggggtgggtggaagcgtgcagtggcctctgctcatattttctggaaacccctccgttccctgggtggttttagacgtgcgaaccgcttgttttgtttccaaaagcaaaagatgttccgttgcaggcgggcccggctgggcgctgggcactgggcgctggtcctgcaggcggctgctgccccctctcggcggcaggcggcgcgaaggctcctgacccgcgcgggcggtcgggctgcgggcgctgggccaggccgggccttccgctagtgcgcgggaccctccctctgcgcgcgcctccgtcgctcggcccagtgcgttcggcctcacgcccagcgctctcctcgcaggcagaaactccgctgagcagaacttgccgccagaatgctcctcctgttgctgagtatcatcgtcctccacgtcgcggtgctggtgctgctgttcgtctccacgatcgtcagcgtgagtgcctggcggggaggctccctgcgcggcccgcccttccccatctgggttcccagcccgtgctcctgct

SEQ ID NO: 17336 - DNA, 2300 bp, Homo sapien
gacagatgggttgggtttacctgtctggcagtatatggtgtggctgtgacctgggtggttattgattaaactattgggttcaaaagaaaggaagaagcgagctgtagcacccaatatatgcacttttctgtatgtgtattagactttattaaaaagtttatttgaaaatcacaaaggaagggaaagaaaaccctgagttagatatgctcatatttctaaagtgcttacttagaacagtcctgagtatgttgtgatcacataagtgttggttaaataaataaatgtccaaatggcataaaacaaagtaataatttctagagcaaatctaacttataaaatgacctgtggaggaaagaaaacactgccatgtctttagacttttttttctacttgcatatgcactttcatttataaatctttatctatctatctatatctatctatctatctatctatctacctacctacctacctacctatcagagttacaagctactttagtgcagaggtggtcaggtcttccctgaaaggttgatgtgagagttaaatgtgatataataatagtggtggcaatttgggcactgggcccttattatgttgcagacacgatgttaactgctttgtacatattgtctccttcaatcaccaccataaacctttaaagcaggcattactatttccttttgcacctgagaaaactgaagctcagtgaacttgagaaattgcccaaattcacaacaaaagtaagcagggtgattaggtttgttggagcccagagccagagtgcctaaccactgcaccatactgcctctcacagaccatgcatataaagtccaggcaaagtgcttggcatataacgggcactgtaaatgcagtgtttacaagtacacttcattttaatctgataacacgatagttttaaaaagatcattgtttgaagatctttttcaaatttatttttacttaccgtaagaatatacaattagctaaaatagcagctcctttcaaatcgtaaaataatatagaattatttgaatcattgagagtgatgagcttctatgacacagtacactagaggtagggaagtgtgtgtgtgtgtgtgtgtgcgcgcgcgtgcgtgaactgctgcattttcaggcagaaacctttaacatccacattcctgctccctgtcccgtgcctcaaggctggcctgcgcacgggagtctcagttgggcgcgcctctgccaagccgagactgaagggggctagcctctctccctgtaacgctgggcgggccacgttaggaggctatgaatcagctgatttccttggctgctccaaccccacctcaaatggccacctcgcacccgcccgccaaaccccatggccaggactccagccaaggctgacagccaagcccgactgctgcaggaacactttgcctagagcttattcggtggtagtctggttttgcctaggctaggaggagcccaatcccagaccatgctatccagtagtcggccggacttttcttcccctaattcgcacccaagaggagcccgctagatcaatccccgccaatcctaggaagctggcatgcttcgtaggtgcagacagtaatagcggggaccggcgcggggcaggtgtgtccggctaagacgccaggacagggcaggggctccaggacccgagaggagagggacttcttccagcgctcaagcgcccgctgccctctattagtgggaaaggaatccagcctcagccccgcgcgggcgcggtcggcgtcggcgggcccagaagcccagccctgggcatccgctgagctacatttggctgggtcttcccagagtgggctgaggagccagtttctcggtcaacactaggtctccacggggccaggggagaagggaggtgggaggtgagaaagctcagccgcctctggtttcgagtaaaagtcgccgcggttttgcagggaccgactttttcttgaggcgcatttaaggccaagtgactgtctcctgccctccctctctcctgccccctctcctccctgagtcccgccctcccgcacacgctgacccagggacacaccctactgcagcgacgcaaacagggcgttgttcccgttaaaggggaacgccaggagcctcccactgcccccttgcttcgcgcgcgcgcagccccgcagcgcagctttggcggcgccagcagcggagccaacgcacccgagtttgtgtttgaggccaccctgaggatcgggacagctgttcctttgggctgtaagtgatttggtggggagagtgaaggagatggaggag

SEQ ID NO: 17337 - DNA, 2300 bp, Homo sapien
ggatatagcctacagctttgcagagacattgctcaacacagatgcatgggataggggtcccatttggctgagaaaaggttattggaaatgggagacgaggaaggagttttcctcacctgactctgggaagggaagagagtctggcccagatgggtaaagacaagtgtgttggcatctggtagacagggccagtggcacacaacagtgaacagctctactgctgacagccaacagggacttcggggtttggctgctggagatggaggacctgggcaaaagagacgtgaggccaagagagcaggtctcagaatgtggagctcatggaaggagagagggagggctaatcagactgctcctatctggccagaagccatgccccacactcaccaggccctaccccttttcctctgaatctttagctcttagatcagaaataatcttacgtgtcttcaggcttgatcctggcctgacggacagcagcctctgtcgtgtagcctttggagctgatcatggcagtacccaggaaaagactgtctggagaggctgcaaaaaccatgctcactgttcccagtccccgtacagaccatgtcagaggaggactgagggaggctcctctctctctctctctgtcacacacacgcacacgcgcacacacacacacacagatacacgcgcacacacacacaccgttttgcctggcagaacagacttataacttgcataatactgcagcagcccacactgtacctcatctccatttgggttccacaacagaagggagctggaaggaaatcagcgacaatctaactccacatgacaacctggctggacaacgaaacatccagcggggagaaagacactggaaattacccatacctgagccccatcccaaaacacctgagtcagcttctctgaccatggcccaggctaggtcatttgcaaagctcttgagtgattctaaagaaccactgctgtgaaaaataaaaatgatttcagcaaagagagaaaggtgaaactattttattggcactggctgtgatgctggctgtgagcagatgctggctgtgggcagaacaggggagagggccattgagaggcccttgtgactggagagtccaatcaaacgtaaagtgtgtgacagggagggactcctccaaattctgcaggtctctccagactggggatccctaacacaagaggaagtcttatgccccaagtgccagaattccaggaaactcatgcaatgaaaccagtcctcttgtgtcagagtttgcagctagaagcggttcaagggatggaggactctctgggagctggagtggtacgctgcaaagaacctaaatatgccataacttcctttacttccctctccaagaatttccaattgctcttccagcctattctgcctgacaggttagaaagttttcaatagttttcaatagaggttcgtttacttgcattgaattatctcatgaaggtcagcttgattcgggcacattaaagacagagtcggaagaacacatttccctaagttttattctaatgtacaacacatgtgatcatttgcgatggggtctaggcagacaaggcaggtaacagggagtccttccaaccaggggttggaacaaaggaggcttgatttggtgactcttgagacatttggctcactgctgtgatgctgtgagagattagctgtgcaatgtttgggctccttaaaaggaagtttatttaaaataaaacttacctgcacgtatgtaacactgtagacacagatccttcccacagtatatttaatctctgcagaattcactgggaggggaggggagccagtgggacctcttggctattacacaggttggcacttccagagagaacagtcttggcatcacaggcttcaggcatactcaaagctcttctcccttctgattccagtttctccatgccctgcagggcctcttgggattattgtattctggaaagcaaacaaagttggacactgtctctttaaataatagaggctgagaacctctcaggccaccatgacatatcccagcattggaccagcccctgaataaactggaaagacgcctggtctggcttcagttacagggagcaccaccagggaacatctcggggagcctggttggaagctgcaggcttagtctgtcggctgcgggtctctgactgccctgtggggagggtcttgccttaacatcccttgcatttggctgcaaagaaatctgcttggaagaaggggttacgctgtttggccgggtgagttttattggcaaactgtgcct

SEQ ID NO: 17338 - DNA, 2300 bp, Homo sapien
attagaaataaagaacaaacaaacacagtgcttcaccccagttggtttgagaagtcctcctcgacactatacctcagagcactccacaaatctatgggactctctacagatccatagcgttctccagagaaccacaagactctcagaaaatgcctgagagtctctatagagtcaagtgactcccaaagaactccaggaatcttctcaatctctctggccttaaccactctcctcctttagagatgaaactgagccaactattacagtccattttcaggtcccagacaaccagtggaacaagtggaagtcaatttgctaccgccagggataatcacctctgcccctgctggcatagagacctatttgcaaatctaatgcatttggtgtctaacccaaagtccaggattgttaatgtatcagttagtgtttgctgggtaacaaaccaccccaaaacttagtgtgtcttaacacaacaaattactccttttcacaatattgaggggtagctgggctttatttggcatccattctggtctagatcaggcacagctattctctgctgtggtggctcatgtgtctaggacctcagctgggatggcacaggcagttcagatctctctcagtgttgcctgtcaatatccagtggcttgtccagccttgctcagatgatggtggaagggtccccaggagcaacagagcaaatcccaatgagaatgttcttttaaagcctctgcttgtgtcacactgttaatgtcccattcgctaaaggaggtcacatggccaggtccagactcaaagagtggaggaatcagacttcacctcttgatgaagggagcagaaatgccacatcacaagggggcatccttacaggggtggggagcatttggggctagttttgcatgctaataaagactgaagaggctgtgtgatgtttgcttttagcctgtagctgttgctcaataaatatctattgaatgaatattattttaaaaggacttcagttttcctttccttcacatagttgaggtcacgatgtccaaaatacacttctcccagactctggttctggctgtgggtgactttggatgtcaaaaacacttagtcatcttctgtttactctctcatcgtggaagaagctgcaaaggtcagtgaccttagtaaaaggaattatatgacttttgtttcctttatacaagaaaccgctggcctagatgacgaacagacatttcaatgtgcaattattaagaagagacctgccagattgggttctattgaggtatttgcacataacattgtgtggaaaaggtaaggattgataatcagacactgaaattgttgggtgaaaaggggtctctcagtcccctgagtgggagcataccatgtggactgccactgggcttatgcacgggctgaggcaccaggttatttgatatagctccaaggctgagaagtccatgcattcagcctcctaacaagtcttcgctctcagcttgcggggtgaaggttttttcacaaggccttccagttgggggtgtatccctagcaatccacatgaaccactttcccctgggttctttggaagaaactcttccctgggtgacgtgaggaagctgggaaggcctgtgtaatgaggccaccaggatgcttccatttctctggaggatttcctgcccctccctcatgtacagatggtggcggccttgctgggcttctgtgcccatctccaggttcctctgcatcccacccctcccggtccatatgtggggatttgttccaggaagggatctgatcagaaaagaagacaataagaggcaataaattacaacaaactttattggtgggccttggacagggtttcaggatggggaaaatccttcacagctggggatctttcaggggccactatggagaaagctaaagagaaaagggaactcctggggcagggagacatggagacagggcttattagtttaggtgataccaacgtcactcagcagtgtggtgaggagtctccaggtcagaaagctccgaagggccatagcagcttggagtcttagagccacaaggctctatggtatccagggcagccgatgcgagtaagatttcatggggcatgcaaagcaggcaggttccaagcggctaacaaggctgcttgtttgagctactttaagaataactggatgtgtaaaaatttgaatttgaggccagtgggcttttgagctgatggttcccagcctgctgtgaagaaataaactaccaagtggtcaatacccagaggccatcgtgggctcatttataga

SEQ ID NO: 17339 - DNA, 2300 bp, Homo sapien
tatgaaaatgactaaggcaaagttataaaataggcaaagtctgctttattgcttctccacttctgtatctttgatagtttcctaccccactaaacatcacacttcatgctttcatttaacaaacattgactgagtccctctttcatggcaggtaggaagccccatgctggggatacagagatgaacagaaacagacacattcctgaacttgtggagctgctgagaaagtaaggttgaatagctgaatcctagtggtcttgctttattttttttaataagcattgtaggaggtctctatcgtactgtaaaactgaagggcaagcattaacctcaattctggcaaagacttgataatcatgagacaattttttttgagagggtatctaaattatttccaaaacatcattcaatcctttctatggagaacagagttgatcaatttaacctgaaattttaatcaggaggtttttgaaattcactgactcaatgtatcattgaaaagatcaaattctgctataatttcacctgtttatttttaaatcagacattgaatgaattttgtcttcaattagcaatgctattgggcatctagatgtgtgcaaagcacaaagactgctcatcatctttaaagagtttgtgggcaatcagatctactttagaacagttgccagtcttttggcccaaagaacaaacatggcatcatttgctgcattgtctacggattctaggcatctgcaaagcccgtgctgaatactgaaaatacaaaatgcagaacactatgcatgagaaaaaagtaataaaaaaagacagctcagagtgaaatgtttcttaggccgaatgtagaaaaagttgctgataaggaacatagtgggaaaactagtcaggatttgcagtgccctggtgtcgggtatgggagccttgtctagtcttgtgtctaggcaaatgagtagcctctgagcactgggtgttttctgtggttttcctctttggggaaaatactctgggctcatctccacagttagaggggtcgtgttgcttaatgtaaacacttgaggcagcattctaacttttctagattaggttcccatgagttcggttggcctgagtcagcctctaataaactcgggacactggcataaccaagagtctgaattggcaaagctgaggaccagcccccgacttgaagtcacttcattgaggtctcctaggggctgggcagcctgccttatcctggcaagtccctccgcctcgtccttgggtggagtgccacacagtgattcccagaaaagccaaaaataattaactgagggctttattttctttagcattactagttaccaaagtaactcggtgaattctcttgctgctcacacggttagactgctgcctcatggaaagatgccttgaagtttgactgatttgagttttagtgttagctctgccactgagtcacattgtctaagtcaattaacttctcgaacttcagtttcttcatctgtacaatataaacccctcttacaggtttggaaagaggttgcatggatgagcaatgatgtatgtatgtaaaaatgtgggccagcacctggaagaaacagtacgggctgctgtttacggaaatatttgctgaagagagagagggaaagcccaaaccattttcttagagtgaggaagcagggaaggaacactagataattctgtcacaggagaagctctgctggagagaagagaggctggtcaggaaaggtgggggcttgtcaacacctaggcaggtgttagggttccaggcagccctgatgtgccttagaatcggccaagttcttcgcagctggaagagttccgaatcaggcttcacaggagaggtcgggaaatcaccgaggcctctcccttgggctactcttcacccctttcacctcccaaaccaaggaggtctcccggagggcggggagcctcggttactaagcgtgagcgcgtccatagtaaccgccgcccgacgggtttccctcctggcctgacagctcccgcctctcctataactggccagtcagctccggcgagccggccggggcggccgctgagtggccctcaggcgctgctatcgtcacagataggaaaggcggggccagggccagactggtctgggccccagtcgagggctgcaggtggtaggctgcgaccccttcctcccacagccccttcccgcccctcgccgggcatccgccgacaggtgagtggtctcgctgactctagcctgcctctaggactaccccaaaggatcccccttcgccaaccaggactccaac

SEQ ID NO: 17340 - DNA, 2300 bp, Homo sapien
gtccctggaccagcagaggtaggatggtgaggctggaggtcccatgagacctgggtgaggtcagctgtgtttgccgttatatttccagagccctgcaacggcctggcacagagtcggtgctcaagtatttattgagcaagtgatttgtgagaacaaggcttagcacccaatctaaagtgcactgggaagaggtggtttctttcatcatatccacaggctggaaaaaccacttggctttttgtaaagtttgaagcactgagtaggcagctctgctatgaaggttatgaaggttccgtctagacccaagagtatgatttgagtgaactcttcagtaagttcctttcatgtacccttccttacgggatattagagagagagaagggacgggaggcacaagttcaaaaaacttaacatatagtgattctattcttttaaatgaccaatccatacctatctgatggaattccaagtagatttccttttctttagccttcatcagaagggacgtaatttcccagacccagcttgctccttgttcccatgtttgcagcatgccaacaggcatccaacaaatatgcacccagtgctgcctgtgccagggccccagccgtggacacaggagacgcaatcaagcttacgttctggcagtggagcattagacaagcgcatgatcgcattgcagtggtgatgcgagttacgaagtgcagggctctgtgagtgtatttgctttaggctcatgacgtgttgttctctcagtctcatgaaagagggattatggaaagaggcaggattagtatcaggacagctgctcataaaaaggagtgaggtcatggcgaatttttggccaagttgaatgtgagtggctgcgtaggtttttaaaactttgcaaagctgctttcgggttatattcagcccctacatccaggtctgtttctgtagcgccatggagcgacccctggttcagtcaggctttaggttagggcatctctgtctgtagccctgtatagtgacagcacagaggaagtgtcaaacatgtgtacactgtttgttccaggactcttattccctgactgcctctctatcctagagggctgagctgggcagctacaaaggagacctcaagccttcctcaatgtcctctccagacctggggcaggtgccaggtctaagccttcagcatctggctcctggcctgctggaccccacctcacatttctagttctccagagcaaaaggactagctctgcctctcatttcttgactgtggcagacagcccctgctccctactggcgtggccagatttccgggggcctctctgtagactgcggtgtggggtgcatttcaaccgtgaccttgccctcgttctatctccttccaacctctttggttatagccatagtactcctcactctgtcttttactcttctttccttcctttcctttcttcaactttctttcttcccattgcctccctccctcctttcccttcttctctaccttttgagcttcattgattatcctttaaattaatcaaatttaaattaatcaaaattaaatgatgcttgttgcaagtaacttaggttttcttgaagtgtaattgacaagtgacgctgaccctgtcaaacttagggggagcatatgttctttaatactcaggtattaggagtaggagctccagcctgaggacaaaggggagtttccgcctactttctgggaagctctaagaaatgcttgcgtattccacaaaaccaccctaatggccactggtcccctccggccacccatctcctccctgaagcagctgctgcaggatcccaggccactgctgttctgcccttccccaccatagctattcggtccccctgcagcttcccaaagcacagctctgctaggttcgccacagccaaccatgtctgctgtgacggattggggatatcagaagctaaacagagtaaattacaattgctaccataagtggctactctggatggggtggtggatggcgggcggagggtggtggcctaaatcacaacctaaatgtgatttctgttccctggtgagggccggctcacccttcaacatggatctcagtgtatctgcataactcaaaatccaggtctagtttttccttaatcctggaggtactggggcgtcctgcaccttactttgccctgtccataggttccctcttttcttgatcatagacaaaattacccctgagaacaacaacagcctcatccatgagatgtagtttagttttcctggtgtggaaaagaaaactgcaacatccaacagtaca

SEQ ID NO: 17341 - DNA, 2300 bp, Homo sapien
atcccggttcactgcaacctccgcctcctgggttcaagtgactcttctgcctcagcctcctgagcagctgggattacaggcatgcatcaccacgcccagctaattttgtatatttagtagagacagggtttcaccatgttagccaggctgatctcgaactcccaacctcaggtgatccgcccgtcgtggtctcccaaagtgctgggattacaggcatgagctaccgcgcccagccaagaaatttctaacaatgctaaaatatggaagaagtaaagagttctattttcactagaggtggacaggcccaagttgggtggccacttgcgtgtcatgtgctgtgttatgggggacttggaatgggtgactttagattctgaagccttatggtaggtcttagaaggagaactaagatgctttaccttacaattaaaaaaaaatgatgacatgaaactttctctacgttagatgactatttgagcattatttcttccctagcctcagaataatgacattgtgaattcttctagaactgcactgctgtggaagattggcactgatacccacagcagggactctgtaagatctgtctctaaataggtttgacaaaaagagcatttttttgggagtatgaatgaatctccgggatgccatcctttgttagatgtgttataataaaatgctggaatgtgtgaataatttactctataaaaatagtggaatttaaagttgaccctgtcaatgacacactcactaccattccacaatagttccttgattagggaaaaagggggatgaaaaacctgggaactgcttatctcggaggagtgttccatgcagaaatgagtcagccctcacgtacgtggcagctgataaaaaaggcttaacacccactactcagtctaaaccagggctacgcagagtatgaaccacaggccagcaacatcagtatcatttaggagttacttagagatgcagattctcaggtcctcaaaacagacctactgaatcagaatctctaaggtgggacctgggtgtctgtggttgcacaaggtctccaggtgattctagtacttggtaaaatttgagaagcactgccttcgacccatggttctcaaagtgtgatcgccagaccaaaagcaccagcatcatctgggagctgttcagaattatctgagactctttctcaatgggcttttgcaggtgatagtagaaatgcttcatggcacttttaagtgcttaaaggccaaagagatggcaaaatcgaatatagaaatgtaatgaactcttaggcatacgcatgtgtcttagagctggaaaggaaccaaaaagatctcctggactcatttcttgtctctaggtagttaataatataaccttacaaatctccagtagtttttttttctttcccccttttggcttaaaacagcggttgctaaatcagcagttctggaggtgggctcagcaatctgggctttaacaagctctccaggtggatgcagcctcaagtttgagaaccactacactatggtttccatcagatttcccccctgcatggttgcatagagcattagacttccatgtttcagcctgggcttggggccctggtagctgactcctggccactgcccatctctgctaccttctgtcattccaggctgagaagtgcaggttggatgtcgtgcttgtagtaatgtgaccactcttggactctggtagaggagatagaaaggttttgaaacggggacttttttttttcacttcccctctgtggaccagcctccacacagcccccagcctacccagcctctctcctttaaagttaggagactggaaagcagaacacccagagactatcatgacagtctacagctcttgagcaaggccatgcctgcaggcctttgcggggctcacttggcctgtctccagctccacaaaaaacatgtcctcttctcagggggtggagtcatcttagcctcatgcagtgaccatataggacttagaaccacccccacccagggtggctactaattgctttccagtttgaggaggctctggctaacaagtgtattttcccataggaatctgaacctgtgatgttaagaaatcagtaaatattaaaaagaagatggatgcaagaaggatgaagaaagaaggtagggttgggagtgttaccagtggaagctcctgcactggggccgtctagggttggaggattcgcagtgggaagaggccactgggcggccactcttttttttttttaatatatatttttattatacttaaagttctagggtacatgt

SEQ ID NO: 17342 - DNA, 2300 bp, Homo sapien
tcccatggggcatctctgggttggtcagcactggggtcacattgcatgtttgctcagcttgccccttctcagtgccagtagaagcccatggtgagcccagatacaggatctgttgactcacggggaatttgctgcccacagaggagggagaaatgcacctccccaaagccaacaatcaaaggccaggcaagccctgtgggaggaaaataacttgggctacagattttcttttctgggcttggagtcttgccatggacaacacagaaacagacatgattagcatcatggcttccggaaacactgtgagtgcgcactagcaggtggtgggctgatgtcactctcaaatggctttctcgagtccgagggtctggctccctgccgggccctggcccattgcacatcagcgctaggtataagcagctcagagagtcacttcaagctgcagaagacttctggggtgagtctttggaggttcttgtggaaccacaggggaggtcccctgctcatccgctacacttcacacctggcctgtgcactcaaagatgtccactgtcttccccagacttgctgggagagagagcagaaccttgtcagactggcccaccccaactcccccccatccccctcacctgtgcatttcccgtagcatttccagacgcccaggctgtcccgcacctccgtgactttgctcagatccttcccttgtctagaacttgtttgaagaactgaatggagatactcagggctcagggacactgagccacaaaataggggcccatggaaaggttgaaggcatggctccgctgacacgggagctccagagcgagaatgaattcagggagtttagggctggagttgaagaggaactagagcctggagagaggggaggatagagaaaggctttttgagaaccgcagcaatgagggctctgcctgaggctctaggtactgactcgtgggcagtgaggagaggtagatttttgttggggatccacttgatgtatgttttcttacaactaaatgataaaactgaggctgaaacacaggtgttttctgcctggcctttttctagaatgcacctctctctgaagattatagagaactatgaagaaaaggagatcgtgggaaatatatgattgagtcagtatgatttggaggaagctcaagtgcttgctgtggttgcagagaagtgaggggactttacattcctggctggacaggttgaactctgggattggagaggtggtgggggagtggagaggagcagaaggaacagacacagggagagacatttcaaaggattgtcaacagggcatgatgataacacagggagagcaagtccagcctgtctcctggtgctgccccgagttgatgactgcaattaaactgccagactttacagcctgctctgcactgtgtcctcctggcatcttggggactttttcacggttggggccacaggggaggttagaagctgctcgctctctccattgccaagcactggccggtcaatggagttggggagaaggaggctaattctcaacagcctgttagtgacagccattctctctccagcttatctaaagaggattttatttcagaagaaggctgagagcttgttagaaaggcaagttcttgggccccaccccacatatactgaatcagagaccctgggagtgggacccagcaatctgtcttaatagaccttctaggagattctggcactaaggaaagagaccacaggtcttgtctatctctgtagttggctgcgtctgggccagagtaactgcttgttgaaatgatcagagatctcaaatgaggtcatgcatgttggggtgtgtgtgtgtgcatgtgtgtgtgttgtgtatctttatgtgtgtatgtgtttggtctagggtccagcacatagtaggtgttcactcttgggggtgggaataatcactctaatgtccgtgtttgaggactgcattgctggtgaccgctgagcctgcagaggaggaagagagcagggcagaagattcaggagggggtgcatggcaacttctgatgtcacagtgccccccttcactcctgacttctggctcatgggtcactttggggcaggggcaagaggatggttagctgcagcaaagagagagccaaagagaagtgggattgagagcacaggggacagctggagacaaaatataaacgccgggcaggggaacagccaagatagtgcaggaaggatggggaatcacagaaacttctcaggtaacagtctgggccagaacactgggtgtccccagagagggaagtcga

SEQ ID NO: 17343 - DNA, 2300 bp, Homo sapien
gggtagaggcgcttgctaaaggacactatgaagatgtaatcggttcagtccagaccatgggaaactcagttccttctgcagataaggacacattattggagagggaggggcaaactgtacaggcaaagagacttaagaagtttatagaccaatttgcatcgaagtttggtttgtcaagacctctcgtggcctttgtgttcctcagagcatcctctgtgctttggcttctgaggccaattgcctgttcgtttcctacctccttttgcgttcctgagagataattggattggcccaggtcctcttttttgttctaggctgtaggtcagaggtcagccggtggactacctggtttgatcatatgtcctcctttgacttactcagctggaggtaaagggccaaggggacctcatgaggaaggggtgatgtgtgcagctgctcaacaccctgaaaggcaatttggggaccaagagggagagttaataaactgacctaacgcattgagttttttctgtgtttttttattttttcatataaaacttgagcgtggaggccaaagggatacacctgagtccatttggccagttatttggggttctggggcaaaaggaagagcagccaatgtaagttgggtaggggtgggggctctgggcaggctcaccatggatttcagggggattctcaggtggggagagctgcctcgtggccccttcttagtggtgtacgttctggaatttgcactttgatttttctacttatgaattgtgtatccgtgggcaacttactgaactgtgtgcctcagtttcatcactttgtaaaatggggattagagtagtggaaactgcctcgaaggtattcctgggagttttgagcccagaataagctagtgtgtgaagagttgagagcagtacctggcatggggtgtgtgcatgggtgacctggagccaactctggaaccccagctttttaattcattctgccttgaatgaaggggctggctgcacttagtacctgcctgtggggaggttaccaagcagcccagtgctgaggccagcaagatacactgagggaccccagaagcactgaggtcaagtccctgagtcccatggggcatctctgggttggtcagcactggggtcacattgcatgtttgctcagcttgccccttctcagtgccagtagaagcccatggtgagcccagatacaggatctgttgactcacggggaatttgctgcccacagaggagggagaaatgcacctccccaaagccaacaatcaaaggccaggcaagccctgtgggaggaaaataacttgggctacagattttcttttctgggcttggagtcttgccatggacaacacagaaacagacatgattagcatcatggcttccggaaacactgtgagtgcgcactagcaggtggtgggctgatgtcactctcaaatggctttctcgagtccgagggtctggctccctgccgggccctggcccattgcacatcagcgctaggtataagcagctcagagagtcacttcaagctgcagaagacttctggggtgagtctttggaggttcttgtggaaccacaggggaggtcccctgctcatccgctacacttcacacctggcctgtgcactcaaagatgtccactgtcttccccagacttgctgggagagagagcagaaccttgtcagactggcccaccccaactcccccccatccccctcacctgtgcatttcccgtagcatttccagacgcccaggctgtcccgcacctccgtgactttgctcagatccttcccttgtctagaacttgtttgaagaactgaatggagatactcagggctcagggacactgagccacaaaataggggcccatggaaaggttgaaggcatggctccgctgacacgggagctccagagcgagaatgaattcagggagtttagggctggagttgaagaggaactagagcctggagagaggggaggatagagaaaggctttttgagaaccgcagcaatgagggctctgcctgaggctctaggtactgactcgtgggcagtgaggagaggtagatttttgttggggatccacttgatgtatgttttcttacaactaaatgataaaactgaggctgaaacacaggtgttttctgcctggcctttttctagaatgcacctctctctgaagattatagagaactatgaagaaaaggagatcgtgggaaatatatgattgagtcagtatgatttggaggaagctcaagtgcttgctgtggttgcagagaagtgaggggacttta

SEQ ID NO: 17344 - DNA, 2300 bp, Homo sapien
ttctcatccgtcattgagcaagtttattcgtggtgagagtggacagccccaggcgtctcaaaggctctgtctgggatgggggtgcagtaaggtgggaaaagactgtggttctagggaagacctggggggcagtctcaccgggctcagcttcctcatgtggaaacatggatttaaaaaaatacctattttgtggggttgttaggggtgacacaggaggggctccacgagagcgcgtggtgtttgagtgggttcaggcaggggccttctagaatcagtgcctcccagggcagctgttctgctgagcgctgctgcatccggttcccaggtgggcttcacatggtagaagctcaatctggagatgctccaaaatggcttatccattgctggatgaaaatcaaattgaaacgatgagtggtatgttagtgagtttgttaaacctctcagagtttagggattcaaagcctggctctgccatgctctagctgtgtgtctaagcaaataactttccctcttatttatttatttatttatttatttatttatttatttattgagacggagtcttgctctgtcgcccaggctggagtgcattggtgcgacctctgctaactgcagcctctgcctcctgggttcaagcaattctcctgcctcagcctcccgagtagctgggactacaggtgtgcgccaccatgcccagctaatttttgtatttagtagagatgagcgttcaccatgttggccaggctggtctcgaactcctgacctcaggtgatcctcccacctcggccgctgaaagtgctaggattacaggcgtgagccaccctgcccggccaacttttcctcttttgagggggcatcaggtctttcatctataaaatgggagaagtaagaatatggatctcatagaggtgctgctagttcctgagttaggatttgtaaaagtttagaaatgggcctgacacatatacatttgtaataagtgttagcttgtgttataaatgcctcatctggaaacaagatagctaataaccccaaaagtggttttcagctggcgagggagagtagtagggggtcatcttggaatcatgatatttaatgattatgattattttacttatttggaatttcaaataagataaaaggaaggaacgagattttctttttttcaaaagatggattgcgttataaaaaaggttgcaaaagcctgtcctactagacaatgcacttgggcgtgcctacacctctgtgcattattaattctagcttcatttcgtagggagtatatgctgtgtcaagtgtttttggcatgcaaacgggactattctccttggcaagctaggctcatccacttacaaaggagaagctaagagtaaagcttttgcatggcccttggacagtttatgaacctctccacaactgttatttctctagtttaatactaaaggcattcttgcaaggtgactagggcagacgttattataatttcctttctataatgaagacattgagctcttagggagggaaagggagcttcctaagggtcacacattgtaaaaggcagaacctacttcctactgtgccataaactgcttggaactggaatacttactgcctgggtctcacaggtggttagtagccatgggagaaacatgctaggaaaaaatcactgcagagtggctcaggaggctgggacctgccttatgggataagtatgggcatatggtgccctttcatctgggctggaaaagacagggagaagtatcaagtttctcttcctgtaggaaaaccactggcttctggcattggtccatcttcaaggaattttgcattgaggtagcaactgatcagtggttatttcctgaacattttctgtctaggactttgatgtatgcacaggggttgttggagatcaagggagccacaggccacttcagagttcctggaactgtgaaaagcagaaacaagaaaacaaagttccaagctcactgagatattcacaatgcttacattgaaaaataatgcttgtcagtctactaaaaatgcagtgtcatattatcatatgatcttaagttaattgcaggatttctaaaaattaataatttagtagtgtatggcaggaggcctgccagccctgtgtgccttggatgtggggcaactaaagcgcactccccacttttaagaagccattgacccagtggagtaaacaaacatgaacaaccaacaatatcacaatgaaataagtgtgagtggtatgtcaggagagccccaaagagggaagatcagaaaaggcctgacagagg

SEQ ID NO: 17345 - DNA, 2300 bp, Homo sapien
cctctgttagaggttgtgtttattactctggttggaggacaaccctgggagctgatatagcaagaaaacctccctgaaaccagatcagagaatgacagacaggcgctgtgggccaggactttggccgccaaatctttaaaattgtgcccttccacatttgctcatgcatcctcagtaactgcatatttatttactaatgtaaacagctattactgtgccttcatgtaaatctaaaacataccccaaaatagaagttaaaaaatgagataaataaaaactgaagtcagaacattttctgtccccagtgcagtgactcatcggggtctttccccctggcaagtgcccctagtttaccagggtgctgtctagacactggagaggctggggctgcagtgaagttgctcttcacgttagaggcatgaggaacacagggaaggaaatagcgataagagacaagaccaagaagtagatccagaaatacccagaagtatttttaaacattacaaccataccttggcccatgctcgtttgtaagctattagtgggtcattttcctggtcccagagcagtactgcacaatgtaaatgcgtgactcagtaaggtggtggagctttgggtatggtgagaagcaccagcgaagccacagggaggggagcaaaggcatgtgagtcctaagggaagagcgactggaagttgggactccccagtcctccgaggaacaggaggggtgctcttggccaggtgggagcagggtgtgtgagcatctgcaggacctgagcgggatgctgcctaccttggcccattttggccgggcagttacatggggtctgagtagaaagcctcatcctatgatttctctctattccttccagagggctttggggacaggacaaagaccacagaagcccagctctgtttttccttcctttctcatctccaatgaggggcaggtggggtggctgttagagggaggtgggcaagagaatcagagtacaccagggtcaggtggaggtcatggagccagtcctcaccaactgagagatgccttcaacccagcagaggagtacctcctagggatgcagtcagtccatgggacgcatatgcagcttggcctctgggttgatctgactgaatggtcagaccacaagtatttacaaaggtcctgagcctgcctatgtcaagagatgattctccttgcctggctagtaactaacacttaataaacattacaatatggcagtcactatgctaacactttcacctactcattcatttactccttacatgaactcgaaaggagtggtactatttttatccccactttacagatacgatggaggcataagaggctatagactttcttttttttgttatttagttttttcttttcttttttttgagatggagtctcgctctgtcacccaggctgaagtgcagtggcgccatctcggctcactgcaagctccgcctcctgggttcacgccattctcctgcatcagcctcccgagtagctgggactacaggcacccgccaccagacccggctaatttttttgtatttttagtagagatggggtttcaccgtgttagccaggatggtctcgatctcctgacctcgtgatccgcctgcgtcggcctcccaaagtgctgggattacaggcgtgagccaccgcgcccggcctatttagattttatttcatattcataaacttaactctacaatccagctaggcatggaagggaacaaggaaaacatggaacccaaagggaactgcagcaagaacacaaagatgacaggatagtgtgagcaaatggggtggagggtgctctctctgagctacagaaggaatggtccagtggttaagataaagcgtaagtgaaacttattagagttgtccagtcagcaatggtgatcttcttgctggtcttgccattcctggaccgaaagcgctccatgggcttcacaatattcatgccttctctcaccttgccagagaccacctgcttcccattcaaccacgctgtcttggcagtgcagatgaaaaattaggaaccgtttgtatcgggtcctgcatttgccatggacaagatgtcaggacctgtatgctttagggtgaagtcctcgacatcaaatttctccccgtagaggcaccagtgccattatggcatgtgaagtcaccgccctgacacataaactctggaataattctgtgaaagcaggaacccttataaccaaatcctttctctccagtgcttagagcatgaaagttttctgccgtctttggaatcttgtttgcaaac

SEQ ID NO: 17346 - DNA, 2300 bp, Homo sapien
gctgcatggatcaggaagatcaaaggcctgcctattgataatttcacgaagcaagggaaaacagcggcccctgaacttggacaaaatgtatttatctaaaccagccttgggaaattacagtgttttacaataaacagaaagccaagcggatgttgctatttggcctttttttttttttttgactgtttcttcctggtaattaatgtgggaactcccaattatcttcccctgagccaaatatttgatatcatcaaaataagaaaacagaaggaggttgggcgagattagcatctgtagtcccactgaaaacaatttagtgagcattaggaaagcccagtttcgttgatgggggatggggagatgatcactggaaattagataccattcatcactaccaatttagtgctattagttcttctggcaaatgaagttatgggattatatcagggtcatgcattggagttttctggtatttttgcacagaagcctgatgaaacccatgaagaatttaaaaggggaagccctcagtggggttgacctgctgcatctgacaacattgagcttttccttctcagggctaactcctaaggaagagaattagcatatttatcctctgtacaaagagggccagtaacatcaagtgcattgaggtttctgcttaaacctttggactatggtgcagggaccaggtaatttagaagagtgcagcccactacaagagctatggcccattagaaagttcaagccttgaccaggtgcggtggctcacgcctgtagtcccagcactttgggagactgaggcaggtggctcacctgacatcaggagtttgataccagcctgaccatcgtggtgaaacctcgtttctactaaaaatacaaaattagctttaaaaattagctattaaaaattaaaagacgataatgaattcaaacacaatgccttaaaaaaccaaaaactacgaaaaacaacacaaaactccacagcactgagtggaccactgaaaacctgccatgggcaggctggacgtacaggccccaaatttgttagcttttcatctccaagggcacgaatgcaattgtgctgccgaaatgtctcgcctttgagaaacgcgtgtgtgtgtttttcccctttcattattagaatattaggttttaaatggcactggcaaacagccacataaaatttgtgattttaatagaatcccttcaattaaggaaacgtgcaaataccactatgccaacagcagtctgactcggccagacagataggatattgtcatcatcaccgcttcaaagatgacttaacgccccttaatttcacatcctttgttcaggcaagatcacagcatgagcggctggacttaaaactgtaataagtataacgtctcccatttactagatacttacactgtaaggaaaccattatcacccccactttacaactgacgaaagaagtacataaaggttggtgatatgattggcaatagagttcccaggcgcctaagctccagggcgcaaggtctcaactcctggagtctaagtttatacctcccataataataccgtccattagttactctagagtcctcctgccttgtttttcttaacgttttacttctctgcaagaacatattttaaaaagttgcttctacaatttaaagtacaaaagtaatactgtacaggagtaagtctttgtaaaatatttaaagaaaattatattatacaataaaaccccgcccccctgcattcggggcagcgacgctgggggaacgactttagaatttgcattgggtggacagcaaatacttccgtaaaacagaccatgaagctttccacttggagcccactgtggccccaatgcctttccctttcgctcctgctccaggctccgcctccgccgtgtccgggctgctcgccccgcccccgctcgccccgcccccgctcgccccgcccccgctcgccccgcccccgctcgccccgcccccgctcgccccgcccccgctcgccccgcccccgctcgccccgcccctggatttgctccctcaaagcggaggtgaggccggactgaggctcttacagtggtccctgctggcccttggtgacgggtcgcgtcagttccgacccggacccgtacgctgctgcgctgacgtggctcctggaagcagggctggcgtagggccgccatgttgcagcaggtgaggggctgagggcgcgctgggagggtggcggctcctgggactggctctgcaggttccgtgggactggagcccgcgtcccccgcgcccgctactcgaactcga

SEQ ID NO: 17347 - DNA, 2300 bp, Homo sapien
ttgtattttagtagagacgaggtttcactctgttggccaggatggtctcaatctcctgacctcgtgatctgcccacctcggcctaccaaagtgctggaattacaggcatgagccaccgcgcccggccgacaatatattatcttcttttctaatgcctataccaccttttgtttttcttttcttctaactttgcctaggccttccagtgctgtggcaggcagtagcagtgagagtgggcatcttcatcttgttccccttctggaagggaatacatctacagtttctccactgagcataatacctgctgttatgactttggcttataccttttactaaatctggaaagttccttcttttcctatttttctaaaagtatttatcaaataccttttcttgcataaatttaaaaaaccaacctgaagacatataccaccatattgctagaaacagaaattcaaaacatgctttctttcagagcactgtgccatcattcaatgcactgtggctgcattgtaggctctgagaaactggtaaggcattggtaaggctgcaaaacccttgggaatattagaagaaaaagctttaacatatccaaaaaactacaaagacatattaatcgtttttatgtgccaagcctcacaataactctgtgaagtaagtacattttttttttttttttgagacagagtctcgctctgtcacccaggctggagtgcagtggcgccatctcggctcactgcaagctccgcctcccaggttcacgccattctcctgcctcagcctcccgagtagctgggactacaggcacctgccaccacgcccggctaatgttttgtatttttagtagagacgggttttcaccatgttagccaggatggtctcgatctcctgacctcgtgatctgcttgcctcagcctcccaaagtgctgggattacaggtgtgagccaccgtgcccggctgtaagtacaattattattctcagtttacagatgaagaaactgaggtaagtggtagttcagtaatttgcccagaatcacacagctagtaagtgatggccctgggaatggacttcaggcagccttctccagaaccattatctcagcattctgctttgtcctgtctcaaaagcagcctagctgaagcggaagcatcaatggcagttgagagaccttgggcaagtgttcttgttaaaaaacagataattcatctttgctcccatctatctcttagatatgccctatatgtgcataaatattttggatctaagtgattggtaaaggattctgttgctcttgtttgcagatccactgtaccgtggaatcagtgccatggattctaaggctggtggtcattcaggacgcttctatctaaaaaccacctgacactgatcaagcattttgtacatgttagtcactattccagtgttatctccactggtgcagggtttctcaaccttggcactattgccatctggggctgggaaattctttactgtggggcctgccctgtgcaatgtaggatgtttagcagcatctctggattctatgcactagatgccagtggcacctccttcccggcttgtgaccaccaaaaatatctccagatatttccaaatggcctatgggggtagaagttacccaagattgacaatcactgtattagtccatttaattcttcacaaaaaccctatgatgtaaatactctttttttttttttttttgagacagagtctcgctctattggcaagctggagtgcagtggcacaatctcagctcgctgcaacctctgcctgccggattcaagcaattctcctgcctcagcctcctgagtagctgggattataggtgcacgccaccatgcctggctaatttttgtatttttagtagagacaggatttcaccatgttggccagtatggtctcaatctcttgatctcatgatccgcctgcctcagcctcccaaagtgttgggattacaggggtgagccactgtgcctgaccaacgactcttattattatttccattttatcaatgaggaaaggaaacttacacagaaattaacttcctcaaagttacaccaaataggtgctgcagctgggattcaaatccaggcccctgactctaagctgaaccatgagaatctgctgcctcccaactaactaattatctacatgggttctacgcagtatgatcctttgggccctcaggaactctcacattcttttggcctgattcctgcagatactgggatctgaaaagtggggtttgcacacgaatcttcggtggtcaccaggggacta

SEQ ID NO: 17348 - DNA, 2300 bp, Homo sapien
gcctcctgggttcacgcaattctcctgcctcagcctcccgagtagctggaactacaggcgcccgccaccacacccggctaattttttgtattttttttttagtagagacggggtttcaccgtgttagccaggatggtctcgatctcctgacctcgtgatccgcctgcctcagcctcccaaagtgctgggattacaggcatgagccactgcgcctggcctaaggccacatttttaactgtaacatcagatcccaaatggcttcaacttccccccaaagtcgggtgtatggcccaacctctgaaaggtgcaggccagcaggaggcagggaggaagggagtgaggcgctgccctctcgcactcacttgctctggagcaccccttgtccctctattctcaggaggcagcccattgtcatcttctcaaagaagctgtttagaaaaggaggtgccgaggggcaacaacatactatggtccacaggtgtttgaggagaaccgtgtgtgtgcagtgttgagggagaggggatacgactcatgtctgaaacctagtctctctctctgactcccaagtttgtagccctgaaatgtgaaataaagactgagttgggtgattaaaactgcttccttggcctggggtggtggctcacgctgtaatcccagcactttgggaggctgaggcgggcggatcacttgaggtcaggagtttaagaccagcctggccaacatggcaaaacctcgtctctactaaaaatataaaactcagctgggcatggtggcccatgcctgtaatcccagctactcgggaggctgaggcaggagaatcactttaacccgggaagcagaggttgcagtgagccgagatgccaccactgccctccagcctgggggatagagcaagactctgcctccaaaaaaaaaaaaaaaaaaaaaaaaatgcttccttgaagaatgtcagcctcatagataaaatcctaatttatttaaatctttaaaaacaagctatttataatctgtcaattataaataaacaagttaattacgaaaaaaaaaaaagagctacttttaacttgcagcacttcttagggtaatgtgcccgccttacagatccaaagagtctgcttcgggcctcccttctctttgccaccctcctttgtctggccttcccgattaattaaatattaatctactcatgccttttctccagattcctcttcagacagaagaggttgagctgtgagaactgatctcattcttaacctgattcctattccccattctgaccctagtatgtgactgccattgccaacaaaaccccagcgatggactccattacctttctctggttgtgcctgatctttcaacatgggcattagaaaggcacacaatattgtaaaccttttgattttatctagggtaataatacttagtaacaatagcagcaacaactgatctcatatatttaatgcaatcctagaaggtagttatcatttttattacccacctttatcttctccatcctcataactaggatggagacactgaggctcagagaggacaggttgcttgctcaagaccatatagctcctaagtaccagagtcaatgtttgaaccgagtcttacctgaagtaggagaattatctcagcatgactttgaaactctttctgtgagctgcccaatatgttttgcctgggcactttgactacagtgagatttctggttagtattgtgaagcagttaaataacttaaatttacattaaacatttctggttttactttgatgatgacttaagaaaatgaatataaacatatttagcatcattgggatagccactttgtaactgaacagatataaacataagaagtttgcatcttattttatattcatgaatattcagaagccatatataacaacaataattaaagcgcaacaccagtaatagtccacatattacttaaatttgactaacagtattcttgttgttctagaaatgagatgaccagctctttcagaatatacagcaactgcctccacataaagcagtgccaggtttaggagatttacggtaaagccatgtttccaaggaggtctgtacaaaaagccagacttctgctggcagttactgagagagataggctttccatccatggcagccatttacttttgctctgggagacgtttgtaatagaaaaggcacaactggggtatttattcatttccccccgttcctctagtgtttggtggcgttgccgttgcaagtgcgcagggctaaaatgaactggttatcttaggatcatggaaaa

SEQ ID NO: 17349 - DNA, 2300 bp, Homo sapien
aaaccctgtctctactaaaaatacaaaaattaaccgggtgtggcggtgtgtatctgtaatcccagctactcaggaggctgaggcaggagaatcgcatgaacccgggaggtggaggttgtagtgagccaagattgcaccattgcactccagcctggacgacagtgtgagactccatctcaaaaaacaaacaaagaacaacaacaacaacaacaaaaacttaggtttggtctctgcccccatttcctggcacccgacagctcttagaacccccagactctctgaagtggtaagtgtctgaatgccagtgagatgactgggtggctgagggggctcccgagagcctcaggatgggggctagttgccaaaggagccaaccctatgatgaaagggtttgactttcagccccatctccctgatctcctccagggagggaagtgaggctgaaggttgagaggatcaccaatggccagtgatgtaatcaatcatgcctacatcatgaagcctccatataaacccaaaaggcatcaggcgcggtggttcacacctataatcccagcattttgggaggccgaggtggaggcagatcatttgaggtcaggagttcaagaccagcctgaccaacatggtgaaaccctgtctctactaaaaatacaaaaaaattagccaggtgtggtggcacatacctgtagtcccagctcctcgggaggctgaagcaggagaattgcttgaacccaggagacagaggttgcagtgagtcgagatcgcgccactgcactccagcctgggagacagagcgagactccatctcaaaataaacaaagacacaaacccaaagggctgggcttccgggagcttctggattgctgaaggggtggaagtccatggagggtgtgcaccctgcactggagagggcacggaggtgtcacttccctcccacatcccttgccccgtgcatctcttccatctccaagtagggagtgtcagaattgagttacatcttaggacacccagctgttgttggagaatggcttcatgtggaaaaaaacccacacgttttagttatgaaagtgttctgtgttgtgtgactataagacaaagaaagtttgtttttcctattcataagtaaatttggccaaagtctcaactgctaagtaaaaaaatgtagacttcccacttggccatctggctccaaccctacactccctgtttggctcttgtggggtcagcctaggctcaactccattgatgaacttggaaacatgattttatcacctgtacctttgaaataataatcatgtttacctatgttgacaaaaggagtcaaactctgtaacatatttgaagatattcatcctgagccaaatatgagtgaccaatggtctgtgacacagctctcaggagaccctgagaacatgtgcccaaggtggttggggtacagcctagtatacattttagggagacatgagacatcaatcaaatacatgtaagatgtaatttggtttggtctggaaaggtgggacaactggaaaccagggcttccgggtcataggtagattcaaagattttctgattggcagttggttgaaagagtcaagttattgtctaaagacttaggaatgtctgggttaagataagaggtggtggaaaccaaggttttatcatgtgggtaaagcctccagggaggaggttttggagagaacagattgtaaatgtttctaatcagactgaaagagtctgctgtatcagtaattccaaaagggaggaagttataatgagccatgtctgacctcccttcccatcatggcctgaactggtttttcaggttaactttggaatgccctttgctgagaggagggatccattcagattgttgggggtttaggattttatttctggtttacagctagtatgggtatggcaaggatggtgtggggtaatccacaaaatgcttgaaatggtgagcagcacggcatccgtgctcactgtattttcgctgactcatgctgactgcagccccaggagggcacgggctcaccgccaacccttcgtgcctcccggctggtttctgagatcagccacagaagttaaacttctttccagggaagaagggcggggatgtcagggctggagagtgcccgtgtccttctgtgtgcattgggctccttcctccttaattctctgctttccacttttaggctgaactccagtgcacccagttagacttggagcggaaactcaagttgaatgaaaatgccatctccaggctccaggctaaccaaaagtctgttctggtaagacca

SEQ ID NO: 17350 - DNA, 2300 bp, Homo sapien
cccctacaaatgtgtatgttgaaatctttgcccttaatacctcagatgtgactgtatttggggagaaagtctttaaacaggtaattgagggtgggccctaatctagtcttactggtgttcttataagaagaggagattaggacacagatacgtacaaagggaagaccatgtgaagacataggagaagccatctgcaagccaaggagagaggcctcagaagaaagcatccctgccagtgacttgatccagcttctagaactgtgaggaaatgagtttctgttgttgaagccaaccagtgtatggttctttgctatggcagccctggcaagctcacacaccatgcgtcttactgtgtttgtgttgctgtaaaggaatacctgagggggtgggggtaacgtataaagaaaacagatcttttggctcacggttttgcaggctgtacaagaagcatggtgctggcatctgcttctggtgagggcctcaggccgcttccatccacagtggaaggggtaggggagctggagtgggcaggtcacatggagagagaggaattaagagagggggtggtgccaggctcttttttaacaatcagatcttgtggcagctaatattgatagaacgagaactcactcatcactgtggggatggcaccgagccgttcatgagggatccacccctatgacccaaacacctcccaccaggccccacctccagtattggggatcaaatctcagcatgaggtttgtgggaacaagtgtctcaactataacaccatgtctaggaatgtttcgttaagtgggcaaaagggctgttaacctgaagggagcattctgtggaaggagacaagtcttccctgaccctcctgatctccactgagtacccacgtgatgttcatctccacgagtgtgacggacattactggaatgttcaggaagatgatatggaaaagtcagcatcagaagtatgcatcctggctgggcacagtggctcatgcctgtaatcccagcacattgggaagcccaggcaggcagatcacctgaggtcaagggttcgagaccagcctggccaacatggtgaaacactgtctctactaataatacaaaaatgagccaggcgtggtggtgggtgcctgtaatcccagctactcaggaggctgaggcagaagaatcacaaacccaggaggcggaggttgcagtgagccaagatcccacactgcactccagcctgggcgacagagtgagactgtgtctcaaaaaaaaaaaaaaaaaaaaaaaaaaggtgggcaccgtggctcacctgtaatcctagcactttgggaggccgaggcgggtggatcacgagatcaggggttcaagaccagcctggccaagatggtgaaaccccgtctctactaaaaatacaaaaaaaaaaaaaagaaattagccgggcacggtggcaggtgcctgtaatcccagctactcgggaggctgaggcaggagaatcacttgaactcggagggcggaggttgcagtgagccgagatcacaccactgcactccagcctgggtgacagagtgagactctgtctcaaaaaaaaaaaaaaagaaaagaaaagaaacatgcatcctattcctagctgcctcatgtccagttctatgagatgggagtagatgaatggctgtcctggtgttgaagtccttacattttacttctctttaaaaatgaaaacaaaaaaaaatgtcgcttgtcagaccacacaaagccacacaggcttataacagagctcaggaatcttctgtcctttccagagcaggcacagagacacgtggtcttcagcagagcctatggggttcagatgattcacataagaatagaagtttcagggctggacctggggaggcagcctgagcctgagccggctgtcctgagcctgagtactctagctgccttgtcgtcatcgcatctggctgccatccagcgccagcacacagtaatgagtggccgagcttcctctgggagggaggaaacagttaaaatcttgcagcagctgcaatcatctaggcgtggttctcttgtctgacttgggctgcacagatcctgggccaagggacagaagaaagacagcctaggagcagagcctcccagatggctgagttggatctaatggctccagggccactgcccagggccactgctcagcccccagcccctctcagcccagactctgggtcacccagcccagattctgggtcagccagcccagtggaagaagaggacgtgggctcctcggagaagcttggcagggagacggaggaacaggac

SEQ ID NO: 17351 - DNA, 2300 bp, Homo sapien
atatacaaagttccagaaaaagaatttaaaataataatcttaaggaaacagtggaattcaagagcatacagttacacaattcaatgaaatcaagaaaattcataatttgaatgaggaatttaacagagatataaaaaagaaccacacagaaaacttagaactgaagaatccaatgaattaaatgaaaaatacaatcaagactctaacaacagactagatcaagcataagaaacaatttttgggccaggcgtggtggctgacgcctgtaatcccagcactttgggaggccaaggtgagtggatcacctgaggtcaggagttcgaggtcagcctagccaatatggtgaaaccctggtctctactaaaattattaaaaaaattagttgggcatggtggcgggcgcctgtaatcccagctactcgggagtctgaggaggagaatcgcttgaacccgggaggcggaggttgcagtgagccgagatcgcgccactgcactccagtctgacgacagagcgagactcggtctcaaagaaaaaaaaatttccgctctataacttcacttttaacattgtttagtttttctgttttgtttttgttttgagagagaatctcgctctgtcgcccgggccgctccggactacatttcccaggagcctcggcgcgcacttccgtttccggcccctttctctggaggatctccgcgcgtggcgagtctgtgtcctccctgtcccccagagcagacaccctctctgtgtctggaccggggaggagcagacgctggacagggtgtgtgtgttcagcagtggattgtcagacttggggtcccggctgctcccttttgggtctctccccgggcccgctgatctgactgtaattccttctgctggagctagggttcggccaccttgacgcgccccctctgcccctggagcgtgtctttgggttttgtgtgtgtgggagtggggtgtatgtgtgtttcttatccgagacacctctgggtcgtttgcttggaaaccggctgagggcccgcataccctggagcatttggttgcaaagtgaggcaggtagcgcccaaggctcctgtaccagggccaggttaggcaccaacgcgtcccttatgtctctgcagcctgcagtgtggtggaaccgtttcatagactgaagtgtgaacgtaggaggggatggatatcagagatctgtttatccacattttcagagagtggtattgctctgatgtgagcgtaggcaggttactctctgtgtctcgtgttctttacctgtaatttgaggtttgttgtacctactattaagtggtggttgtgaggattaaatggaattttgacatgcaacagttgacacagggccagacaccaagtaagggatcaatcagttgttgcttttattaatagtaggcatccatctgcccatttgcacgtaagaaggaaacacccaagaatgaaaagtagcttgttgtaggtcacccagccaactagcacatagtggaaattagaatccaggcactcccagcagggcactttccaccaccctgcacttttgtattcatcaggcacagtatccttactgttgtctgtaactgtctatgttcccagtgtctgactctgcagggccctagtggtataaaggtactgagacttgcctgtgttcagggcttcctgaagattaaatggctgccgaagttcttgagtttagctttagctcaaaagatactgcgtcagactctgcgttctgagtagagtctcagagaatgaaaaaagaaatacaatgaaaaaggggaaaacttcaatccagaacctcttaccacagtttctggtagaatgctggcaatttccaggaagatacgtggagaacggaaaggttgctacacccaaatagtgaagcaaaggctatgattatggaggattggacctgcaaactccagaacagaggtaagaaatagaaataaagggtcctgccattagccaagaatctgcagtatgcacacacaacctcattttagtttttctttacagcaaccttgtaaaatgtgtgtgggcagcacagagaacttgggcaagttaacagtttcctcatctgtgaatactgatttatggaaagcacctggtgcgtggtgagtgtgcgaagaatggtggtgattttactaatattcccttttaatttgaaactctgaaaaaagaagataccttacttccgtactctttccattataccacctgcctttctgaaggataaggggggataagtcggactccttggaagagaagaaagaaataggtatggagag

SEQ ID NO: 17352 - DNA, 2300 bp, Homo sapien
cagtcccatagccccaaccccagtgagccaaacctcaagttggctgacccaccatgtacacaaatgagcccctgacttgagaaatagccctgtgcaaaagccacacgaccgccatcaccacctcttagcctaggccactgagacattcacaaatgtcactagcattttttttttgagaccgagtctttctctgtcacctaggctagagtgcagtggcatgatctcggctcactgcaacctctgcctcctgggttccagcgattctcctgcttcagcctcccaagtagctgggattacaggtgcctgccaccgctcctggctaatttttgtatttttaatagagatggggtttcaccatcttggccaggcttatctagaacttctgacttcatgatccacctgcctcagcctcccaaaggattgggattacaggagtgagccaccacgcccggcccatcactagcatgtattactgctgaagaaacttacatagataatacactactgtatccacctagaacaaaagccaacacactccattgaagcaacaccccaagacccatatgaataaatctttccctacagaacctactccatgaaattggaagaagtgattgtttcatcatatgtgtataaatcagtgtagagctgggtgcggtggctcacgcctgtaatcccagcactttgggaggctgagatgggcagatagcttgagttcattcaggagttccagaccagcctggccaaaatggtgaaaccctgtctctactaaaaatacaaaaattagcctggcatggcagcacatgcctgtaatctcagctattccggaggctgtggcaggagaatcccttgaacgcgggaggcagaggttgccatgagccaagatctcaccactgcactccagctgacagagcaagactctgtcaaaaaaaagaaagaaaagaaagaaaaagaaagaaagaaagaaagaaagaaagaaagaaagaaagaaagaaagaaagatgtagaaacacatgaaacatgaaaaagcaaggagcacaacacctccagaagaacacaataatttccagtaacagatgccaatcataagaaaaaatacaaagttctggctgggcgcggtggctcacgcctgtaatcctggcactttgggaggctgaggcgggcagatcatgaggtcaggagatcaagaccatcctggctaacacggtgaaatgctgtctctactaaaaatacaaaaaaaaaaaaaaaaaattagctgggtgtggtggtgggcgcctgtagtcccagctactcaggaggctgaggcaggagaatggcgtgaacccgggaggcagagcttgcagtaagcctagagatgattgcgccactgcactccagcctgggcgacagaacgagactctgtctcaaaaaaaaaaagaaaatatacaaagttccagaaaaagaatttaaaataataatcttaaggaaacagtggaattcaagagcatacagttacacaattcaatgaaatcaagaaaattcataatttgaatgaggaatttaacagagatataaaaaagaaccacacagaaaacttagaactgaagaatccaatgaattaaatgaaaaatacaatcaagactctaacaacagactagatcaagcataagaaacaatttttgggccaggcgtggtggctgacgcctgtaatcccagcactttgggaggccaaggtgagtggatcacctgaggtcaggagttcgaggtcagcctagccaatatggtgaaaccctggtctctactaaaattattaaaaaaattagttgggcatggtggcgggcgcctgtaatcccagctactcgggagtctgaggaggagaatcgcttgaacccgggaggcggaggttgcagtgagccgagatcgcgccactgcactccagtctgacgacagagcgagactcggtctcaaagaaaaaaaaatttccgctctataacttcacttttaacattgtttagtttttctgttttgtttttgttttgagagagaatctcgctctgtcgcccgggccgctccggactacatttcccaggagcctcggcgcgcacttccgtttccggcccctttctctggaggatctccgcgcgtggcgagtctgtgtcctccctgtcccccagagcagacaccctctctgtgtctggaccggggaggagcagacgctggacagggtgtgtgtgttcagcagtggattgtcagacttggggtcccggctgctcccttttgggtctctccccgggcccgctgatctgactgtaattccttct

SEQ ID NO: 17353 - DNA, 2300 bp, Homo sapien
tgaagtctttaattttttatttttccataattcttgattatttcttaaaatagttcctcctctctgtttttctttccttatggattctcataaagtctagtcagcttccatactgcttaatatttctttcgtatttttcaactttttctcccttcctggtatcttctggaagtgtagagttccctagcctgatattgtagcttcactagaatattgtagatattcacttttcaattttacacattctgctatccaatctagtattaaccatcatattttgacacacagtttcgttgtttttatttttatgacaagttcttgcttgatatttcctgtctcctcctttatcattcttaggatagctttttaaaagtatgtgtacaggccacacacctcctaggaccgactgtagccatttgtcttcctgtgggtttcaaataaacttttcaatagttgctcaatccaacaatttccctcttccagacaattcccagattggattttgacaaagaagatcctgttttatgttagaaagtggaattagttaaattttcctgcataacaatatgaccacatactcagtggtccaaaatagcacatgtttattatctcatagtttctatgggtgagagtctgagcacagcttaagtgagtcctttgcagccagctatcaagatgtcaggcaagacagggttctcatgggaagactctacaaacaatgattcacttccaagcacacagagctgtccaaagggttcagctccttgcaggttgtgggaccaagggccttcggttcttgcaggctattggctggaggccatcctcagttccttgtcatatgggcctccccaacatcaccaccacttcatcaaagccagcaagagaggagtctcctagcaagacacacgttagacttttatgtcacctttattgcactgtattggttagaagcaagtcccagtccatacacaagaggggattgcacaaaggtgtaactaccaggtggctgagataatgggagttacaaatcccttctgggagctggaaatcatctttccttgaagtttctaaaagccactgaacggtttgaagcactaaagtaatagcatattcttgttttagaaagagcactagccagaaagtgtggagaacagattggtggtagagaaaaccttagttagggaatccagttaccaggctgcaacggcaatcctagtgaaatggtggtggccccaactaaggtaatgctactgagaatagagaaagatggaaacaattgagttatttaagatacaatgaataggacttggtgataaatagatggtgagatcaaagagttaagaatattcaggctctggtttgtgcaaatgagtgagtgggcagtaatgtcattcactgagaaaaggagggcagtctagacacgaagctggaggtggatgggttagtcctctaacagaattggagagactgaataactctcccttgaaagaaccaccttttatgatatgtttaaactaatgcttatgtctgcaaagaacctattgcttaaatttgttacaacaggttcaatcttttcaactcattttaaatacatgaattttaggattacaagtagtctgtggatacaggaacatctgactgagtgtacaaagagggacctgctcttcctaaaaacatccttcgtatgttttgaaagcaaaaggatgagttctgggcgcacaaaatatggataaaagctatgtattttaacgtatcttacaccggagtaatttgggttgaactcagcagccctaagcactgtgccgcaggaacttgtgcagacaaagcgcggggacggaccctgactccggtccgcgtctccgctgctccctccctcccttgctctgaggattagacacaggagatgctgcctcatactctcgcgagacggacggagctcttcgatcgtccgattctcccagccgcaccacgggtgctcccacctgcggagaaccggagtctggcgatgccaaggcgcttctgggaattgtagttccgggcgggatgagggcagcacgcctggctccgctccttcttacgcatgcgcgactccgagctggccaaagaagttcgtcccctttgtgaggcccgggatgggaggtgagttgcttgtggtgatgtcgctcgtctcggctcggcctcggcggtggttccccgggtcgttctgtgccgagtcggggctagagtgcgcgtttgttaaaggggcctcgagggcagaccatgagccctgtcccttctcactctggcctgatcctctcctc

SEQ ID NO: 17354 - DNA, 2300 bp, Homo sapien
ctaacagaattggagagactgaataactctcccttgaaagaaccaccttttatgatatgtttaaactaatgcttatgtctgcaaagaacctattgcttaaatttgttacaacaggttcaatcttttcaactcattttaaatacatgaattttaggattacaagtagtctgtggatacaggaacatctgactgagtgtacaaagagggacctgctcttcctaaaaacatccttcgtatgttttgaaagcaaaaggatgagttctgggcgcacaaaatatggataaaagctatgtattttaacgtatcttacaccggagtaatttgggttgaactcagcagccctaagcactgtgccgcaggaacttgtgcagacaaagcgcggggacggaccctgactccggtccgcgtctccgctgctccctccctcccttgctctgaggattagacacaggagatgctgcctcatactctcgcgagacggacggagctcttcgatcgtccgattctcccagccgcaccacgggtgctcccacctgcggagaaccggagtctggcgatgccaaggcgcttctgggaattgtagttccgggcgggatgagggcagcacgcctggctccgctccttcttacgcatgcgcgactccgagctggccaaagaagttcgtcccctttgtgaggcccgggatgggaggtgagttgcttgtggtgatgtcgctcgtctcggctcggcctcggcggtggttccccgggtcgttctgtgccgagtcggggctagagtgcgcgtttgttaaaggggcctcgagggcagaccatgagccctgtcccttctcactctggcctgatcctctcctcgggggacgcggttgtgccacgggcggggtggtcgcggggttctgggccagtgccccgagcgcggcagaatttgtccaaactcctgatgccccagcgtcacctcttccaggtgcccggttcccccagggacagcttcaagcggtagggacagacatctgaggacccagcctcagggatgctgtccccgggcttccaggctccagcgccgtaggactgaggcagactccacggtgagaaagagacccgatctaacccaggcctttcatcagagcccaggagggaaggcaggaagtgggaccacgaggcccggggggcttctaactcgtctggccagggagatctgaattggggtgaagagcagaatctccagaacaaggaggaggtggtgatcatggagacagatttggctgaaatgcctgagaaaggaggtgagaattgcggacgtgttgaacttgtagcgtggaaggacgaaattcctgctcctgaagggaaaacggttggctcaggggaggtggctcttggctggctgtctccattgtcttggggatggatgggctttttaagtgagactgaagggcttggtatgggagcaccgccctttccatggcagctgggcacacagtggacccttcaaagctacccccaaaatgtgagtgaaatgttaacttctatggcaagaattcacctctttggttgtcaaaaatgttttgttttacataggagaaaacaggcgtagtagttaatgactgacttccattctacctgaccagtttcatgaaggttgtgctgtgacctcctacaccagaattccccctggggtggttgttagatttctggattgtaccccaggctcaactaatgcttattactttgaggtggggtccagcaatctacattataaataagctttcagagtgagaaccaacgagtatagattaaactgggaaatttactgacatattctaatttctagatcagaggatgccatcttacagaatgtgttatgattatagcaactgaattcgagcccagagtagcaatattcccgcatatcccgggaagagggtcctgggaggaggtcggttgttttgggggtaccttcagtctcagtgtttgtaggcagcacatatagtatgttgaagtggtttttagactttaaatctgagtggcacgttaagcctaggtctcatcattactgctttcttgtcgttagctctgtcttcccaggattctccccatttccaagagaagagcacagaagagggagaagtggctgctctgcgcctcacggccagatcccaggtgagtgagtgctgattattggaattacaccttgtttcttagagtacagatgcactcccttctttgtgatgtggagtttctttatccactaaagcccatctgcagagctgagttctaaatctaagagactagtcaggagactaatgg

SEQ ID NO: 17355 - DNA, 2300 bp, Homo sapien
gtaatgaatgtgggaaaaccttcagccggagctccaattttgctaaacatcaaagaattcatattggaaagaaaccgtacaaatgtagcgagtgtggaaaagccttcattcattcatcagctctcattcaacatcagagaactcataccggagagaaaccctttagatgtaatgagtgtgggaaaagctttaagtgcagttcatctctcatcagacatcaaagagttcacactgaagagcaaccctgaaaaattactgaatgtgaagaaatgtaagttggttttatcactgtattaaatacttgagtgtttaggtggaaggcgcatccataatatgcatgtgaggaccaattctgtatgcatctaatttcatttgcgtaatacatagttttgagccataagcaggttctttatgtccgttaatttgataattatgaaatctagccagcgatttcaaaattttaatctccaacgtcccaaatagctatctgtggaaattcaagaagtccctgagagtaggtagcagtacgaacattgtgaaatccagttttcccctctcttgtttatgtcagagctttgttgtaagcctctcactttgtaaggaaattcttattgggtaggttaggctgagggcttacatccttatcatcaggaagacacaatgttgttatttattactccttgagatctagatacacatatggtataattcatctagagtgtaatttcttttatattagccttaaaaaccaaaaatgctgggttcaaagtccttagaattcccttcctccctcaacaagctgctgtctatgttgatgaccataactgggatgtataatatttacagacaactctaagttacgttcacatggattatgtacatcattgatttttttttttttttttttttgagacagagtcttgctctgttgcccgggctggagtgcagtggcgcgatctcggctcactgcaacctccacctcccaggttcatgccattctcttgtctcagcctcccaagtagctgggactacaggcacctgccagtacgcctggctaattttttttgtatttttagtagagatggggtttcaccatgttagccaggatggtcttgatctcctgacctcgtgatctgcctgcctcggcctcccaaagtgctgggattacaggcatgagccaccatgcctggcatcatcattgatttatgtcattgttatccctctaccgcggagaccttctttcattttccatttccctgggagttcacgtgaagtagtgaatgggtcaaaatcttaacagtggttgttgatcaagtccttcctttcttatccttggcactgaataaatctttggttttccataatcaaagggtgagggagacttcttttgtctacattattcagctttctgaaagctatgctgtgtccatttgagaaaaagccccagggatattgaaggtctgagaagttgagtggttcagtgtgttattatatttagggtcccagtaaagaagaactgaagcaactgtgagacaccagggcatacttccctgtatgagtggaaaacaaggcacggaaaatagctcacaggatagtcctcaactgacttgcttgaggataagcagcttcccttcgtgaagaagttgccatttctctggccttcatatttatctactttttgttattgttgtctgtatcggttcaatctcacactgctataaagaaatgcctgagactgggtaacttataaagaaaaaaggtttaattggctcatggttccatgggctgtacaggaagtatgactggggaggtctcagggagcttttactcatggcaaaaggcaaagccagagcaggtatcttcacagggctagagcaagaggaaaagagagaggggaggtgctacacactttttatgcaaccaaatctcatgagaactctatcacgagacagcagtagggggacagtgctaaatcattcatgagaaactacctgcgtggtccagtcaccttgcaccaggccccacctcccacattggggattacaattaaacatgagatttgggtggggatacagatctaaactgtatcattactcaaaaaaaaaaaaaaaaagaaagaaaagaaaacacaggaaaaggaactcacctcttttatcatcttagtatttagtactaatggtttagagcaggaattgacaaactgtggcctggactcatggaccaactctggcccaccacctgtttctcagaagaaaattttattggaactcagccacacttactcatttacatgttgtcct

SEQ ID NO: 17356 - DNA, 2300 bp, Homo sapien
ggccagcaaactcccagtttagtgttgctttcattgctttctgtagtcttgttaccagagaagatttttatgttccagaattgcacagagggaaaacctgactattatggttaccactgtggccatcaagacaaggcacttgattcctaggatcccagcaatgaccctccctggaggtgatgggaattaagagacctgctatggaaattgtgggggctgagtaaacagtatctacaaatctttctctgtgtctgatacttgaagtccacaggcagtaaacaagggaagactgcagaacaggcagggagggattccatgagcaagagctggaaccccataaaaataaagtgaaacccatgttcatgaagctaaacacaggccagtaacccagcagtcagagaaactaaaggaaaaatccaaggaaaggcagagcaattacaggcttagctgctgtttcatggcagtgagataagtcagcagatcagcaacaagtgtggtgtgtgtgtgtgtgtgtgtgtgtgtgcgcgcgctcccacgcgcacgtgaccacttgctacgaaattcgttttattccagtgtgtgagtgtgcacctgtgtgcgtgtgtgcactcctgttgacccagtttctgctctgtggccaggtccatgaccctagacgaccccaggtgtgctctcgatgacgtctgcagggatggagcaccgcccctgccattgggtattgcactgtgtgatgccatcctcggggccctcagggtgatggaacccaataggcttccttaggctttcctttcagatggacaggaaatagatgatgttccattgtcattttgttttctttctttccatggattctgtgaccatcttcctctcctcattgactctgccagaaggggattcctggtggggcaagggtagctggtgggaaatgaggtaccgggaaattagcaaagggtcttctggccatctggggacagttctcatgtggtccccagcccagtctcgagggttctgggccggtcaccctgcagcctcggtgctgcgcctctggatccagcctccgcaggaagaaccctgggagacccagcaaaacggggtgcctggtctgacaaacgtccccccgttcctctggctctgcggctcaggaataggccgagacatcatgtccaggcagtgccaggccacctcactgccccctttgaggtgagcacagagggcttttgggggcgagcatgaagctgggcacccagagcctgaggccgactgtccctccctgtgtcctggagtgggggccttgacccgagaagacccccaggggatggcctgtgggtgctgatgcggggaggggaggtctgtggactgaggggggtcattggcaggggacattgagcaccgcggctcagggttctgctcagtggggtcagtgggaacgtggtcagtgaaggcctggtcagtgggggcctggtcagtgggggtctggctggcagaagcctggccaggtggcggctaggtgacttcaggcagggtttgtccttggagcctccttgccgccatctgtagtgggaatgagtcatggcactccggagggctgctgggaagaggaggtgagcaggtgtgtggaatccagccctgccaaacagatctagcactttacagcctagctgagtcccctgctagggaggggacctgccctttgccttttgcccccaaccctcaaccttctgccccctatcttccatctgcaatcccaggaatgccctggatggggaggtctgagtttagggagcacccgtggatgctctgatgatggccatgggtcccgaggggggagaaagtgacaagggtgacccagtgtcctgggtgcacatatgagtggggcagccgggcctagccagagcagtgacaaacgcatgcacacatgggttcacccacatacacgtgcatgcttacatgcacaaacactgcacacacgcacgttgacacttcaaggggtggagggtgctggctctggtcccggctgacccaggcaggggcccattgtgatgggtgtcatgacctcacaatgtcactggtgctgagcactcgcccacctgtccacttgccgtctctatgtctggagctcttagagataagacatagaggtgtctggttctgagaaaaggaagttttgctaagtgagagacacaactgactcaactgactcaggtgagtgtgacctgctctgttccttccctgctgacctgggtacagtcattacctggtgggcagggctagcctctgggcaggtgccgaggagggtcatc

SEQ ID NO: 17357 - DNA, 2300 bp, Homo sapien
ttttggtccaggtactgagggactagtagaaagatctgaaacagttgggatggaggctgtgattgatgaaggaatgcctaaaagttaccacagactgtacggcaaggcagctacatgcatcagtgaaggactagtagttcctgctacaacttcagcagtacctataaagtaaagctaaaattattttatctgtgaattcagattttaaaaagtcttcactctctgaagatgatcatttgtccttaaggacaaaaatgaactgaagtttcacatgagctatttccattccagaatatctgggattctactttaagcactacataaactgactttatcctcagattagctgaatgattttgtgctgtttcaggatgtttgcactgaagaaaaacagaaagcttatctgaaatttataaaactttttgttttgctacatagaaaacagaaggtatttaaataataagcagtgatatgcttagcgagcacagctatactgattttgattagaatagtcatcaaagtagcttagggacagttaatataaaagattagaggagcaaggtctagaccatctacttctgctaaaataatttaaaaagaggtccataggccctaactatatgagcccagcttttgtaatctgacaaaaaaaatgaggagcagcctcgtgtatatcaatgtacaaaatattccttaggtcccttccattggtggtgatgctgccagttattactggagaaaaggaattctagagctttaacttggcagattaaaagtactctttttttttttttttttgagtcggagtcttgcactgttgcccaggctggagtgaagtggcaaggtctctgctcactgcaagctctgcctcccgggttcacaccattctcctgcctcagcctccagagtaactgggactacaggcgcccaccaccatgcctggctaatgtttttgtatttttagtagagacggggtttcacagtgttagccaggatggtctcgatttcctgacctcgtgatctgcctcggcctcggcctcccaaagtgctgggattacaggcgtgagcccctgcacctggcctaaaagtactcattttttattcatcaataattagtaatctgactcgtttcaaaaatttgtttattattgacaacctctttgaagatccatttcacaaactcaacagagtgccacgattaagagctagggatcccccaaactacctcaagcatctaaaaaattgccattttttaaaggcttaaattgtagtagtaaagggggaaaaaacccataaatcatctaaaaaattgccatttttaaaggcttaaattgtgtgtgtgtacacacacacacacacacacacacacacacacacacatcattgacctttcttaagacttcagagggtggaacttccggatgtgaccacagagaggaagagaccgggaaggcggagcgcggccgccagcacccccgagccgccgccggacccccgccgccccgggccgccccccgccccccgcggtcccaggtctgtccgtctggggacggctcgattccccgcagagccgggggagggacgggggcgcccaggggagggggcctcgggcgccccgcccgcgcctgctgccccgtcccggcggtaatgcgctcccggccgtgacccccgctgggggcgggggccgggatccatgcgcggagcccccacccggcccggcgcctgcggctgacggcggcgggggttggggggcgcgcgtctggcctcctgcccaccccctggcgtcgacatcacgggccgtcgggggctgcgccctaccccgcggccaggctctggagggaccctggaggtgccgccggcctcagcccatggcccaaaggtacgatgagctgccgcactacccaggcatcgcggatggccccgcagccctggctggcttcccagaggcagtgcccgcggcaccagggccctatggccctcaccggcctccccagcccctacccccaggcttggacagcgacggcctgaagagggacaaggatgagatctatggacacccgctcttccccgtcttggccctggtctttgagaaatgtgaactggctacatgctctccccgtgatggggccggagctgggctggggacacccccgcggcggcgacgtctgctcctctgattccttcaacgaggacaacactgccttcgccaagcaggttcgctctgagaggcccttcttctcctccaacccagaactggacaatctgatgatccaggcaatccaagtgctgcggttccacct

SEQ ID NO: 17358 - DNA, 2300 bp, Homo sapien
taggcctttttctcttcactctcctgggcatggcacccctgggcaaactcctaactaccacctctgcctggtatagctggaaccaccccactgtgaagcctccctcactctgtaaaagccagtaccccaggaagcctcctctaaccctttgccctctgccactccaaggaagtgctattggaggagctgcctgatctctctggccttctgtgtggcagcagaagtttgtgtcaactgctgtgggaacgtgattggtggagcaggtgattccagaactcacgtgaccaggacacggaatgtgtgggcttgccaatattttgatatataaatcaactgttttcattatggaagtaacaaaacctcaagggaaatagaaaaaaaaattccctgtaatcatcccacccagctaggaggtctactgtgtgtgtttttgacattttgctgtcctcgttggtgcaagggcagatgtgactgtttatgcctgtggagggcagaggggtttttcttcttcttgtctttttttagagacagggtctccctcttttgcccagcctggatggaatgcagtggcatgatcccagctcactgcagcctcgaacccctggcctcaaaggatcctcctgcctcagcctcccaagtagctgggactacaggcacctgccaccgtgcctggctgatttattttttatttgtttgtttagagatggggtctccctacattggccaggctggtcttgaactcctggcctcaaatgttcctcctgtcttggcctcccaaagttttgggattataggcgtgagccatgttgtcgtcattacagctacattgagatataatttatgtgccacacaatgcatgcctttcaagtgtacagttcagtggcattgaggtatatccacagaaccgtacaaccatcaccacattgagaaaatttttatcaccctaaaaaatcctttacaaaatcctttaccctttagcagtcaccccatgttttgatttttgctttacatgattttacaagcatcttttcctgttgctggaaaatctccttacccatcctctttggtgactgtcagcaaaggctttcgggtggtgaaatagcgtggccaggagtgctctagaacaatggtgttggtgagggctgcagaagctgaggacccacaggcagagagggagggatggtagaagcaggtggtgaggagggactcggggcaggactttgggggtaaaaggaagcaagtctctggaagcagaaccagcagcactgctgatcattgggacgtggagaaaggcgaaggctcagggtgtcagcaaacttcctagggtgggtgagggttgccaggtcaataacgaacagggtcccaggaaaaggcggcagcacaggtttggggagaattagagatgagcttggttttggtcttgttggatttgggggcaccagtctctctcctggcgagagtcggcagtggggtgttaggatctggccctcaggaggctgttagggctgaagcaagagatttgggagttaagggtgtgagggccacgtgggaggcctcgggagcctgtgccgatccagggtgagtgtgaaggaaagaaaaaagagggcccggggaacactggtattttcgggcggtggacgaggatgggacggccacgagcttgtcttaaggtagaaggcagagcggggccgtaggggcagtggcgcgggcgagggtggagaacagcgctgagcctcgctgggaggcggccggagggggctgcagcccccgagggctccttgcagtccggccccgcagcctggagacagctccggtggtgctgcgctgcccgagactgctgcacgagcggggactgcggcctcggctccctgcctgcccggcagccccccatccagtcggcctgcccggggtgcgcagggttagcctggagtgagctcgccccgcccggggttgcgcggccctggggggtcctctcgcggcggctcctgggacctgctggcgccccgggcagagcccggccccatcccaggagtcgcccggactggaaggcagtgcgagcactgggacacagcctccgagctcgagcgtgacgggaagttggggcaatttgttagttatccgccgccaccaagacgcggcacggcgcctggaccggaggggccccgcgcgggcgcgaactttgggctcgggcgagtgggtggtgctccgcccagcccgagacgggcgggcgcgcgggccaatgggtgccgcctcttggccgcggggggccccgacccgtgggtcccggccaccagcgcccc

SEQ ID NO: 17359 - DNA, 2300 bp, Homo sapien
ccccggaggcagaagttgcagtgagccgagattgtgccactgctctccagcctggacaccagagtgagactccatctcaaaaaaaaaaaaaattaaacttttaattttgacataattgtaggtttcctttaaaaaagttaacatgcttgagagttcctaaaatataattttgtcttcaacctttctcacctaatattataagaattttctcacatatcaaagttttttcctgtatatcatttaacagttggatagccttattactaatccaaaaagtacacatttattatcttcagatgggcaacataaaaaagcctgataatactggtgttagtggggacatggagaaagtagaagttggtttttctgtttgtttgtttcatttattttttttttgagacggagtctccctgttacctgggccagagtgtagtggcgcgatcttggctcaccgcaacctccacctcccggattcaagcgattctcctgcctcagcctcctgagtagctgggactacaggcgtgtgccaccacgcccggctaattttttgtatttttagtagagacggggtttcaccatgttagccaggatggtctcgatctcctgacctctggtgatctgcctgcctcggcctcccaaagtgctaggattacaggtatgagccaccgcgcccggcctgagaaaatagaagtcttatacagtgctggtgggagtgctgttttcacttttttgtgtgttttagtttttttttttcttttttctttagagatggggtgtcactacattgctcaggctggtcttgaactcctggactcaagtgatcctcttgcctcagccttccaaaatgctgggattacaggcatgagccaccactcctgtttccactttggagagctattggcaatatctattaaagttgaaaatgaacatatgctttagttacataaactaaagggggattttcagagatgtatgccaagggacatgtatggggataattgaatattatttataatagtataaaatggaaacaatgtccatacatagagtacttaaataaaattcagtgtatacatataatggaatattattcaaaggtaaagtaaaaataaatgtccgtcaacatgcctcattttcaaaaatgcattgagtaaaaaaatgcaagttgccaaaagaagtctacgatattttatattttcttttatttttcatgagctatttcaggaacagcaaaaagaagcctacaatataccttttatgttttaaaacaatactatatatgtatatgcatacatctatgcacgtgtgtttgttatgtatgtgtgcatacatatgttctatatataatatttaatatgaacacattaacaggaaggaaaccaacaaatgcatgtgcttgcctcagggataaggggaaggtaggaagaaggatgcactacagagaagtataaagagggcttctttatcactaacagtttactccctttattaaaaatataatacaggccaggcgcagtggctcacacctgtaatcccagcactttgggaggccgaggcaggtggatcacctgaggtctggagtttgagagcagcctgaccaacatggagaaaccctgtttctactaaaaatacaaaattagccgggtgtggtggcacatgcctgcaatcccagctacttgggaggctgaggcaggagaatcgcttgaactcgggaggcagaggttacggtgagccaagattgcgccattgcactccagcctgggcagcaaaagaaaaactccatctcaaaaaataataataataataaataaatatatatacacacacacatatatacataatacaagaagatctgaaataagtacacaagatattaacattaattctggggagtgaatgggtccatgggttttgctgtattattttccttttttcaaaattaaaatgaatttttaaaaaatactaagtctagtgatcctttgggcaagttactgaggtgactttgagaatcaggccttctaatctgaagtgtttttatttcacaggctgaagtttctctttggctcatcagccacccaggccttggacctagttgatcgacagtccatcaccttaatctcatcacccagtggaaggcgtgtttaccaggtagaagtctagagatgggggtgatccctacagaaaccccttaggacaaaatgttcttcatctctgtagaagctgttgactagctttaaatatttcctggactgttaaaaggcttttgccccaacttggtaaaattaacgaattgataattt

SEQ ID NO: 17360 - DNA, 2300 bp, Homo sapien
ctgaacatcttgaggggagattgagaacactagtaaaggatgtgaggttaaagtaggaataaatatgtaaaaaactaaataagcacataaacaaaaccaagatagttgtaactccagggaaatccaaaagttacaaagaaaacaaaaagtaatcatagcttcctacatggttccactgtgactagtttatatatcatcatacaaataaaacttggaatcttgatctaaaaaaattaccactgaagaatgggggttaggaagggtgcataactatatattaatagaaaaaagattttgaaaaagacagaaaacagggcttctgaaaataaacatgaatcaacagcattggttcctgtgtctgaaccatgggtgtcaggggcaatgattatgcccccttcaggactgtcaatgtgtcttgtgaaccttcttgttggagggaaaaaacccaaaactggctgggcacggtggctcacgcctgtaatcccagcattttgggaggctgaggtgtccgtatcacaaggtcaggagtttgagaccagcctggccaatatggtgaaaccccgtctcttctaaaaatacacaaattagccgggtgtggtggcatgcgcctgtagtcacagctacttgggaggctgaggcaggagaatcacttgaacttgggaagcggaggttgcactgagctgagatcgcccattgcactccagcctgggagacagagcaagactctgtctaaaaaaaaaaaacaaaccaacccaaactactgtcagtgtatggattaacctattcagacacagaacagttctggcgattattgtttaaagtgacagcattccaaaccctcaggccatcaaatctgagagcccagaacaattgtataagctaacatcagttggcttttttcccatcctttttggaaacaagtatgtttgaatacttggctgcactaatctttcaagcacatatacttaagtctccttaattttgactgagatgaggaaacaaagttggcttatttttctcagttccttaaaaacagtaactcaagataaaccctttcaaaatgcagtacagtacttttaaaacaaaagccatccaagttgaataagcgatggcagtttgggggcctgatatggctgttatttataaggtggccatttttacatcctaagagtagttcattagtcaatgcattttgagtatatcaaatttgatttgatcttatcctagcatactctgaacacatcttgagatcaacccttctcaagtgattttggtgagcatagccaaagagtaccctctgctggtcagaaaaaaaatggtgctttcacaatacccagatttactccaacgattgcatatgcatttaggttttgtggctcttaaaatgcttttttttttttttttgagatggaatttcgctcttgttgcccaggctggagtgcaatggcgcgatctcggctcacggcaacctccgcctcccgggttcaagcgattctcctgcctcagcctcctgagtagctggaattacaggcgcccgccaccacgcccagctaattttttgtatttttagtagagacgaagtttcaccatgttggccaggctggtctcgaactcctgaccttaggtaatccaactgcctcggcctcccaaagtgctgggattacgggagtgagccactgcgctgggcctactttttaaagtgtatggaagcattaactttaatgttaacatcagaatttgagaaaaagaagtttaataattcaaaatttcgtgtaaaataatcaagaactccacgtttctatcactcactgtaggctcccgtcccttccacccccgggcggggacccctcccagcgacccggccagctctcagcacttcggtccccactggcctactcgctccgacggaggggctcctgcaactgcgctgtaccgtaaatatttgctgaatcgatttgacttttacttgttccaatttcgcttttttgttgttttgtttttttgtctttttacgaacaagaggtttagagaaccacatggaaaaaaggcagggccaggcccggacaccccgcctcctgcctcccggcccggcggtgcccggatgccccgcccgcgcccatggcgcagccacacacgacctcggtcccgtacttcgcgcgctctcctgcaccgccgccgccatctcgctcaggagctcctccacaaccgccggcaacactacggccatcgcgccgcaggacacgccctccacgaccggcggaccgccgcgacgctccagctgactgcgcctacctgtggag

SEQ ID NO: 17361 - DNA, 2300 bp, Homo sapien
catttactgaattcctactatgtacaaagcattgtctacagagatgacagggaggtcagcctcccttgcagctaggtgtggccatctgatgaagttttggccaagagacacaggcagaaggaatgtgatcttacaacatattttataaggaagctgcttgtcctccatcctctttctaatttcttgcaggctggaggtgaccatataggacaagtaagcttaattacaactaatgataagagctataaagatgacagaaaggaatgataaggggtctcctctaaataggacttagggaagccttccaaggaagtgacagctaaactgaggtagtaaggatgagaatgagtcaaccaaataaggacctggggagaacaatgactcaaacagagggtagagaatgagtgaagtccctacaagctgaagagaatggttttgaggaagaaatgcaaagaaatagatgtgaagggaggatggtgagccagaggattactgccaaatgggtgggcaaggtatatgctggtttagatcatgtggggtgttgcaagccaaggcaaggagtttgtattttatcataaatgcagtgggtagccattcagagctttctgacaaggagatgacataatccaatttactctttttttttttggtcgctttggtttctgcatggagaatagattgcaagaggccaggaggccaggaaagactactggagcatagttggtggcaatgatggtttgcactagggtgacagcaagggagatagacaaaaggggaaagatttgagaaatattttgcatttgttggcaacaggacttgttgctggactgtaagtgtattggaaggcaatggtaaggtaccacaagttttaagaatgactatgaggtttttaggctgaaaaactgatggtagtaaagagatggcgaaagcgtatgttgaggaggcattaaagatcgtttagttttgggcatgttaaatctgagaggtaggtatggtcctaaagtgcaaatggcatgtcagtagcacactacagaatggaaatacaaatttggacgttgttggcatcgagtaggtatttagctcaatggaagagatgagataacttgggaaaagaggaggaaaaaaaaatagaaaaggatgtggagaaaaggaagaattcaggaggagaaccgaaccgcataaccaacactaagttgccattttcaggccgctatatacgtgcgaaattatgtcatttcagataggctggttaattgataaaaccactacaaaacgttcccgatatttcgtttgcataaagcgtgatgcctagggcgccatctccatttgcacttgacactgcagaggttttactgcaggccttagagtcggaaaagcctggatggattccaatcccctctcggatgacccacctcattctcggcaattttacccgcggagcctccatccactcttcggcgaggcggagagagtaatgcgcagcaacgccaagaccccgctcacaaaggctaccgcgctcggccgggcgcagggcccggagccgcctcaccttggctcgcttcagcagctggatgatctctgcctcggcctcgtccgccccgtcctcggcagcggccccgtcggctccctgctgctcctcctcctctgccgcagcgggcctcgagaaccaggcgagcgctgcgggaaggggctctgaggtcatcgggcccggcccgcgcccctgtccccgcccggccggccccgcccggcccgcgcccctcacctgccagcagcggcagcaggcctgggccccggccgtgcggcgcgactcgggatggcggcacctgcacctcgggccccggacctcctgccagccccgggagcaggcgcgcggagcagccccggcaccgccgccccgcggcccgcaggaagcctcggcccaggctccagctcaggagccggaacatgctcccgccgcgtcctctgcgcactgcaggccagacgcgctcctggcccccgaccacgcgccgagcgccctccggattggccgggccctgacgactgagcaggacatccctgcgtccgcacgcgcgatgacgcgccccgacgtcactccgtctcgccctgccccggcggggggtcaggatcctccacaggtaggcgcagtcagctggagcgtcgcggcggtccgccggtcgtggagggcgtgtcctgcggcgcgatggccgtagtgttgccggcggttgtggaggagctcctgagcgagatggcggcggcggtgcaggagagcgcgcgaagtacgggaccgaggtcgtgtgtgg

SEQ ID NO: 17362 - DNA, 2300 bp, Homo sapien
gcctgcagtgcgcagaggacgcggcgggagcatgttccggctcctgagctggagcctgggccgaggcttcctgcgggccgcggggcggcggtgccggggctgctccgcgcgcctgctcccggggctggcaggaggtccggggcccgaggtgcaggtgccgccatcccgagtcgcgccgcacggccggggcccaggcctgctgccgctgctggcaggtgaggggcgcgggccgggcggggccggccgggcggggacaggggcgcgggccgggcccgatgacctcagagccccttcccgcagcgctcgcctggttctcgaggcccgctgcggcagaggaggaggagcagcagggagccgacggggccgctgccgaggacggggcggacgaggccgaggcagagatcatccagctgctgaagcgagccaaggtgaggcggctccgggccctgcgcccggccgagcgcggtagcctttgtgagcggggtcttggcgttgctgcgcattactctctccgcctcgccgaagagtggatggaggctccgcgggtaaaattgccgagaatgaggtgggtcatccgagaggggattggaatccatccaggcttttccgactctaaggcctgcagtaaaacctctgcagtgtcaagtgcaaatggagatggcgccctaggcatcacgctttatgcaaacgaaatatcgggaacgttttgtagtggttttatcaattaaccagcctatctgaaatgacataatttcgcacgtatatagcggcctgaaaatggcaacttagtgttggttatgcggttcggttctcctcctgaattcttccttttctccacatccttttctatttttttttcctcctcttttcccaagttatctcatctcttccattgagctaaatacctactcgatgccaacaacgtccaaatttgtatttccattctgtagtgtgctactgacatgccatttgcactttaggaccatacctacctctcagatttaacatgcccaaaactaaacgatctttaatgcctcctcaacatacgctttcgccatctctttactaccatcagtttttcagcctaaaaacctcatagtcattcttaaaacttgtggtaccttaccattgccttccaatacacttacagtccagcaacaagtcctgttgccaacaaatgcaaaatatttctcaaatctttccccttttgtctatctcccttgctgtcaccctagtgcaaaccatcattgccaccaactatgctccagtagtctttcctggcctcctggcctcttgcaatctattctccatgcagaaaccaaagcgaccaaaaaaaaaaagagtaaattggattatgtcatctccttgtcagaaagctctgaatggctacccactgcatttatgataaaatacaaactccttgccttggcttgcaacaccccacatgatctaaaccagcatataccttgcccacccatttggcagtaatcctctggctcaccatcctcccttcacatctatttctttgcatttcttcctcaaaaccattctcttcagcttgtagggacttcactcattctctaccctctgtttgagtcattgttctccccaggtccttatttggttgactcattctcatccttactacctcagtttagctgtcacttccttggaaggcttccctaagtcctatttagaggagaccccttatcattcctttctgtcatctttatagctcttatcattagttgtaattaagcttacttgtcctatatggtcacctccagcctgcaagaaattagaaagaggatggaggacaagcagcttccttataaaatatgttgtaagatcacattccttctgcctgtgtctcttggccaaaacttcatcagatggccacacctagctgcaagggaggctgacctccctgtcatctctgtagacaatgctttgtacatagtaggaattcagtaaatgtctgatgaatgagttagcttccttctatcagttgggatgtacagttgcatacacttctgtctcttagcatatgcatctactatatgtttcattttctattattttgtcttcccttttcagttgagcattatgaaagatgagccagaagaggctgagttaattttgcatgacgctcttcgtctcgcctatcagactgataacaagaaggccatcacttacacttatgatttggtaactcttataaccagtctgaaccactgatgaggaaggttggatgggagggaagggtagttagttcttctgatttatattcctgactttca

SEQ ID NO: 17363 - DNA, 2300 bp, Homo sapien
ttccatcagcctgcctagtggggcacacaacatctctggctgccctgtgacaaaactaactaagttttctgttgctgcttgaagtgggaagggaagttagagttagaactttagtttaacttttcctagaagaggaaagagcagtgtgaaagctgctggggataatatattaatactctgaagaagccattttgctggtataaatagagttcaaagatgaagcatctaggttgtaagcagagaactcctctagagagttgtatttgggatgaatttagggagagacctaagactagcttcccttcaggttttagtggtgcagaagttggtgcgagaggtttggagtgacatggagcctgatgctgtagaaagggtgctcactgaggccaggccctggcactgttccctactgtcctactcaccagctcctttgttctcatcaggacctgcatagtctccttgcattttgattggacactagataggctagagcttcctggagcctttgacttcaagtcttttgaggagctttgagcttggcccatgccagggaacactgcagcttggtcaatctttcttggagttgtaacaaacatgcctagttcttgattgggtatgaatccctagggtaagaagaagcccagagcctaataaacattgttgagtaagacaaattcatagtcttctagaggtgaaagctagtaacaattagcctctgagttacatggtactctgtacttttcattttgttttattaagagaagcatgagactagaaaagacatggccagatctgaggcttcgaaaggctgatataggttatgaggggaattgtttgtagacctcttgctccgactgggagcgtcttctgggcagtgtccacttgccctgtgttatggctagagagggccctcttgccaagttttgagcgtagggaaggaaggggatgcttctgttcttctgagaacagagcagaacagtagggtcataagttctcccctggcaaagcactagagaacaggtgagctttttagtgccacttctgtaagaaactagagccaaaactgaagaaaagaaccaaagctgagctcctaaatggagaagggatttctgtcacatttcctctgcatctctgtaaaaagcagcagtcagtcggcctgcttgggttgactcaaccctctccagttgattgagggtccagggctacagagttgggttaaatgacttctattgccatagctaggagtcccatttctgcaaaagaaacttttatcagagacttatagcttgaaagaaatataaaatgactaaagctcctcagaagctgtatgaggtcaacagttggaatcctcactgtagggcggcctgaactgtttagggtagtattactttgaacaggggtaaggctttcacacatggagaagttgattcactggaggccatctgttagtgggagatgatgaatactgctggctatgtcagttattaaaattagggcagcattcctagctttttgtgtcctaagttatattaaatggatgacttaaaaaaactgctttgagaaatggcagatttgacactacttagactttaagcaaagttccctcttcccattttacacttcctttactgataatgtttaaactgagctggaaaaatgaagataaaaagaatttgtgaaaaggtaaatgggccgggcgcagtggctcacgcctgtaatcccaccactttgggaggccgaggtgggtggatcacttaaggtcaggagttccagaccagcctggccaacatggtgaaactctgtctttaccaaaaatacaaaaattagctgggcatagtggcgggcacctgtaatcccagctattcgagaggctaaggcaggagaatcgcttgaaccccggaggtggaggttgctctgagccgaggtcacgccattgcactccagcctgggcaacaagagcgaaactccatctcaacagaaggaagaaaaaaaaaagaagaaaaggtaaatggctgattattgattttgctttacagacaggaatttgctgttgctggctatgaattctgcatttcaactctagaggaaaaaattgaaagagaaaaggaattagcagaagacattatgtcaggtaggaaacccattatctgggcattgccttttctccacaaaaggctttactttacacttttgagaaatggaaagagatctaaattgggaagagggaaagttacctattttgcaaaataagtgtctgtctttaaggtatcagcagaagttttggaataagatgttttatt

SEQ ID NO: 17364 - DNA, 2300 bp, Homo sapien
tgggatgctggcagtatccaaaggaaatattccaaactcaaaaaatctgaaatctgaaacacttttggtcctaaacatttcagataaggaatacttaacctgtaattgtttccttccagagagttatactactgtctcccttccccaccctttataaaattagttcattggctgtaccttcagaacatcaagcaatagtagtaataggaaacttagtcttatatccaatttggtaccaagatatatgaatagatttattactattatatatctagagcggaccaggcttgcttgtaggttaattgcttagtacctgtgtagtgctggataatatttaatgctgatatgtaacttgcgtttcttatgagatccacagtaaatttcttattgtattgtttgtactattatgtttgtattatttgttatcgcaggattgttattaatgtgataaaatgaattgggatgctttctgtattttctattctgaaataagtgtgggatattgcattggaatggtctgttccttgaaagttgcagagtctgtgatgccagatggaccagaactcctgagttaattctccggcagctttttttttccttcttgattactcatgtatttcttccattttcttaatttcaatataggacagtgctaaaaacataaacattaataaatatctattgaataaatgaacgtatgggtgaacaaattttataactattaatttcctagaagaaactttaaggaattatatttttaaagcatattttacactactcttacgtatctgagatcctcttccttttctagatcctaattttatggatttccttttaaattagtaaaaagatgtttcccattgattccttcctcctcctttccttgaaagtttttattttcatatattaaataaaacatttctagaaagttatttttgatgacataatatttggttccatgagtgcttaaagtctggagcctgagttcagattctggttctgccacttactagcagtggacaagttatttaacttctctgttctcagcttccttatcaataaaatgaaaataataatagaacttacctcatagagttacaagaattaaatactccaggactatgaccagtactcattaggcactattatataagagtttgtggaatgtgatatatttactaatcttatttattatatgatttggcacctatattttactattatcaatttatgaaggaccttcctggccattttatttatagtttctccttggtttttgttaattttgtttattcattcaaagagccaacttctggtttcattaattttctttattgtctttctattttccatttcacttatttctactttgtctttattacctctctcctgtttgctttgggtttattttgttcccttttttctggtcccttaggtgggagatgaggttattgatttaaggtttttcttctaacataattgccatttataactataagctttagctgcatctcattaattttggtaagttatattttcatgtatctcaagtattttccaattttgggggggatttcttctttgaccctttggatatttaggagtatattgattaatttccacatacagtgaatttctcaaattttcttctgttgaatccagtttcattccattgtgttcagagaacaactgtgcttgattttatttattgagatttgttgtatggcctcacatatggcttatcctggagaatgttgtatgtgcatttgagaagtatgtgtattctgttgaatggagttttctatgaatgtctgttaggtctagttggtttatagtgttattcaagtcttctgggtccttactaattttgtctagttgttctaatttttttttttttttttttttttgggatggagtcttgctttgtcgcccaggctggagtgcagtggcgtgatctcggctcactgcaacctccacctcccgggttcaagtgattcttgcacttcagcctcccgagtagctgggagtacaggtgtgcaccactgcatctggctaatttttgtatttttagttgagatcgggtttcaccatgttgtccaggctggtctcgaactcctgacctcaggtgatccgcctgcctcagcctcccagagtgctgggattacaggcatgagctactgtgcccagccagtttttggtatttttagtagagacgaggtttcaccatgttggccaagctgttcttgaactcctgacctcaggtgatccacctgcctgagcctcccaaagtgctgggatta

SEQ ID NO: 17365 - DNA, 2300 bp, Homo sapien
ctctcctgtttgctttgggtttattttgttcccttttttctggtcccttaggtgggagatgaggttattgatttaaggtttttcttctaacataattgccatttataactataagctttagctgcatctcattaattttggtaagttatattttcatgtatctcaagtattttccaattttgggggggatttcttctttgaccctttggatatttaggagtatattgattaatttccacatacagtgaatttctcaaattttcttctgttgaatccagtttcattccattgtgttcagagaacaactgtgcttgattttatttattgagatttgttgtatggcctcacatatggcttatcctggagaatgttgtatgtgcatttgagaagtatgtgtattctgttgaatggagttttctatgaatgtctgttaggtctagttggtttatagtgttattcaagtcttctgggtccttactaattttgtctagttgttctaatttttttttttttttttttttttgggatggagtcttgctttgtcgcccaggctggagtgcagtggcgtgatctcggctcactgcaacctccacctcccgggttcaagtgattcttgcacttcagcctcccgagtagctgggagtacaggtgtgcaccactgcatctggctaatttttgtatttttagttgagatcgggtttcaccatgttgtccaggctggtctcgaactcctgacctcaggtgatccgcctgcctcagcctcccagagtgctgggattacaggcatgagctactgtgcccagccagtttttggtatttttagtagagacgaggtttcaccatgttggccaagctgttcttgaactcctgacctcaggtgatccacctgcctgagcctcccaaagtgctgggattacaggcatgagccaccatgcccggccgataaattttttaaaatcttctttctttatacatgtttctgtgctctgtttagacagtctcatagatatatttatttgttacgaattgtcccttcatcaggaaaatgattcctttttccctatttaaggtatttgttacgaattctagttttatattatctactatatcttacccttaacttttctgagtcattttcagtgtatcttttatagaaggctatggttggaatttttttaaaacctgagtatcattgtcttctgatacagaatctgaaaaccttttaaaaattagtgaggcgaaaaaaattagccaggcatggtgacgggtgcctatagtcccagctactcgggaggctgaggcaggagaatggcacgaacccagaagccagagcttgcagtgagccgagatcgcgccactgcactccagcctgggcgacagagtgagactccggctcaaaaaaaaaaaaaaaaaaaaaagtattcaggctgggtgcagtggctcacgcctgtaatcccagcactttgggaggctgaggcaggtggatcgcctgaggtcaggagttcaagaccagcctggccaacatagtgaaaccccgtctctactaaaaatacaaaaaatgagctaggtgtggtggcgggtgcctgtaacctcagctactcgggaggctgaagcaggagaatcgcatgaacctgggaggcggaggttgcagtgagccgagatcacgccattgcactccagcctggttaagaagagcgaaactccatctcaaacaacaaaacaaaacaaattagtattgaaagggataattggtctaattattgcattttaaaaagtgctttccatttttgttaattcctttgttttcagttcctcttacaggaacttttccctctctgatctgtatttgtattttgtagggaaggtatatgtatatatgattttcagttgtataaggagtaacctaaacatttcttaaagacagttgactcagaggaaaaaaaatttttttcagtttcttctctaaaatgagatgagtacattttaacattatccttctttcccttttcctcacttgttttttctctgtgatctggaattttagacttagtggaatttattgcagaggagaattctaaagcctgcatatttgccttgttttttaaatagtctattttctcctgctcagatgctttgctggactcagaagttaaatgagcataaggttagggagttgtctgtttatgaagcttgcttagtccctggtgaaccttcatttttagcatccagttctctggagcttctgtagtctattctggctcaatgcttctgtcccacatgctctggcctcttaccctgga

SEQ ID NO: 17366 - DNA, 2300 bp, Homo sapien
aggccttgttagtatgaaacctggtgaatgggagagaataggccaagtggctatttgtgagggaaaaaaattacagacaaagggcaattacaggtacaagactctgaggtggtgtatgctgcttgacttactggaagtaaggagttagaattactggagttgtctgattttctaaaattttgggggatgaggcctgcttttttactgtctgctgattctcatttatgatgaattgtcatgtttactaatcttggattatacattcatcttcagcaaggttttagctataagtgagattccagaatagttttgtgtcttccaggcactcagctcctggccgaagtggatgctacaaatttagacatcaaatttacagggtagtcatttttctcctctttagattccagacttggccattcaaggctccttgttgtctccctgtgcctgtggtcggggggttaaggggagtgtaggctggagtggtgcaatttttttcacatacatgcttttcctggggttgtggtcctaatggtaatcatcctggtttatgcattggcttcagatctcattttgtttagtacacatcaacagctttaattcctggattacagagacaactcaagctacaacaaaaaccgggcttctgctgtgtcaactcacagactctccactttgggttttagcttactcctaatttgtggctcttgggagctcagctgtgcagggaaaggatgtgtgttatagtttatctaaggtttccaggtgtttgaagcagatgggtttcatctatagtgttacgttagattctgctttattccctccactaaaaccattaacactcatcagaaagtgctaatcagttgattaacaagagatttagtttagcagaaatttcaggatattcttggaatttgggcaacaaatatctctagtttcaaagacccttgtagactttcctatattgctattgatggtgagggggtaggggagtgttagaggcctatgctcaagttttcctaaattagagatgctcttttgctattgttacaaatgcatataattgctccagtactttatcaaattccctttagtctatatttatgtaaacctagtttgatatactgaaccattcttttattcctggaataaatgctgtttggtcatcttaatacatctgattattccatttggtaatattttgagtaaaaaattctatagtgaatcctgtttgcttcatggactgagtatagtagcgtatctttttctgtgactagaagttatttatgaaagagaatcatttatgtttgaagaagtaaatatgcctcagtttcaaatggtcctttaagggctctgtataaacgattccaatatatttctcagttgttattaaagtacttgatttttttcttgtctaacttttagcaatttttatattaatatttcaaagaaccatgtttaagtaaattactagcaaaggaactctttgggggaactttatgaaattttctcttggcagttgctaaaagttttcttacgttttctaaaagttcagtaatagtacatttatctttagaaaagtttgcttttcagaaagtgtttccatttttcttgtggtcagaatgtgctgtgaattttaaatgtatttttaagatattatagctaaattgtacctcactgttttctctaaaaagttttactgcttttgcttccactccactattcagtgataacaagggtaacaagtttccactagaattgcttgtcactttattcttgtacttttgttttactactgaacatctttttaaatcgttgccacaaaatatctcgcttttatcattttcacattgctctagtatatcaactttggaaacaagacatcattctatttatagcattctgtttttagtagtggtatttccatttacaaaatacagtaattcttgatcgctgaagacgtcaaatcctagaaaacatagcatgcctacgcgtgatgttaacatcattctcgaatagttgttggttgaagattcatttgatgaatccgatttttcagaaatagacgagtctgatgatacagacgattctggtgttagttctctgtagaaataactccaagaacacttttaatagtttattttcacattgaaaatcagatttgctccagcctcaaagagtatatttatgtaaaattaggtaagcgatatagaagcaagctgcactttttttctaaatgggaaggtattaaaaaagaaaagtctcattttagtaacatagtcttccttaaactctatgccact

SEQ ID NO: 17367 - DNA, 2300 bp, Homo sapien
ttgatccaatgaaaatattatttcttatgcagtcttctgtaagtgtctaattaagaagacactccctcttctccaaaacatccatagtattttttaacctaatagagcatcgcattttaattcattttaacctttacgataattttttttaatgccttttttttgagacagtgtctcgctttttcacccaggctagagtgcagtggtgccatctcacctcaccacaacctcaaactctcgagctcaaggaatccttccacctcagcctcccaaccacaggcgcatggcaccatgcggagctaatttttttttgtttttttttggagagacagggtttcgctatgttgcccaagctggtcttggaactcctgcggtcaagtgatccacccacctcggcctcccaaaagtgttgggattacaggcgtgagccaccacgcccagcctctttgccttattatgcagaccggtccatacgttttttgaaatcagaggctataatatataaatactctccacaatattaagaacattatcttaaactaatcactcaataaatgtccatttgaatgagtcagtgaatgaacaaatgtttaatgatctttttgtggtaagtacacaattaaaaacttttaccacttattatttgagatagaaaacacatttttgaataaagcaagagctttaaatatttgaataaatagaaaataactaaagaaaagaacaaggtcattttctggtgcctaaagaaaaattgagagtgttggaggtgttcaaacaagagtgactccggctcccctcccctctcccctctcccctctctcctcccctttccatggtctccctctcatgccgagccaaagctggactgtgccgctgccatctcggctcactgcaacctccctgcctgattctcctgcctcagcctgccgagtgcctgcgattgcaggcgcgcgccgccacgcctgactggttttcgtatttttttggtggagacggggtttcgctgtgttggctgggctggtctccagctcctaaccgcgagtgatccaccagcctcggcattctgaggtgccgggattgcagatggagtctcgttaactcagtgctcaatggtgcccaggctggagtgcagtggcgtgatctcggctcgctacaacctccacctcccagccgcctgccttggccccccaaagtgcagagattgcagcctctgcccggccgccaccccgtctgggaagtgaggagcgtctctgcctggccgcccaccgtctgggatgtgaggagcccctctgcctggctgcccagtctggaaagtgaggagcgtctctgcccggccgccatcccacctgggaagtgagcagcgcctcttcccggccgccatcccatctaggaagtgaggaacgtctctgcccggccgcccatcgtctgagatgtggggagcgcctctaccccgccgccccgtctgggatgtgaggagcacctcggcccggccgcgaccccgtctgggaggtgaggagcgtctctgcccggccgccccgtctgagaagtgaggagaccctctgcccggctgccaccccgtctgggaagtgaggagcgtctccgcccggcagccaccccgcccgggagggaggtggggggtcagcccccgccaggccagccgccccatccgggagggaggtggggggtcagccccccgcccggccagccgccccgtccgggagggaggtaggggggtcagccccctgcccggccagccgccccatccgggagggaggttggggggtcagccccccgcccggccagccgccccgtacaggaggtgagggtcgcctctgcccggccgcccctactgggaagtgaggagcccctctgcccggccagccgccccgtccgggagggaggtgggggggggggtcagccgccccgtccgggagggaggtgggggagtcagccccccgcccggccagccgccccgtctgggaggtgaggggcgcctctgcccggctgcccctactgggaagtgaggagcccctctgcccggccaccaccccgtctgggaggaggtacccaacagctcattgagaacgggccatgatgacgatggcggttttgtggaatagaaaagggggcaaggtggggaaaagattgagaaatcggatggttgctgtgtctgtgtagaaagtagtagacatgggagacttttcattttgttctgtactaagaaaaattcttctgccttgggatcctgttgatctatgaccttacccccaaccctgtgctctctgaaacatgtgctgtgt

SEQ ID NO: 17368 - DNA, 2300 bp, Homo sapien
ttcctccaaactccataagcctccgctagcccagcccgagctccccgccgcgcccggctctctcctgggctgccgagtggaagaggccaggcggccaggacgggtcccgacctgcccaggcctgcgacaccccccgcccggcggagaaaccgtcccagcggctgctgccccgggagccctcggaagcccccggactagcaggagcccggaggccggggttgcaggcgccagggcctactcaccgggagctggctaagcgtgggagccgacgtgcgccccggcctgaggagtgggacgcggccacggcgcgcggccctacaccgggacctcgttcggcgcggcgagtcggacgctcactccagccgccgccgccgccgcggctgctgcttcgccaccttggccgccatcttgactcaacccctctccctccccccagcccgcggagccgcggctaaggcggctccagcgccggctcctcctccttccggagagttgggagaccaactccctccgctggccgggcgcctctcctacctcggcggagcttcccgggtcgcgctgcgcccggtctcttcatgtctcctctaggcctggcagcggcggtcctctcggacggatacggggccgagcagcgcccagccggatccagcgctgctgccatcgtgccctgggcttgtgcgccccccgcctgcccgtctgttccgcgcgcccgaggccttcctcaggcgtgggaaaaggaaaaactccaggccgtggaagggaccctgcaaacccctccgcggcgtggtggggcggcggcggcctcctctggccggagctgcgtacagggaagccggtcccctcgtggctgggagctggaggggtgcatttcgacctgcccaagatactttctagggctctggctggaattcgcaccaagccctcactgaaatgctgggcgaggccgatttgtccacgatgttgctccttaaccttaagttacttgcaagaggagcctgtggccctcgcgactgttaagtgcacgctcagcctcaccctgctggggaaacgacggttcctcgtaaccgcacgcatacgttcctttagaaaagccaggcccgaccggacgcagtgggtcacgcttgtaatcccagcacttagggaggccgaggcgggccatcacttaaggtcaggagttcgagaccagcctgacgaacatggagaaaccccgtcactactaaaaatacaaaaattaagcgggcgtggtggcgcgcgccagtaatcccagctactggggagaccgaagtgggagaattgcttgaacgcgggaggctgaggtagcagcgaacctaggtcgcgccactgcactccagcctgggcgacggagccagaccgtttcaaaaaaaaaaaagaaagggccgggcgcggtggctcaggcctgtaatcccagcactttgggaggccgaggcgagcggatcacgaagtcaggagttcgagaccagcctagttaacatggtgaaaccccctctctactaaaaatacaaaaattagctgggcgtggtggcgcgcgcctatagtcccagctactcgggaggctgaggcagaagagtcgcttgaacccgggagacagaggttgcagtgagccgagatcgctccactgcactccagcctgggcgacagagcctctcaaaaaaaaaaaaaaaggtaaagaaagccatccaaaagtgagaaggaataacaaagttggtgtaactggctattttggaaaactgtcatacggataacgggctgtctaaccctataattacgagaaaggcccgagttttaagaaatgaattcgaaaatgaagaggaaggaactcttcctataagtgggagcttatatataagacgcttccttttaaaccgattgtacagtgtggtaggactagggtaggaaactggacggcatggagacttctgtgttaaaacacaagagaacccttaacgttaaaacctcaagcttccggagcatgtcggcgggagggacttaacagcggaacccaacattccccggtgaagttttccagccggagtcagggtcagaggcagcctttcctactgcgcaggctcagtgctgcttacccatcatggaagcaatgtggctcctgtgtgtggcgttggcggtcttggcatggggcttcctctgggtttgggactcctcagaacgaatgaagagtcgggagcagggaggacggctgggagccgaaagccggaccctgctggtcatagcgcaccctgacgatgaagccatgttttttgctcccacagtgctaggcttgg

SEQ ID NO: 17369 - DNA, 2300 bp, Homo sapien
ccaccaggtaagccggccgctcctgtccctaggctgtgaggggttcagaggtaagaccttcggtgtattcacttagctccctacggaaaacttcgagaagaaggcgactgagatcggttagcacttaaatccctttcaaagccccggctcccatcgcccctcctatggcctcctacctgcagagaagcaaagcaggtacacccagtgccttaggcgggccaagcctagcactgtgggagcaaaaaacatggcttcatcgtcagggtgcgctatgaccagcagggtccggctttcggctcccagccgtcctccctgctcccgactcttcattcgttctgaggagtcccaaacccagaggaagccccatgccaagaccgccaacgccacacacaggagccacattgcttccatgatgggtaagcagcactgagcctgcgcagtaggaaaggctgcctctgaccctgactccggctggaaaacttcaccggggaatgttgggttccgctgttaagtccctcccgccgacatgctccggaagcttgaggttttaacgttaagggttctcttgtgttttaacacagaagtctccatgccgtccagtttcctaccctagtcctaccacactgtacaatcggtttaaaaggaagcgtcttatatataagctcccacttataggaagagttccttcctcttcattttcgaattcatttcttaaaactcgggcctttctcgtaattatagggttagacagcccgttatccgtatgacagttttccaaaatagccagttacaccaactttgttattccttctcacttttggatggctttctttacctttttttttttttttgagaggctctgtcgcccaggctggagtgcagtggagcgatctcggctcactgcaacctctgtctcccgggttcaagcgactcttctgcctcagcctcccgagtagctgggactataggcgcgcgccaccacgcccagctaatttttgtatttttagtagagagggggtttcaccatgttaactaggctggtctcgaactcctgacttcgtgatccgctcgcctcggcctcccaaagtgctgggattacaggcctgagccaccgcgcccggccctttcttttttttttttgaaacggtctggctccgtcgcccaggctggagtgcagtggcgcgacctaggttcgctgctacctcagcctcccgcgttcaagcaattctcccacttcggtctccccagtagctgggattactggcgcgcgccaccacgcccgcttaatttttgtatttttagtagtgacggggtttctccatgttcgtcaggctggtctcgaactcctgaccttaagtgatggcccgcctcggcctccctaagtgctgggattacaagcgtgacccactgcgtccggtcgggcctggcttttctaaaggaacgtatgcgtgcggttacgaggaaccgtcgtttccccagcagggtgaggctgagcgtgcacttaacagtcgcgagggccacaggctcctcttgcaagtaacttaaggttaaggagcaacatcgtggacaaatcggcctcgcccagcatttcagtgagggcttggtgcgaattccagccagagccctagaaagtatcttgggcaggtcgaaatgcacccctccagctcccagccacgaggggaccggcttccctgtacgcagctccggccagaggaggccgccgccgccccaccacgccgcggaggggtttgcagggtcccttccacggcctggagtttttccttttcccacgcctgaggaaggcctcgggcgcgcggaacagacgggcaggcggggggcgcacaagcccagggcacgatggcagcagcgctggatccggctgggcgctgctcggccccgtatccgtccgagaggaccgccgctgccaggcctagaggagacatgaagagaccgggcgcagcgcgacccgggaagctccgccgaggtaggagaggcgcccggccagcggagggagttggtctcccaactctccggaaggaggaggagccggcgctggagccgccttagccgcggctccgcgggctggggggagggagaggggttgagtcaagatggcggccaaggtggcgaagcagcagccgcggcggcggcggcggctggagtgagcgtccgactcgccgcgccgaacgaggtcccggtgtagggccgcgcgccgtggccgcgtcccactcctcaggccggggcgcacgtcggctcccacgcttagccagctcccggtgagtaggccctggcgcctgcaa

SEQ ID NO: 17370 - DNA, 2300 bp, Homo sapien
cagggaaatctgcctagaaagagtatgtgggtaaaattctagcatcttccaccaagtgatgtaaaatttaaggacaaggagggtcttcagtttggattggtcttcacatacatctgacagaataatgaatggagaactaggattcctgaattctgcctctgccatagtttaaccttgtggtgctgggcaaaccacttcccagtgattggacttaatggttggtgaggtcatttccaactttacatattgcattgcttcagtctgagtgttaagcatgtttagaagaaggttattaaataagtccttcccttcaagttgcttctttccttcctcagtagctgggacaggcctgccacaccactgatcaggggcccaggagaagcactttgctaggggacaggaaacacatctatgtttgtatgactctatgtcactcaatacctttgagcttgcattttctttttattggtaaaatgcaaataaatatcagtaaaatcgggtgactgtgaagaacaaacacatttcatattatgtatgtatatcctccttctccaagaaagatttgagagttgtataaaacacatgacggaagtgagagtaaggggaagaagatggtgaaggtggaggcacactgattgacagcactcattccttaaagtcttgtccagtgccacagggcttgcaaatttggccctcaagcttcctgtggccacagaaaagagatgaataaagtcaattaccccattcgcagtattcagtgtataaaaaagaattcagctgtttaggagacgagcattcgtactaggacttgagagagatttctcagcgagaggacatggtgagatgcagtgagcaacatggccaaaaagggctagaagataagccagcagtgagtttcatgggctcagataacaagtgggaaagtgctttagactttaaaccatgagccctaatcaaataaacaaaccctcccccacatccatcacccggagaatcatacctcacagctgcatacagagcaatgtgattgctgtggccacttactccccctgcatcgaaagtcaccacctgtagagaaacacagggttttcactgaatgccttctccaccacctcaacttcaatggagctgtctccttcccttgggaaggagagaacagaaccctgaaacttttcaaatgcagcatctatctgaagtgacttctgagcagatcagtggtgtgtagctagtgctgtggttgaccacatagagactgttttccagggtttgatgttttactcttgttcctagccagtggagcagagtggaattcagccatgatagtaacttgggttcagaatatctttgttgcttattggtttagccatttattagcacatttagaattcctggctagcttctaagtgaactctgtttatgcagatacagcctgaattactggttctctttttctcatgccatactgagggcaaaaaaagctttgaaggacaatgtccaccgtgtcctggggttgagttcatggaaaaagtgtatttattcatagattgcctctgtttccattttcacagctatatcaatatctgtttattaactacaagctcagtctgtattccaacatttcatttctacacaaatgaattaaagaaaaaacaaatagctccctctccctctccctctcccccccccttccccctcccctctttccaaggtctccttctgatgctgagccgaagctggactgtactgctgccatctcggcttactgcaacctccctgcctgattctcctacctcagcctgccgagtgcctgcgattgcaggcgcgcgccgccacgcctgactggttttcgtatttttttggtggagacggggtttcgctgtgttggccgggctggtctccagctcctaaccgcaagtgatctgccagccttggcctcccaaggtgccgggattgcagacggagtctcgttcactcagtgctcaatgttgcccaggctggagtgcagtggcgtgatctcggctagctacaacctccacctcccagccgcctgccttggcctcccaaagtgccgagattgcagcctctgcccggccgccaccccgtctgggaagtgaggagcgtctctgcctggccacccatcgtctgggatgtgaggagcccctctgcccggccgcccagtctgggaagtgaggagcgcctcttcccggccgccatcccgtctaggaagtgaggagcgcctccacccggctgcccatcgtctgagatgtggggagcgcctctgccctgccgccccatctggg

SEQ ID NO: 17371 - DNA, 2300 bp, Homo sapien
gcagatttccctgtttccttgactatggaatgaggggaggctagactgttctccctgtaaagactattcggttcctggtccagccagcagccacagctttagaagagacatgctcctagtcgcattaggtcccttcaaattcaggaaagaaacattccctggttacagtctgaaatacaaatttttttgatgatatatggaaaaatgaggcagccccagagtggtctttccaaccacatggttactctgaggccttgagcttccaagactagcatggacagcaagccccatggagaactggaaaaatggtcccacctcattctggatgcacactgagcctggtgatttctctccgagaatttacactgcaccagagaaaggatcaggtcaggtctattgcaaacaaagagtacctcaacaggcagggggctggggcacttgagattgagtcacctggtcccattcctggtccagtcaccactgaagtggagaaaatagagaaggcgtcattctgggcagagaaagaacccaaggggacaactctgtgtagatagaactgcctggggccattttcctcagaagaggctggagtgccacaggctctcagcacgaaggagggccactgtgcttcagataaaacaattcatggacatgccaccaatctgccacaacctttttccccacagtcatctcttgcctgctaaattcgttagactcacgttagtcctcagccaccttgaaccttctgtggcatctggccctgcctgtccctcactgcaatgctgctttgacttatatggcaccagcttgccctcctcactctggcctttctggctacttctcattctcttcccggcttccctcccaccagtggccccttggtccccctgtccccagggctcactccccagtcctcctcagcacagcttctcctgtggctttaagggctataagctctacttccagacagcgcctctagctcactgctttccctggacatcagaatatccacagggctttgcccagagtacaggacaagccacttcattctcaggatcccagaaagttttttcagtcttttcttttctttctttctttctttctttctttttttttttttttttttttttttgagacagagtctcgctctgtcacccaggctggtgtgcagtggcgtgatctcagctcactgcagcctccgcctcctgcctcagcctcctgagtagctgggaactactggtgcatgccaccacgcccggttaatttttgtatttttattagagacggagtttcaccatattggccaggctggtgccgaactcctgacctcgtgatccgcttgcctcggcctcccaaagtgctgggtttacaggcgtgagccaccgcgcccggctcctttttcaggtttttctacctctcaggctctgccaggcagtcagttccatgaatttgtcaattgtctctcaacttctcttgtttaacccctgctcccaagagtctctgttcatatgtgtgtctgtgtgttgctggggctaccttcccaatccttctctgcccccagctttctaaacaacaaagtggggaagagacttggagctcattgcagttgacactcccctcctcttaaggtggcgagcacagaatgacctgcactgtcagaaggtaggcgtagggaagctcagaaaggagaaaggaaatatcagggaagagctatcagttagcattgtaaaatattcccccatcatactcacattacacttccaagagaaaaactatgaagagtccagcacagttaccttcattctctaatgggcaaagcttggaccagagtacttcacaaaccacagaccagcctctggattggctgtccctagctcaggtgcccatcctggtcccttcagctgttgccagaggtatgggatcctggaaatctatacagtgatttatgcaaaagaaaccacctggagactcacatggaggggaccatgggcatggcagcctttcctctgaaggcccctcctgttacctacaaaggaaatgatccttactcctctcactcttgtcctatccctcctccagggccctgcactcagaagggaagttacctaaaggtaaggcttgttccttttgcaaagggccacaagatactgtccctctgagaaacttatgagggggaaatttgcaaatccacagagagctgccctcagccgagcagaggcagtggttggggaggccgccacactcttcctgactcacctcaaggtacctggcaggttgtatctaccagcaagtgcctgcct

SEQ ID NO: 17372 - DNA, 2300 bp, Homo sapien
gattctcctgtctcagcctcccgagtagctgggattacaggtgcctgccagcatgcccagctagtttttgtatttctagtagagacagggtttccccatgttggccaggctggtttcaaactcctgcccacctccgcctcccaaagtgctgggattacaggcatgagccactgtgcctggccatatccagcatcttagaagagtcctttgttctctttcccagttagttctcctcaaggataaccactccccacacccagctttttttttttttttttttttttgagacaaggtctcactctgtcacccagagtagaatatggtggtgtaatcacagctcaccgcagcttccacctcctggtctcaaactcctgggctcaagcgatctgagcacctcggcctcccaatagtgttgggattaggcatgagccactgcgcccggcctacgtgccgttttaaaatgatgttcaagaataagcaaaaccaacctatggtggtaaaagaacagtgatcgcctctgttttcttttgcctgagggaaactctggtgtgctgaaaatgttctgtatctgaagtggtggtggtcacataagctgtacatctaagatatttgcacgttgctgtgtgtaaaccataattccaacaacaacaacgacaaaatggcaaggtggggctcggtggctcacgcctgtaatcccaacacttggggagaactaggcgggaggatcgcttgaggccaggagttagagaccagcctgggcaacatagggaaacccggtatctacaaaacaacaatagcaacaattcgctggggcgggggggggggggggggggcgccgcctgttgttccagctactcagctactccagaggcccaggcggcaggatcgcttgaggccaggagttcttggctacactgagccgagatcccgctactgcactccagtctgtcagatcctgtatggaaaaaaaaaaaaaaagacaaaatagttaaactatgcctttaattcaataaactattaaactaacaataccatgaagaaaatcagaataaagaagaaagataggctgacgcaggagaatcgctggaacggtgaggcggaggttgcgtgaaccgagatcgcgccactgcactccagcctggcgacagagtgagactccaaaaaagaaaaaaaaaaaaaaaaaaaaaagaaagataggctgggcccggtggctcaggcctgtaatcccagcgctttgggaggccgaggcggatggatcacctgaggtcgggagtattcggcaccagcctgaccaacatggtgaaaccccgtctctactaaaaatacaaaattagccgggtgtggtggcgaatgcctgtaatcccagctactcaggaggctgaggcaggagaatcgcttgaacctgggaggcggaggttgcggtgaggcgagatcgcgtcactgcactccagcctgggcaacaagagcgaaactcggtctgaaaaaagaagaagaaggagaaggagaagaagactatctgggttccatcaacgattctcgtgccttttgtctttaaactttggtgctgccttcatcaaaatcatactaatgaaattcgacgcgcgggtcattcatttaattaaaatgaaaccccaaatctgttgactattggtatcctcatgacactgttctataatgtgacagaaaagacgaaggtgaagaactatggtttcggccgctgttacacaggaggtagcaggtggcaggccgtttacacaaattagctcgtttttggagacgaagttaccccaggctgcccgctcggatgagcctgcgaattcaggcccaacccaggcccctccaggtcgggaaggtacgaagagcccgctggattcacacagggcaggggcgccttcgcaggtgcgagtggattctgggtatcgcgagcgtaggcccaggcgcagcccctctgcctgcgggactgaacaggcaggtgcgtcccagcggccgggcgggccgggtctccctcctgcgggcaggcgccgcgctgcggggcgcggctggcggagcggggcagccgggcgcagcgccccctgggcctgaagactggcgggcggcgggggcgcgcgcaggccggcgggggcgcgccgcgctgcgaggcctgcgcgccaggctgcgggagccatgcggcgatcgaggagctctgcggccgccaagctgcgcgggcagaagcggtccggggcctccgcggcccccgcggcctccgcggccgctgccttggcacccagcgccacccgcacacggcgctccgctagccaggc

SEQ ID NO: 17373 - DNA, 2300 bp, Homo sapien
cgtttttgaagtggggtttcggctccctaatctgcacttttttttttcctaccagtttggagaaacagctgggaagaactggatttgcaggtattgctggagccagagcgaagcccggccactgtcaccatgggctccagcctcgcctctctgggcctggtggtgagcggcttcagcaacaggtttccggtccccgcagagggtcccactctgaactcccgatttacagactgttctcgggccgtgatgaggattaagacaatgcaactaagagcactctgactacagaagcatgatttaaagctccacaaccctgcaataaccacgaagaaaaataaaaagcggctagtccgccaggcacggtggttcatgcctgtaatcctagcactttgggagcccgaggcaggcggatctcctgagcccaagagttcagtaacagcctgggtaacatagcaagactctgatctaacaacaaaaaaaaattagaccaggaacagtggctcacatctgtaatcccagcactttgggaggccgaggcaggcagatcacctgaggtcaggagttcgagaccagcctgaccaacgtggtgaaaccccatctgtactaaaaaatacaaaaattagccaggcatggtgacacgcacctgtaatcccagctactcaggaagctgaggcaggagaatcgcttgaaccagggaggtggaggttgcagtgagccacatcacgccactggccttcagcctgggtgacagagtgagactccgtctcaaaaaataaatacaaaattaaaaagccaggcgtggtccacggtcccagccacttgggaggctgaggtggcaggataacttgagccctggaggtcaaggctgcagtgaacggtgatcacaccactgcacaccagcctggggacacagccagactttgtcacaaaaaagcaaaaacaactggccagtgtatgaggggctcgtgttttttgtttgtctgtttgttgagacagagtctcactctgtcgccagactggaatgcagtggcacattctcggcccactgcaatctctgcctcctaggttcaagcaattatctgcctcagcctcccaagtagctgggattacaggcgcccgccaccacgcccggctaatttttttgtatttttagtagagacggggtttcaccaccttggccaggctggtcttgaacccctgacctcatgatccacccgcctcggcctcccaaagtgctgggattacaggcgtgagcctccgcgcccggccaggggcgcgcgtttttaaaacatgggagagggaattgtgcttcacaatcaccatcaggtgtctcgatatcgggtgccacgccgtcccgcttctgaggcgcggcggcccactttggcaggccgaggcgggtggattacctgaggtcaggagttcgagaccagcctgacaaacatggtgaaacccccgtctctactaaaaatacaaaaaattagccggacgtggtggcgcatgcctgtaatcccagctacttgggaggctgaggcaggagaatcgcttgaacccgggaggcggaggttgcgatgagccgagatcgcgccattgcactccagcctgggaaacaagagcgaaactccgtctcaagaaaaaaaaggaaagaccccccctccttctcccgccggaaataccctctttcaggacggcgcgcctgtgcggcgcacgcgcgctcagttacttagcaacctcggcgctaagccaccccaggtggagcccagcaacaacagagccaccgcgtcccccaccaatcagcgccgacctcgccttcgcaggcctaaccaatcagtgccggcgctgcaaggaagtttccagagctttcgaggaaggtttcttcaactcaaattcatccgcctgataattttcttatattttcctaaagaaggaagagaagcgcatagaggagaagggaaataattttttaggagcctttcttacggctatgaggaatttggggctcagttgaaaagcctaaactgcctctcgggaggttgggcgcggcgaactactttcagcggcgcacggagacggcgtctacgtgaggggtgataagtgacgcaacactcgttgcataaatttgcgctccgccagcccggagcatttaggggcggttggctttgttgggtgagcttgtttgtgtccctgtgggtggacgtggttggtgattggcaggatcctggtatccgctaacaggtactggcccgcagccgtaacgaccttgggggggtgtgagaggggggaatgggtgaggtcaaggtgga

SEQ ID NO: 17374 - DNA, 2300 bp, Homo sapien
cggaatattaacgtatttaaggcattttgaaggaatagttgctaattttgaagaatattaggtgtaaaagcaagaaatacaatgatcctgaggtgacacgcttatgttttacttttaaactaggtcaaaatgcagatcttcgtgaaaacccttaccggcaagaccatcacccttgaggtggagcccagtgacaccatcgaaaatgtgaaggccaagatccaggataaggaaggcattccccccgaccagcagaggctcatctttgcaggcaagcagctggaagatggccgtactctttctgactacaacatccagaaggagtcgaccctgcacctggtcctgcgtctgagaggtggtatgcagatcttcgtgaagaccctgaccggcaagaccatcaccctggaagtggagcccagtgacaccatcgaaaatgtgaaggccaagatccaggataaagaaggcatccctcccgaccagcagaggctcatctttgcaggcaagcagctggaagatggccgcactctttctgactacaacatccagaaggagtcgaccctgcacctggtcctgcgtctgagaggtggtatgcagatcttcgtgaagaccctgaccggcaagaccatcactctggaggtggagcccagtgacaccatcgaaaatgtgaaggccaagatccaagataaagaaggcatcccccccgaccagcagaggctcatctttgcaggcaagcagctggaagatggccgcactctttctgactacaacatccagaaagagtcgaccctgcacctggtcctgcgcctgaggggtggctgttaattcttcagtcatggcattcgcagtgcccagtgatggcattactctgcactatagccatttgccccaacttaagtttagaaattacaagtttcagtaatagctgaacctgttcaaaatgttaataaaggtttcgttgcatggtagcatacttggtgttttgtcatgaaattctctagtgatgtgtgggtacgcttaaaactggtgaaaatgtttagggatttaattttgagattggtaatgtgctcaaagttaagtcacttgactttggtatacacttgggtgggctgaggggcaagagccttctttgctgtttaagtcattacaagttaggatcctgggtaaatggcaaactttctgaagctcgaatttaaagtctgttgggaggccgaggcaggcggatcacgaggtcaagatatggagaccaccctggccaacatggtgaaaccttgtctctactaaaagaaaaaaattagctgggcgtcgtgtcgcctgcctgtagtcccagctattcgggaggctgaggcaggagaatcacttgaacctgggaggcagaggttgcagtgagccgagatcgtgccactgcaccccagcctggcgacagagcaagacaacatctcaaaaagttggatatgcaggctttttaaaagatggtcttgctctgtagtccagactggtatacagtggcacgatgacagctcactatcattcctgggctcaagtgattgcaggcattttctttacattgaaggaaagcaaatgtgcctgttgagacctaatcaaggattgctggagaaacaaagttttgattgaggctgcttgaatagtggtaacgtaactgctttcagttctgcaattaattgggtgactatgagctgtgtgtttattgctctgtagtgtattacaccaaagtgtttaacctgggtggtagtatgggaccataatcttgtctctttgctgtatatgctttaactgatgagccaagcagcagctaatcaccgagtatggaagacgactggctgaggagaaagatggcttgcaggtacttaatgttgaaaacggtattctgatctaagacaatcttcctgatcttgataagttaggtggcaagttaaagtggttcctcactttttttttggacagtctctcttgccccaggctggagtgcagtggtgcgatctcggctcactgcaacctccacctcccaggttcaagcagttctcctgcctcagtcccccacatagctgggactacaggggcacaccagctaatttttgtattttcagtagagttggggttttaccatgttgaccaagctggtctcaaactcctggcctcaagtgatccgcccaccttgacctctcaaagtgctgggattacaggcatgagccatcacgcccggccacgctgttggttcttaatgacacagcttaactttattgtgaaaagattgcagcaacaaatgagattttacctgtatttgt

SEQ ID NO: 17375 - DNA, 2300 bp, Homo sapien
gaggctgaggtgggcggagctcctgaggtcgggagtttgagaccagcctgaccaacatagagaaaccccgtctctactaaaaatacaaaattagccagacatggtggtgcatgcctgtaatcacagctactcaggaggctgaggcaggagaatcacttgaacctaggaggcggaggttgcggcgagctgagatcgtgccattacactccagcctgggcaacaagaatgaaactccgtctcagaaaaaaaaaaaaaaaagaaagaaaaaaagaaaaatttgtcatctgtgtgctatccgatatggtagccactagccacatgtgccaactgagcatttaaaatgtggctaatgggacagcagaactgaatgtttactgttattttattatgtatttatttttgagacagagtttccctcttgttgtccaggctggagtgcaatggcacaatcttggctcactgcaagctctgcctcccaggtttaagcgattctcctgcctcagcctcccaagtagctgggattacaggcacgtgccactacgcctggctatttttttttatttttaggagaaatggggttttgccatattggccaggctggtctcgaattcctcacctcaagtgatccacctaccttggcttcccaaagtgctgggattacaggtatgagccaccgcgcctggactaattttgtatttttagtagagatggggtttcactatgttggtcaggcaggtctggaactcctgacctcaggtgatccacccacctcagcttcccaaagtgctgggattacaagcgtgaggcctattataattgatttaaatctaaacagtcattgtggctagtgactatcttattggatggcgcaggcctagagtgtaatgtgcatgacagggttgccatgagtgacggatagcgatggagaagggcatctggactttgagggctcatggtatggagtttgcattttattccaagcaccatgggtgaggttttgtgattaagtcaaggcgttaggtgacctggttttctttttttttcttttttgacacagagtctcgctctgttgtccaggctggtgtgcagtggcacaatctcagctcactgcaacttccgcctcccaggttcaagcgattctcctgcgtcagcctcccaagtagctgagattacaggtgcccaccaccatatccagctaatatttgtatttttagtagagatggggttttgccatgttagccaggctggtcttgaactcctgacctcaagtgatccatgcacctcggcctcccaaagtgctgggattacaggtgtgagccactgcgcccggccctggttcccatttttaaaaggtcacttcagttgctataaggagaaatggattatgagtgtggggcaagaatgaagcagggagaccagtttggaggtggctgcagttgcccaggggagcagtgatagtggcttggaccactcagaaagacaaattttggaggaagagctgatgccaggttttgggagtgagggagagagattcctagggctacttcggtggtggttgggtccccaagctccaagactgagtccagaccagggccccgttggtggtgaggtctgattttagcagtgcgtgcccacctccttgtctccacctgctggctggtgcttggagcacctttaggggaactttagccatcagagtcctggggtcaggaggctgggagaaggtcctgggaggtgggaaagtcccccaactgctgggtggatgggtgggtgggactgtgttcccaggggcatctgctgggctgagcctctccctgggggctgtccacatcagctttctcccctgccatgggtcaactcaggcccatttatgggccacacggctgcttggaaggcatgtggtggagaaggggaggagatagctgtcagtggacttggggaagaatcccccatccatggcagcttccatgggtggcaagtccccagcatccaagggctgcctctgagtgtcacccacccccacctgagaccttagtggctagaagggggaggggtgggggtggagcctgattcgcagcagggtgtgtccagatggtcagtctctggtggctagcctgtcctgacaggggagagttaagctcccgttctccaccgtgccggctggccaggtgggctgagggtgaccgagagaccagaacctgcttgctggagcttagtgctcagagctggggagggaggttccgccgctcctctgctgtcagcgccggcagcccctcccggcttcacttcctcccgcagcc

SEQ ID NO: 17376 - DNA, 2300 bp, Homo sapien
tgatggcccagatgcagcaggaggccagaggacagagcagaggatctttccaaccacatctgctggctctggggtcccagtgaattctggtggcaaatatatattttcactaactaactcttctggaaacattatttgggcagagttgctgggacccttagagctggcaatgtctgcatgtctctgtgtgcacaggtctgtgtatgggactaggttgctcctgcccttgcctgggcacagagaccctcagttgctgtgtccccaccctcacccccacatccccaagtctggggactgtcctcttcctgggtacaggcagctggctgaggtgctgtgcccattgttgtggcagatatatggtgatggacatgggcaaacagccacctctcctctctctccaccacgacaccctttgctttccacacccaccctgcttttgggcaggtacctgggaaaacccattaaagccacctctcttgctttctcttcctaccgagcttcttgctcaattcccacccctcccaagccattctctgcagggcagccagagggccttcctaagacataagacaaacatgtcctctttgtgctctgaaggcctgagaggctccccagtacccacagaatgccctagctgacatcccgagacccccacggttttgcccaagcagttccagacacctcctcccctccacctctgttgcccctccctccttagcactctccccaaattcatgcaggccgagagacctcgtgcttgatcccttgacctggctcttgctggaagcccccctcctccattaaaaccctacacttgggggtggggggagggatagcattaggagatatacctaatgtaaatgatgagttaatgggtgcagcataccaacatggcacatgtatacatatgtaacaaacctgcacgttgtgcacatgtaccctagaacttaaagtataataataaaataaaaccctacacttgccgggcgcctgtaatcccagcactctgggaggcccaggcgggcggatcacctgagttcaggagttcgaaaccagcctgaccaacatggagaaaccccgtctctactaaaaatacaaaattagccgggcgtggtggcgcatgcctgtaatcccagctactcgggaggctgaggcagaagaatcgcttgaacccgggaggcagaggttgcggtgagcggagatcgcgccattgcagtccagcctgggcaacaggagcgaaattccgtctcaaaaaaacacaaaaacgagcaacaacaacaacaacaacaaaaaccctacacttatttctgaggccagctcaaaaggtcttatgattgtcttcccagttttttgcagtcaaaatgaatttctttcccttggtataacgtgtgtgtgcaaaacgtggttgcatggattctttttcaaggagagagctgagcatgttcataggctgaaaggaaagccacagtagagagagttttccatggaaggtgaggcaggggcataggtggaggaggccccaaggaatgaggagaggaaaggaggtgggcagagctttaccccagaggcgagcagaggatggacgtggatctagataagacgtcagctcgttccctaaaggtcgtgctaaaggagtaatgagggtgaccagtgcgcaggggtttgagaagccccgtggatgtggtgaaatagctgtggggagagtatttggcaacgctcaatagattcaggaggagctactaggatgaatggctgccttgtgccacagctctacaggctttcacgtgtgtcatctcacgtgatcttctggggcgctggtgtctccgtttactagaggaccaatcggaagcttaaagagaatgagtaattggcccaagaccacccagctaaggagtggcggaggtggggcccaaacgcgcgatccagccctcgcgcaggcgccctggaactccccgcgcgtgttgtgacccagaattcccggggctgtggaagagaccatagactcaacaggagggggagtcctgggtagcgcgccggtctaaatcgttacttggcggaaagttcccatgagtctttgccagcgtccccctccttttgtgaggattgggatattccgactccttaagggcctggcgcacataaggtgtgaccttttcattcccgttgttatggaggtaggctctctaggaatctgggagtagtagctggggggcaagagcaaataaagagctcgagcttctgtggtctctggggagatgttcccgggaagcctgtctagagggcggagggcagctgttgag

SEQ ID NO: 17377 - DNA, 2300 bp, Homo sapien
aatccgttctgttcagtctcgggccctcctttgcttcctgggtccctccacagatgcctctctcctttggacattcaactgccatcttcccaactcctctctctcttgtcccccttcctcagagtctccttctcttgccttcccatcagccccaagcccatccccagccctctgggcctcaggctcccccactgcataatgggaataacgaaagtatctactgccttggggtgctgtgggaattccataaccttcttgcgtgatgtctggtgtgcagggctgacagtggcttgaaccatggagggaccagatgtgatcaggccccaggccttcacctgccctcatgtcagtaacacaccccacagccgccacatcaccaagccctgccacagactgtttcctcctcactcaaggatgcctcacgttttctttctccatctgaaatcactaacccatctgctcttaaaagctgagctcagcctgggcgcggtggctcacacctgtaatcccagcactttgggaggccaaggcgggtggatcacttgaggtcaggagttcaagaccagcctgaccaacatggtgaaaccccatctctactaaaaatacaaaaactagccaggtgtgatggcgggtgcctgtaatcccaactactcgggaggctgaggcaggagaatcactcgaacccaggtggcggaggttgcagtgagccgagatcgtgccattgcactccagcctgggtgacagagcaagactgtctcaaaaaataaattaaattaaattaaaataaagctgagctcaaatctgagcctgggcagaagtcatcttccctccttgccctgccagaattctctgtgctggtgccgctatcacggtattcacttagagtgtgcctggagagcttgctgtgggttgggctctattcaaagcactgcgctagtagtgactcatttaatcctcacagaaactcttgtgaggtctgtactgtaatcctttcacagatgtggtttggagcacagagaagtcaagcaattgtccaaggccacacagaacgggacaaagccaggacttgaatccccacggtttggccccaggtctttgctcttcactactcaatacactgcttgtccactagcagaggggtgtgggaatcgtaatgacaaagcagcctgttgagcacccactccaggcaccatgctgagcactgtgcgtggttaacgtgccggacctccccacaccgagtcgttggccacatgtgggtttgcatctgagtccagcgcttgcatccaagcctcagcgcttgcatccaagcctcagcactggcccactggcaggagcacgcttttggtcctcactccctggagggactcatgccctcaccctgtccagcacgagtttggctccggggactgttggattgactttcctagggatgtagttggagtctgtagcatctttcagctgcaccatttaacccagtgtctgccataacaaaaaatcacagactggtggtctaaacagcagacagttcgtttcgcacagctctgaaggctagaagtccaaggctggctggtgggtttccttctgaggctctctcctaggtctgtcagtccctcctcctcctgtgtcctcaagtggttgttcctctgcatgtctgtgtcctcatttcttcttcttaggacaccagtcatacaggattagggcctactcctctgacctcattttaccttagtcacctctttaaaggccttgtctccaaatacagctgcattccaaggtactaggggttaggacatcaacttgtgattgtcagcgggatacagttcagcccatgacacccagggtttcaaactcagatgccaacgggcctgacaggaacgcatgtgaatgaactgcgctgggaaagacttggcctcctcattcatttgttctcacttttgagggagacacaggtaaaaatatctcattttcccctttactatgtgaaatacaaggacacgaacatttgttcatggccatatcctagcttcctagaacaagtgcctggctccgagtaagtgctcaataaatctgctgagcaagagaatgcacagagcggccctggacattggggagtggcagggatcatggtgagtcttggccagggggtcagcaggcacttggctccagccaacttttgtccgatctcctggaatccagacttacataaatctgtttttcaatgctagcaactaattcacaaaaactaaaaccatcctgcagatctgtttgcagccactgctgtctgcctagggtgcccaccc

SEQ ID NO: 17378 - DNA, 2300 bp, Homo sapien
ttgcaaggaagagtctttgatgtgggcagagtgtgggcaagatggggtctatccagacggtcatctccagttgctgaagtcctgctctttttatggctacagaatcctctggtgaggactgatagcaaagagtgtgcctgtttatgtctttatctggtggggtgtagtctttattgattaggcgaacatctggttcctgttggcatgaggctttttcaaatgtaaaatggaccctttttctaagatggagttacttatgtcaagggtgctccatacaacctgtttagccagaatccccctcagccctgatgtttcccttattaagtttctatccgctgacccccaccctgctccttagcaacgaattcccacttgcccatgctgtaattggagttgagctcaatctctctctccctgcaactgcaaaatctcatagcagaggtccctacacctatggtaatggtcctgaataaagtcttccttacgatgctttaactcatgtcattaaataattttttcctttagcagtgtccaccgagtttactctcccaattcttggcagtgttattatcctagcctgacaggaagaatcaggactcaagaagctgaagactcgcctgatactcagtgctcactaagtagtggggctcagctccctgtgatttgggatccagcctcctgcccctacagcccacgtgcccttacaccctcaagcaacacccagagctggggtcagaggcgagcttgcacaattgcttctgccctgcgctgggaccagggcggcctgtggtctgcaacagagaagctcccccacctgccttcgccttcactctggcaagccctggcaacaccatgagatcccagggctctggtcccttacagactgggcctggcagaggcacggggaggaaggtgggccagcagggtgtaccgctgggcctactcgcagacgtgcgtttgctttgttgtaccaggactaccccagggacccttctccagggctgtgagagtgagaacaagagaacacaggagttcacacctctccggtccagatgctttgagagcatgatggaagcaacaggccctctccatagaagggcacgcacacaacccataagctcgcacagtttccaggtttacgcaccaaccacaccactacagcgccctgcaagcaggccaggtctcaaaggagcgtgcatgggaatcacccaacatgctggctaaaaaggcggatcccaggccccaccgaggagattatcattcagtaggtctcggtggaggccttagagcctgcgtttttaaccagcgcctccgacgatttgggcgctgaggctcagcggaacccaccttgagaaacccgactctgggcctaagagagccccccaacacacacacccccatgctccaaactttccccatctcgcccgacgcaccgggcgcgcggtggtggaagcgtcggggagcccggtggggaccgagagcgacggcccatggggcctgcctgttcccctcgcccccgcgccacggccccgggaagcgcagcactgccgcccgcaggaggcgcgactgccgagaggacgcaggcagggggcgcctggtggtggtccccagcccggagccgcggggcgggaaggagcgggagcccgagaagagggaggcgcgcgacgccgcggagctccggcgcggaggcggggggcggggcgggccgagccgggccggggcggggccggcgggcgggccggcggcgagcgcccggggagcgcgcccgggtagccaagagggaggagcgcggggagcgccgacagccgcccgcccgcccgcccccgcgacgcccgcgcgcaacagttcccccaaagttgcagcccgggaggcgagcgcgcacgggcggccgaggggcgggcggttggcggggacgcggcctcgcggcccagagcggagagtcccggcgggcggcggcggcatgggcacccggcagaccaagggcagcctggcggagagagccagccccggcgccgcgccgggcccccgacgcgaacggccggacttctgggcgtcgctgctgctgcgcgccggggacaaggcggggcgcgcgggcgcggggatgcccccctaccaccggcgagtcggcatggtccaggagctgctgcggatggtgcgccagggccggcgggaggaggcggggacgctgctgcagcacctgcgccaggtgagcgcggggagggggcgcggggggcgcgccgggccagggggcgtgctgggccggggggggcgccccatccctaaccgaggaagccgggggc

SEQ ID NO: 17379 - DNA, 2300 bp, Homo sapien
ccttgaatatgtttttctatgcttttatttttccagtgttttatgtatttttgttttgtgtctcttagaaataacagctactcgggaggctgaacccaggaagttcaagtgagaatcacttgaacacaggagaatcacttgaacccaggaggcggaggttgcagtgagccgagctcgcaccattgcactccagcctgggcgacagagcgagactccgtctcaaaagaaaaaaaagaaagaaagaaagaacatgggtttttttcccccaatctgagagtctcagaatcaaattcctgaggaggaagtgaaaacctttcacagttagtatgtatgcacagtaaagcccgaaaccgcacattaagtctttctgcctttagacccacatcttccctgcccattcttcctctaggaaatctggcgcccagttttctctgcgtagttggcgcggggcttcaactcccggcgctcctccagctactggcacctccctggcctccaagacgtctaccagacctgcgtctgcccggggaaactttgaagttcccttcggaacctcgcaggctgacaagcaagtcagagcgatgggtggaggaggttgccatggagacaggtccagggccagaggcgcgggagggggaggcggcagcttgggctccgattggctctgcgggcgcgcagcgttcctctggcgcacatgcgcagtgacgccgaggcgaggtcgcggctaagcagaggcgccggggtttctgggccgggcttctcaggaccgggctggaacgtgcagctcctggccgggacactctgtgctttgcggggaagggaagtggcggagcccgaggatccgctgccgctcgggactgagcccgccacgcaggcgcctgtgccagcgtcgccattgttgcctgtggccttagggccgctccggctgcccgtcggccgggtcccagcgacaggtattgatgtccgggcgcagcgcgcgagtgtccgcgcgatcagtgacagcccgagcccgtccacgcgcgggctcccgtgctcgtggcttgcgggagggcaaagacggggtggaggctgctgtgggcccagtcccagcgttgcgcgtcgcacggtccccgactcccccgctgccctcgacctcgaccctgcggctgaagaggagtaagaggcagagggacttggccgggaaggggaggcgacaggaggcaaggcaaggctgtcgcatcacctccgcagggccttgtaaacagttgtctttggtggcacgactgtgcctcagcagggctcggagctggagcctggggagaggtggtgtcggttctcctccagatcaggccggttctaaggtttccttcgagaatcctggtttcgaatatatccctaaagaactgtctcctatagaagcacttaaaggacttgaagtcacaccaacctcttcactcttttccagtccaacccgctggtcttcccaaccctctgatagtgaaaggctagaatcggctggcattaacatgcaacgcagataaatggctcgccctttcccctgacagttcccttgggaaccttgagcactgtattaagaagaaattctcctagtttcttccaagtaacagattcactttgttattgttgagagtccgttcagtcattacagcttctgtaacatcagtgactaaaataatgaaactattttctctataaaaatgtttaatttttgttacaacaggttagaggtttaatctgttgtttggcttagattcgagtcattgcctctgacactacctttttaatagcagctccatcccccaccaaccccaagcagatggcagttcccttacaagtctaaggatataggggaggaagacaaggtaaagcttatgtgtgttcatctatgcacactgcgagtctgtttctgtgtgtgtatatgtatagtagagtacaccagggattcttgaccttgtggtccatgcttgtgtttcagggtctcttatccatccctgcaagttctgggctcagaatttgtcactaaggctgctaactctaccttgattctgttctgccctcggctgcagcagcctttgatatagtgtccttgtgactctagcatgagacttcaagcagttggctcactactggagaaataaaggatattgccagattgactctcctgtctgtagcaatgttagcctcaagcaagaggatgaacagttcttcacgttctcaaatccttctaaggtggaagtcagacaaggctcagagtggaccctacaatgttgagaaggaaatccttacttcaagattcttgc

SEQ ID NO: 17380 - DNA, 2300 bp, Homo sapien
tttgtatgttttgaggccttagtgttagggacatgctgtatatttatgataaatatatcttttccatcaagcactcttatttattcccttttaatcttctcaaattctagcttatcagatattagaattattacttgtatcagtcagggttcaatcaaaaaagcggaaccagtagatatttaagatacttgtggcaaagagttggcttactcgattgagggggtgaccaggtgagtccaaagtccataagagcaccccatcaggaagggcaggctggaagctgtggtacgctgatggagtttcttctccatcagggaaacttcggttcttttttgaaagcttttaactgattgaatcaggcccacccaaattatctaggataatctcccatgctacttagtccaactgggtttatgggcttcaatctcatctacaaaatgcctttacagcaacacctagattcgtgtttacttaaatagcaagagactgtagcctagccaagttgacacatcaaaagaccatcacactccccaagtttgtttttttttttttttgagatggagtcttgctcgtgtcgcccaggctggagtacatggagtgcagtggcaaaatctcagctcattgcaacctccgcttcccaggttcaagtgattctcctgcctcagcctcttgagtagctgggattacaggcgtgcgccaccacaccaggctaatttttgttcttttagtagagacggagtttcaccatgttggccaggctggtctcaaactcctgacctcaggtgatctacctgcctgggcctcccaaagtgctggaattacaggcgtgagccaccgcgcccggtccaactttctttttgttaaaattttcctggtgtggtgatattaagagtctttgacagtcctcctccaccctcacaggattctgcctccatttgattctctgtaggcttgtgattgctttgaccaagagtctgacagaattggtgttaggtgacttccaaggccatgttataattggccatggcgcttctctcttgttcactggaatgctcactcttggagcccagagccaccatgtaacaagtccagctgccctcagtcctttatgctggagagaccacattgaggcactctggtcaaacacaagccgagttcatcttttagcccatctcctcccaagcagtagacatgtgagtggaaaagccatcttggaagcgggccctcccagccatcaaatcatcccaacagaggctacagacataatgaggcaaaggcccacccactcagttcccctttcaaattcctcaccatgaaatttatgagcataatacggtgattgtccttcaaaaccactaagttttggggtggtttgttaatagaacagtagataacgggaacaccttgaatatgtttttctatgcttttatttttccagtgttttatgtatttttgttttgtgtctcttagaaataacagctactcgggaggctgaacccaggaagttcaagtgagaatcacttgaacacaggagaatcacttgaacccaggaggcggaggttgcagtgagccgagctcgcaccattgcactccagcctgggcgacagagcgagactccgtctcaaaagaaaaaaaagaaagaaagaaagaacatgggtttttttcccccaatctgagagtctcagaatcaaattcctgaggaggaagtgaaaacctttcacagttagtatgtatgcacagtaaagcccgaaaccgcacattaagtctttctgcctttagacccacatcttccctgcccattcttcctctaggaaatctggcgcccagttttctctgcgtagttggcgcggggcttcaactcccggcgctcctccagctactggcacctccctggcctccaagacgtctaccagacctgcgtctgcccggggaaactttgaagttcccttcggaacctcgcaggctgacaagcaagtcagagcgatgggtggaggaggttgccatggagacaggtccagggccagaggcgcgggagggggaggcggcagcttgggctccgattggctctgcgggcgcgcagcgttcctctggcgcacatgcgcagtgacgccgaggcgaggtcgcggctaagcagaggcgccggggtttctgggccgggcttctcaggaccgggctggaacgtgcagctcctggccgggacactctgtgctttgcggggaagggaagtggcggagcccgaggatccgctgccgctcgggactgagcccgccacgcaggcgcctgtgccagcgtcgccattg

SEQ ID NO: 17381 - DNA, 2300 bp, Homo sapien
gccatgaacaatccacacatgaattacgtatttttatatatcagatattatttatacttaaaagagtgagtgaaaagtagacattagagatagttttagataactttttagagagggattttttttcccctacgaagagggaaagagaaatggagcagtggctaaaggaaagaatggagtcaagaaaaaatacttgttttatttttgaaatgggagctgctatgacatgtttgagtgctgataggattgccttaatggagagagagacattgatgttgcaagacaaagacgaaggactaaagtgtttgacagggttaaaggagataaaatctagaaaggaaagggggatttaccttgaataggtacagaggtcacctcctgtgttgtaatactgagaaaggtggagaagatgggtgcacctgcatgtcagttgagggcaggaagattgaggccactattatgatagctgccatagtttctaaaatgtgaggcaagatcattagcttatggtgagggaagaaaaaattgtgagagagggaaagttattttttatggtagtggaattcaccagggaagccatcttggcctgaagcttttattgggaaaagtgtttaattatagcctctatgcctttagtacttaggactgttcatatttcctttttctttttgtttcagtttagcaaattatgtttagggattgttccgtttaatctaattttaaaatttattggcatactatcggtttatcatttaaatgtttgtatggatctgaagtgatgtgccacttcttattcctgatactggttttttgtgttttctttattttgtcttactcagtcttgctagagtttatcaatcttacttgactcttttttttctttgagacagggtctcattctatcacccaggctggaatgcagtggtgtgatcatagctcactgcagtctcaaactcctgggctcaagtgatcctcctgcctcatcctcctacatagctgggagtagaggcacacaccaccacacctaagatttttattttttgtagaggaaggggtctcactatgttgaccaagctgttctcgaactcctgggctcaagctatcctcccacctcgtcctcccaaattgctgggatttcaggtgtgagtcaccatgcctgacattacttggcttttaaaaacattactgtttttagtcctttttcttgtatgtttgagttttattactttctgttctttattattttattccattcttagagcttaatttgtggatcttttctaacctcttgaattaggtacttagatcgttgattttcagctgttcttcttttctaattgtttagggctatcagaactatatcacacttttttatgtagcatcttcataatttttgagtggaaaatattttataatttctattgtgatatcttttatccttgggttatttttaaatgtttttcttaattttgtgccatttgggaattttctagcaatcttgttgactttaattctactatggtcagacaggatgctctgaattatgtcagtctttgcagaattttgtaaacattttgtgctcttgaaaaaatgtacagcctataggtaggtattgagtattgagtacaatttctagatgtgtcaggagattaagtttgttaattatgttaaaatctgtatacttacagcttattctatcaattgagaaagattttttaaagtctgctagtgagactatacatttgcttcctatttagttcatttaatttttttctttctgtatttgaagctgtgttattatgtaaatacaaagttataattgttatctgtatggtaaattggcttttgtcgttatgaagtatctcatttcttaaaagtttttgccttaaaatctgttttgtctgatactaatattactacagcatctttcttttggttgttatttgtatagtatatcttttttcatctgctaactttcactttctgtgtattcttgtactttttgtctttatttttaaggtagtatattgttaattttttatttttttgagactgagtttcactctcgtcgcccaggctggagtgcaatggcgtgatctcggctcactgcaaactctgcctcccaggttcaagcgattctactcgctcagcctcttcagtagctgggattacaggcatgcaccaccatgcccagctaatttttgtattttcagtagagatggggtttcaccatgttggctaggttggtctggatctcttgatctcaggtgatccacccacctcggcctcccaaagcgctg

SEQ ID NO: 17382 - DNA, 2300 bp, Homo sapien
aaagagtagagtttttacttggaaatggagatagaactactccataagggttcataagatatcataaatccctgaatcctaaggtccatttggtccaacagaaaaatagcgagtcacaacaaaactcttcttacccagagagaccaggttcctgtagtttcccaatatcacacccttgtgcagagtccttttgaggaatccattaagttccactcttcccagacgaagtcatcccttaatgtcactgattcctaagtattccataacacattatgatgatacaaatctattcattacctggcccaatgggaggaaaaataaatgtaatgaaaggaatattcatgtaaacacaaaatgcttatgtggaagagagcttgcaggtcatgcaatcaaattcccaagaggacatttaaaaattctaagcaaggattcatctaatctctgcctgaacttctccaaagaattcaaattcattattgcacaaggtagcctactctattttctaaagctgttcgttgttagcataaagttatacaatctgaatcaaaatctatcttcaagtaacttttaaccattggtttattatttgaagccaaaaagcattagtttcttccttcacagaagagttctttaagagtttaaaaattactaaatataaaatgcacacaaaattgcctataacaaatatcactacaaattgaacagtgtactcctaccaaaattaagaaataaaacactaccaatacctttgaagtcacctgtgtgtctgtctttcctggactttatccctgtagaagtaataatctaccctaaatattgtgttaaacatttttttttaatagtttaacgaaatgtgtatgtttctctaaactttcctggtggcttattttacattctgttgtttgttgataatgtttttaattccatctatcatgtccttaaacattttaaatgtaataattttaaatttttaatcaaatgagctctgcctctgaagttttgggggatatatttctgccgtttattgtttgtgctgattttcagtcacagtgtcttattttattatttgttttgtaatgtttaagttttggacttctgtttggctcatcttcatctgtggggaatgtgagggaactgggatctccaaaagacatttgcttagtttctaatttcagagtgtattgaataaatattttgagtaatctttttcactggaaatttcgttttattccagtcctcctgtgaatatcctgttgttttgattactcttcaatgccactctccttagaagatgtacctcattccgtgtgcatttcgatatgtggaagtgtgttgggaggtggggtcccaaattattcattcattcttccttcgtttcattcagtatgcaagcagtctcctaagtaggcactctgagtgataaactccatgagatgtagtttctatcctcaaaaaataccgcctttggtagggataaagtaaatagaccttaatatagctcttggacgagcagcccttgaataagtggtcaaataaatttgttgcaaataaatactttcagtcattgtgttttaagaattatcatttgtatgcattgaggagaacttctacagctatttgtcttcagaaaggttttttctttgtatttcgaagaattttggccttaaaatttccagcttattttcagacattcatatccattctacttaattggcattatagtcatcaattgttgtctcttccaactctgagggaattgtcataaagggaattgttcagaaatatgtgtttccaagcacttgttcacatatttgtctggatcacatctatctgttctctcgacggctttctttagtcgcacctaaatgttccaagacaagggttgtgtcattatttgtatctctagtgctattgcttttgacacatagtcaaggcttctcaacagaagtgtatccaattggaattttttctcaccctcgaagagccaattccttcactaacgcagacaaaaggggcggggggctcaggcgctgaggattctgggcactgtagttccgacgctccggctgcgcaggcgcaatgccctgcctggaggccggcaccgccgagccgccgccattgctggaagcgttcccgccctgctctgcgagttccctcagttgtcctcagttcggccgccaggtactcgttgtcccgggcgcctggcctcggttgcccgccgcccctcccttggcgcttggctcccggcggcgtccggggcgtggccgttccctctagagcccctgtccctgagcggaccc

SEQ ID NO: 17383 - DNA, 2300 bp, Homo sapien
gttttcctttttcattcatttgtttttttacagcttttgtagagaccaacccaagtagatgccagtgggtattaaacaaaaacacacatacccaggggacaagccctccagcggtgaggaatctctgccatgttctcttccctgctgcccacgaacattacggagactcccttagtctccccctcctcttccccactgaggggcggcttgtggagatggaggactcgggcccatagatgcagacccactgtcaaatccagcaatagttctcattcttccaaagctcgagtgccattttgagatgccctaccaatgacatgcagtaaaggacataacctcacagcctttttagaagcattttgaatatctacagttgcctcaattcacggggcatttcattcctctgatccaggttagagttttgctaaatctgtagcatcctgagtagcacactaattttttttttagcacactaactttaactacattagttgagtgtagttgatacatctgtggccttgtgtctataaagagcacactagattgtacccagcacttttggatatgacatgctaattagatgtatttaactattcataggaaagtgtatgataaatgactgtaatatttctaataaatatattttgtttctaattatttttttctcactgacatgtatcaatattttttcaaagtgccacccttaaactgagtctgttttcagaccagcatcttcatgcatatatccttgtcaggtcacagtctccactgcagctgctcttgcgggtggtgctggaattttccacagaggactgggctcctgctggttcctccgctgcccgtgtgcagctttcttgctcaggccacaggcttacgtgaagatcacccttcaaggcctacccaggacactgctgagctgtgcagatgtgcacacgatatgtgcaatgtcatacgtgtgactaaatgccaactgagaccccagaaaccactcatagggggaattatgccaagattgaggaggcagggtgatactttttttctttttctgtttttttttttttttttttttttgagatggagtctagccctgtcgccaggctggagtacagtggcatgatcttgactcactgcaacctccacctcctgggttcaagcgattcttttgtctcagcctcccgagtagctgggactacaggcacgtgccagcacgcccaactaatttttgtatttttagtagagaacaaggggtcaccatgttagccaggatggtcttgatctcttgacctcatgatctacctgcctctgcctcccaaagtgttgggattacaggtgggagccactgcgcccggccacagatattttgtaaatgattgcttccttacgcctttctagttcatgttttcttatacatagttacatttcttctttgctatactaaaaatccctaattttagttggtcagagagagggatttgagactgagctcccatctcctcggctgcagcatctgattaaagccttcttcctttgcaatactcatctcagtgattggctttctgtgggtgagcagcgcaggatctaggctgaagccctgaggcttcagtgacaaaatctgtttttcataatgctatctgtcttaattgtcctcaagaattagtatttgagtgctctctagattctcctttgtcacccttccttcctttctttcttcctttcttccttccttctttccttctctttgcttcgttctctccttccttcttttctttctttttttgagacggagtcttgctctgtcgcccaggctggagtttggtggcacgatatcagctcactgcaacgttcacctcccgggttcaagagattctcctgtctcagcctctggagtagctgggactacaggcacgcgccaccacgcccaactaatttttgtatttttagtagagagggtttcaccatgttggccaggctggcctcaaactcctgacctcaagtgatctgcccgcctcaacctcccaaagtgctgggattacaggtgtgagccaccgcgcctggccgtcacttttcttcaatctcactggtgctcgcgggctgaagggtcaggacggactagaggcgagcaatcctggtggcaccaggcgttccccgacccgcccgggtcgccagctgcacggaccctgggcagatgcgcgcagcggctgcggcacacggcggggagcggctgcttggccccatcctaaggcagcagaatgcccagagctggtccctggctccaggcgcaggccgagtaggagctgggc

SEQ ID NO: 17384 - DNA, 2300 bp, Homo sapien
tagagaattcagtcctagagtgcctctgcttggctgcatagagctatagttctgacttaaaaaaactttttctggtaaaatgtgctttgtgtttactcaccttttgcactgaacagaatactttttggcaggatatttgtgttcttcctttaaccaaagcaacatctagataacagagaattaggggaaagcatgattttctttaggaagtaggattatatttagaatatagggactaagtatgtttagggactaacataggattatatttaggataacttagtagagacctaaagattgctgactcaaacacaatgtggtttctttgctttatttttacagctctgaattcacagctgttagttataactatatgcactacaatttaaaagacaccttcccacacctgtaatctcagcactttaggaggccgaggtgggtggatcatgaggtcagtagttcgagaccagcctggccaatatggtgaaaccccatctctactaaaaatacaaaaaaaaaactagctgggcatggtggtgaacgcttgtagtcccagctactcaggaggctgaagcaggagaatcgctggaacccagaaggtggaggttgcagtgagccgagattgcgccactgcactccaacctgggcaatagaggaagactccggtctcaaaaaacaaaaacaaaaaaacaccttccaaaagcaaatattaagtgacttcctatcgtttctatgactttatgtattatagaattgactttccaagtcagtaattaatgagacttattgagaatttgctgcatagtatctccttggctgtgtccacatgagctaccaccttgcgttaataaatgtgttcgctagggatgttggttttggcattgacagtgttctatcaccaatgcaaataagaccagggaccactcttgagaacattaatgtccaagcatcttaaagttgtacgtaaggctttcataatgtgacttctgctcagctctccatctttagccctttcccctgtgtgccctttctctggccttactgaactgctggtcctgtcctgctgacccatccttcgactgcaggcaaacacatacactctttcaggcctctttctgccttttgttgctgcctgtcatgctctcactctttcctgtcccctaccccttctaattaggctagcctcactctttaagcctcagctcgggcaggatctctagaaaagtcatctctgacatgctttcttttcactctttaaatcctagtgcctagcacatagcaagactcaatacataattgctgagtaaaatagataatgactctttgtacaaagatgattttcaagattgttccctacagtcaaggagcaaagggaatagacatgtaaagcaataattgacagttcgggtggtggagatgcagtagaaaaatcagttctagggcagccctaaggaaggagatacctagatacctgtttacctggggaaagatgaggatgagggtcaacttcacctagcagtctgttttttattttatgtattttatttatttatttttagcagtctgttttaaaagatgaaaatattaatacgtttgtcagaataatacagggaaccatttcagatgttaggaagtggttgtacaccaataaaggtgtccacagtcattttggaaatcattaataaggtactattatgaagtggagaacagtatgcagcattgcctgataatattactactgcattccaaaattttgttttgtttgtgatggctttgttcattgatgttgggtggatgaatctgtgagtgaatcttcaacatgattgtatttctttaacctggtggcatctagtgtctcccagaaagtggtttgttgaagttttggagaattagaagtatttcttaaagaagtaagtattccactaaagatcaagcttcatttaaactctcaatttatgaaataaaatgaaatgtaatttaaaatctatttttataaagactatgtcttttatctaactgttctaagtagtttaactgaatgtttggattttgcagcagaacaagactcggagctgacatcagaggaagagcaagaaagacttaaaggatgcgaaaataagcagccacaggtgtggaaacatttaaactaaaatctaaatttctggtttaatactcttttctttgctttaataatataagctagcccaaatgaaattacctctcagactagcctttgagaaccaatagatccttacttaatatttaattttaaatacatttaaactagttataaaacacaa

SEQ ID NO: 17385 - DNA, 2300 bp, Homo sapien
tattgttgaccagaaaccttacccataacaaagttgattaatatatatgctgtatattctatgtattatacactatattcttataaaagtaagctagaattgccttagctattccagctgttttggggttcgatataaattttaaaatagtttatcctaattctgtgaagaatgtcattggtggtttggtagctgacttcaaactatactacaaacctgcagtaacagaaatagcatggtactgttacaacagcagacacatataccaatggaacagaatagagagctaagaaataatgcagcacacctacaaccatccaaccttcaacaactccacttaaaaaaagcaatggggaaagcaatgggactgctggatcaaatggcaattctaagttctttgagaaatcgccaaactgctttccacaatgactaaacaagtttaaattcccaccagaagtgcataaacgtccccttttctccacaaccttgccagcttctgttagtttttgaccttttaataatagtcattctgactggtgtgagatggtgtctcactgtggttttgatttgcatttctctaatgattagtgagtttgagcatttttttcgtagccttcttggccacatgttatgtcttcttttgaaaagtatctgttcatgtcctttgcccacttttgatggggttgtttgttttttttcttgtaaatttaagttcctggcagatgctggatattagacctttgtcagatggctaggttgcaaatattttctccctttctgtgagctgttcactctgttgatagtttcttttgccgtaaagaagctctttagtttaattaggtcccatttgccaatttttgtttttcttgcaattacttttggcatctttgtcatgaagatcatttccaggtcctacgtccgcaatggtatttcctaggttatcgtccaaggttttaatatgttttcattttagatttaagtttttaatcctgcctttgcctcccaaagtgctgggattacaagcgtgagctaccacacccagcgaggaagccaagtttaacgtgtgtgctccactcctccaacctggccaaagggcagtcatcatcactggccactactgaccacagcctttagaaactccccttgaacgtgctgggctgaccttcctctgatcacaggcaaggtaaccatacactcaaggccaatgatcccatctgctgtgggctgggtcatgctcccaatgcttacagaacctgggaggcagaggaaaactctgcccatcccatgggacgttacctgtaagctttgaacaccagaatcttgaggcctatctctttctggaaggctttgtcttcctctaaaccaggaagctggagcaattccaccagattctgtacaacagatgcaacaagaaaattcatgaagaatagatcttaggttgaatttttcacagaagaccttgtaagaacagacaatggtgaggaaaaaaaagcccgaggtcaatacaatggggaaaagcctgtgaagtgacctggcagcagccacacctgctgtcacctccattcccctctcatcttggaaacagatttgccctttacaactcaactcatagctcacccgccttcagagacttcttggcccatcttagctggaagggatctgttccagcgctgagcttttattttgcttagcatctactcagatgccttgactgtgtgtgtctcacagtcctactgactgacaaactccctgggggccgagatggcatggattcaggtctcagatgctctatggcacctgggagcatcttacacaggtgaagtgctcagtgatgatctggggtcactattctctgcagatcagcatgtctgagaggtaggggctcacagactgtggaactggtgtaagacctttgtcttttcccagctactaacaggtcctgcttgtcacagcccctccatgatacaaagttaagtcattttatgtctgacacaggcaaaggaaaacgacaggcccttgccttcccggtcctcaagggtcagctgtaagatgatgtcataaagccggatcaggtcctggggccggggggaagcacttgctgtcatcctctggctgctgctgcagcagagccctctgcagacctttggccatgctctcattacacttgattgccattgacagcttgatgtaagtcaggtaggtggaatgcaccacacatcagctcaagttgtactcagagaagcagaggaactgggaggactggactacgagttggggctgacccagaggaagtggggggg

SEQ ID NO: 17386 - DNA, 2300 bp, Homo sapien
tggactgatctgtcattggttccctgccatccttatcttttggattcccctcggagcagggggaggaaggagtttcttttgggttccactgaatcaaatgaaagggaaagtaaagctgttcctatgtcctgggctctggagcttctattcctgatccctgcagaagaaggagacggtggtggtggtgggtgggggtggcggggcacagaggaagcaggtaccgggccctgcaccccattcccactcccagatccctctggacacagcatttttctccagtgagcacagccttcccttgccccacagccaacagcaacatgcctcccaacaaaagcatctgcccctcagccaaaacccctgttgcctctctctggggaaattgtaggactgggtcagggtggggggaccattctctgcagggagattaggagtgtctgtcaggggtgggtggagcggggtggggccctggcttactcacatcctcgagagtcctttgctggcagatttggggagcccacagcacaggtgtctgtctcagtattgtcttccaagctcctaggccacagtagtggggggctcccctctctggcttcttctttggtgacagtcaaggttgggggtggggtgagagaggtcctgcttctcttctaggaacagttgatcccaggaagagcagtggagcctccagcaggggctgttggggcctgtctgaggagataggacgtgtcaggcagccccagacacgaccacattcctcccaacatgcctgctggggtctgtggagcccaggggctgatgggagggtggggtgggggccggaagggtttgctttgggaggttgtctgggagattgctgaacttttgatatacacacctccaaagcaggaccaagtggactcctaaaaatgtcccctgacccttggggcttcaggagtcagggaccctcgtgtccacttcagccttgcccttggcacagcctggcaccactccagcctctactcctccccagaacatctcctgggccagttccacaaggggctcaaacgagggcacctgagccagacttctgcctacactagggatgttctgggggtctgagaggatatctggggctggaagaaaaaaaggcccccctaggcctgttcctggatgcagctccatccactctggggctaagcctgggctacaacaatgccaaccaggcttcttgccatactcggtttacaaaagcctttcacatacgctgtcgcattggcttctcacagctgactgcagtaggcagagtagatggtatgactcccactttgcagatgagaacactgaggctcagagaagcgccaagccctgggtcacggggccgtaaatggcagagccaggacccacctgactccaggctgtttcctggcctccatgaggccacccgccctatggtgtggtggatgtcagatcctcaccgtagggaggaaattagggtctgtgcccagggctggggagagctgcctggatttctctttgatgggggtgttggggtgggaatcaccatacacctgactggctgagtgtatttcagggatgggacaggcttctcagcacagcatggcaggtcaggcctgggagggccccccagacctccttgtctctaacagcgggtcatggtgagggaggcctctctgtgcccaaggtgaccttgccatgccggtgctctccagctgggtatctgtcccctgcagtggtgggcttcctctaagtggatgttaaaggcccatccagttcatggagagctagcaggtcaccaggtttaaggtgcagaggccctgctctctgtcaccctggctgagcccagtgtgcgggttcctgagggctgggactcccggggccccatgggaaagtgtagcctgcaggcccatacctccccctgtgaatcacgcctggcgggacaagaaagcccaaaacaccccaaacaatgagtttccagtaaaatatgacagacatgatgaggtggaggagaggagggacctggctgggagttggcgctagcctgtgggtgatgaaagccaaggggaatggaaagtgccaggcccgccccctacccatgagtataaagcactcgcatccctttccaatttacctgagcaccttctcttcactcagccaactgctcgctcactcacctccctcctcggcaccatgagcacctgcagccgccagttcacctcctccagctccatgaagggctcctgcggcatcgggggcggcatcgggggcggctccagccacatctcctccgtcctggccggagg

SEQ ID NO: 17387 - DNA, 2300 bp, Homo sapien
attcaccatgacaggaggggactgcatctggattgtgggccatagtttgccaacccctgcctgacttcatggcaacactgaaattcgtatttatgcttcttaaaaacatgtctaagccaagtgcagtggctcatccctgtaatcccaacacttccagctgagcctggaggattgcttggggacaggaggtccagatcagcctgggtaacacagcaggatcccatttctacaacaaaccatttcaaaagcagccaggcatgggggcccacacatgtagtcccagctactcaggagactgaggtgggaggattgcttgagcctgggaagtcaaggctgtatagtgagctgtgtttgggccactgcacttcagcctgggcgacagagtgagacctcctctctctctattatatatatatacatacacacatatatatatctgtatatatatatatatatgtgtgtgtgtgtgtgtgagagtgtgtgtgtaatggttgtctgcaagaaacacctttaattaatcacagccaaccctcaaataatacgcatagtataggacccttacaatgctacactcccaactcttctccccacccaccttttgttttctttccttccacggattctgtgacatcttcctctcctcattgactctgcatgaaggggattcctggtgggggaagggtagctggtgagaaatgaggtatcaagaaactagcaaagcatcttctggctgtctgtggacagttcttgtgtggtccccagcctagtctcaagggttctgggctggtcaccctgcagcctctgtgctgtgtcaccagattcgggctctgagggaagggccctgggaggcccaacagagcggggtgccttgtctaacatccccccgttcctctggctgtgtggctcaggaataggcccagacagtgtgtccaggtggtgccaggtcacctcactgccccctttgagatgggcccagagggttttgtggggtgagcatgaagctgggcacccaaagcctggggccgagtgcccctccctgtgtcccagaggaggggccctgacctgagaagatccccagtgcctggcttatgggtgccaatgtggggaggggtggctctgaggactgaagcgggtcactgaaagaagacattgagctccatggctcagggaccttggcagtagaggcctggtaagcagagactaggacactgggacttggtcacaaaaaatatgatcagaaagggcatggccatcagagagttggtcaggcggcctggtcattgagggactgtcagtgaggacctggtcactgggtgcttggtcaatgggtcttggtcagtggggacctggtaagtggagatctgattactgggggcttggtcatcaagagcctggtcagtcaggacctggtcagtgaggacctggtcagtgaaggacttgtgggggggcattggtcagcagcggccttgtcgggggaggcttggtcagtgggggcctagttagtggggtcctggccagccggctgctgggtgacctcatgcaggggtttgtccttggagcttgcttgccgccatctgtagtggggatgagtcacatcaccccagagggctactgggaggaggagatgagcaggtgtgtggaatccggccctgcccaacagacctagcactttacaccctagctgagtcccctgctaaagagggggcctgctctctgccctccaccctcaattctctgctccccgtccacaggactgccccacctagggagggctgaggttggggaacacctgtggacactctgatgctggccacaggcccagggccgggcgtgacagtgacaaggacctgagtgcgtacatgaatggggccacctggcccagccacagaagcaacacaccatatgcacgtgttcacccacatatatgtgcacgctcacatttacaaacacactgcatgcacacatgttgatgcttcgggggtggaggacggtgactgtgggccctgctgacccaggcgggggcccattgtgatgggtgccgtgatcccgtaatgtcactggtgctgagtacccacccgcctacctggctgccttctctgtgtctggagctcttagagacaagataaacagcgatgtctggttctgctcagaggaggctttcttaagtgagaggcacagttggatcagcagactcagctgagtgtgacctgctctgttccctccctgctgacctgggacagtcgctaccaggcagtgctggcctctgggcgggtgccgaggagggtcatccctgagcactc

SEQ ID NO: 17388 - DNA, 2300 bp, Homo sapien
gagcccagctatggttttgtcactgttcattgacacaagtaattaaatgtaaacaagtaattaaatgtaaaacccctacaaatgtaaaagccctaaatgtaaaatgtttagccctacaaatagggctaaagtcccctttgacggtcacccccagtcctggttccctcttgccccacccggcgagagccagtttcgtcatgcatgtctttgcagacttcttatgcttcacagtcatgtgtgcgtgatcacagacaacacagcgctgtactgtgtgtgtgtgtgtgtgcatgttgtttgcttttggttttgttttactaaaaggcatcatgctgtaaggctcatgctataagctacttttatttactcagcgtctgtcctgaaagcttcgagatttctcattcttttaactgtgcaatagattcctggctctggcctgtgcaccctgcttattcaggcatcctctgctgcatggacatttacattgtttcccgtttctcgctgtcatgaggaggctcacggaggaggagaatttctggggggtgggttaggtgtgtgttgtgcatttaactgaccctggctggttactctccagaacgctgctgccagctccctccctccagtgggccctgagttcatgcttctgtagatcacccccctgcccttgatgttaccaactttaaaactttgcaacctgatggctgaaagttagtttttcattgttcagttgtttttctgatttttgggagactggacattttcctgtgtttgctgaccgtctgcatctcctctcctgctctgtgcaccatcaccctgctccagctgcttcctgcagcctccctccttcctctccacctctccatgtcctcctcgtccttcagtttcttcctaagggcccatgggctttctttggcttttacgttcctctcactccgcctttggctgttgctgggcctcccatcccctgggaggtttcagacgatggggaagacacaggagtgcagtcgccatgcagtgcaatacgggctgtaatgttcctcctccacggcctttattgaggacttactgtgtgccaagaacctgctctaagaatgtaactgtgctccctccctcatttcatgctcataaccgcctgtgaggcgggcaatgttctcatccttttttttttttttttttttgagatggcatctctgttgcccaggctggagtgcaatggcacgatctcggctcactacaacctctgactcccaggttcattctcctgccacagcctcccaaatagatgggactacaggcacgcgccaccacacccggctaattttttgtatttttttttagtagagatggggtttcaccgtgttgcccaggatggtctcgaactcctgagctcagacaatccacctgcctcggcctcccaaagtgctaggattacaggcgtgagccaccatgcccgacctcatccttgttttacacagagaacatggaggcacagaagagttccataaattgccaccaaggccttctgctagtatgcagcagagtcaagattcaaacgcaggctgtccggtcctggggttcagcctctccagtgctctgctaggtgttggagagggtcaaggagatacagagaatgagtaccacctgacaggctgggacagtcagggatggcttcctggaggaggtgacacctcaatggagccttgaaggaagagcaggaggagccgaccaggcaatgaatagaataagtatacccaggaagagggaaaggcctgagtgatgctgggagggtggagagctggcctggcttggggtgtgtgccggcgggcaggagatgaggaccaagggatggccaaggccagatctagaagagcctgggccatcccatagtcaatacctcatcgcaaggcccggcaggccttccactgctctgtgtgtaccccatgggacgccaggagcctgggccgcagccacccacctgggctcctgagacccaatgcacaggcatgggggcgggagtgggtgtggctgatttacatccaacaggttgaggggaaaacccaggaagtgcagcccaagcactaatcaaatctaagactagtaataagcatcctgagtaatgagtggcctgggccggagcaggcgaggtggccggagccgtgtggaccaggaggagcgctgtgagtagccgggcaggagggcaggagggcaggtgggaggtgtgaggagggttgggcctgagtgccgtgggggttgcaaggtccagcaggtgcaaagcccacagcagatccacacactggggcagt

SEQ ID NO: 17389 - DNA, 2300 bp, Homo sapien
caaggaaagaatcaagggtcatccccagatttctgtttgagcaatttagtacagtaaggggtggtgtcatttagtgaaatgggaaagactggggaaggaagcggtttgggatgtcttacatttagtaggtaatttattctctctgagctacattttcctcatctctgggtggggccatacttgtactcacctcatagctttattaggatgattaaatgttagctcctgttattatacacatttaagtcaatggttctggcaggcagctggaagcaggatcttaccattctcacccctgggctcctgtatccttggccagtttgaatccagagctgaagcaaccaggccagcccagccattagggatcccagagctggtttagttcctgtaccagagacaactcctcatttatctgcaaaaagggaaaaatagataagccttcaatagtaatgggagattaacctcaaatcctgcaacatagaaggtcttaagtggggccaggtgcaggggctcagtaatcccagcactttgggatgccaaggccatagatcacttgaggtcaagagtttgagaccagcctggccaacagggtgaaaccccatctctactaaaaatacaaaaaaaaattggttggacattatgtcaggtacctataatcccagctactcaggaggctgaggcaggagaatcgctggaacccaggagcagaggttgcagtccacgccactgcactccagaacgggtgacagaaggagactccatctcaaaaagaaaaaaaaaggaaaaaaaatacgatcttaagtgggtttttgttttttacccaaaacgtttaaattctgcctctgcaacctgcaacctgagaattgctaatctgccttattccatctgaatatattgttttggtttgctaaaaccaggaggttcaccttcatcctcctccctgaaggaaatttttctgtgagacaggctgcaccagacattgctttttgtttttgtcaagcgggacactgacctgatccaattccattcattgcagacatttctggaggggcttcgctgtgccagactttgaaatagctgtgattacatgtgggggagcccgagatgatatttcattagctcagtaactgtttccaccttgttccccacccccaccacactggccttcatttcttctccactagtgtactaagtccactctctcctaagtgcactgactgctgggcagcccctcacccgggttgctgcaagctggcttctcctccgcagagaggctgcctgactcccccgacccaggtccccagccccagctctcctggtcctgtcccctgactgtcccagttcagaccagtatctgctgcccactcctttgcctacttctttgttatgccctcagcagctccacctgtgagctccaccagtgcttgagctttgacttaagccctgctgcatccccgcacccctgcacgttgtaggtgcttaataaatgtttatggactgagtgagtggacattctgtttctgggcctgtcttctgctctgagagggtagggagtccctgggcagaaagaagaacaacagggtcagcgggaagttgggctgccattcagggcctgaagaaagttggtaacagcctcagctgttcattgcccactagaaagagcctgggctttggggtcaggtatttgtgggagcacatctcagctccccacatcccagactggatgcaaaaagctcagtctctctgggctttgactctctcgtctgtgagaagggggtcgtggcagcatttgccttattctgaggatagagtgatttaaaaatcaagttcatatctggcacatagtagatgttcagctaactgtggccacttattgtcagcctaacacctgccgtgcacacacatgcatcatcgtcgtcaccttcaccatgagccgtgcggccttttccagctggggctccccactgctcagagataaaggtttccagaggcgtcagcatgacgctcagccccggcctctttttctctcgttcttgcaccatctgtctgttgagtgcctgccacatgccaggtgcagcctcagatgccggaggcatagtcactttcggatgagggaagcagatagcccaccagcgagcacagggacgtgccaggtcagtccaagcaggagcaagtgctcaggaaataaaccagatgggagtggtagggagtggccagggtggggactctggccagggtatctaggaagtcctctttgaggaggtgctgttggaaccaggactcagtccttcagagagcca

SEQ ID NO: 17390 - DNA, 2300 bp, Homo sapien
cggctaaaacggtgaaaccccgtctctactaaaaatacaaaaaattagccgggcgtagtggcgggcgcctgtagtcccagctactcgggaggctgaggcaggagaatggtgtgaacccgggaggcggagcttgcagtgagccgagatcccgccactgcactccagcctgggcgacagagcgagactccgtctcaaaaaaaaaaaaaaaaaaaaaaaaaaaaaagaatagtacaataaacaccttttgcctagattcaccaattaacattatgctacttaacaagcattatatcatttaatgttcacattaattaattaatgccaattttgtacatgaggtcactgaggcaccaggcaggttaagggacttgcccgaggccacagagctcctgcctggtggagctgggctttcccccttaggctgccaaaggactttgatctgccttcccacagctcccttttgaggaaaagcattttcttacactaagttgaaatccacctccctgggatatttaccagatgatccgtggaaaagtacacagctctggaagcatttgctacttctcctcctaaaacctcctccattccctgagcgacagctgctgtggctgccactaccacatgctccaatgtcacctcctccgtgaaggctgggttagctcacccccctgtttaaagactcaccatgactcccagctgccagtgggatgacatgtgcacgcctgggcttggaatacaaggcctgggtgatagagccctcttccaatccctcttgctccttcttcccctatctccacttccagccacactcaaccctctcactgtccacttaaacttcccctcctccttgaagccacccgaatttttctaaagagcgcatttctcccctctctgggctcctgcaaccttctgcctgagcctttgacagccttttccaggttgtcttttggccaggaggctggacaatggaggacgggagtgacagctcggccccttcctagcagagtgatcctacacaaattactccaggtgtctgacccttcatttcctcaagcacatcatgggggaaagaatgcctagctcagcacctggcagagagtcagccttcgctcatctcccctaatggagctgacagctcttcaagtccgctgacatcttctcttagtcatcccttgaaatactacccgctgttacttctctgctcctcagtctcctcctatgtaaaatggggatgagaaaggagaggttgcgaacctttaatgagcgagcccttggagtatccagcccttcccgacgctaactgactcctacgagggggcctggtacacagtaggtgctaaactaatcctctccgagctgggcttggggaagatgcctccgttgggtgtacagcgtgggcgcgggaaggcgagcctgggagcgagggggttgcagagaggcagcctgaggtcggctccgccttcccccgcatcccccgcccgggccctgcagctgtcagcccggccggcctcggcgccagtccaccaaacctgaacgtcccatgccggcgcccccaccttcccggcctgcacaacttaccttgcgctcggcggccctcggtcccgcccccgactgccattggcccagaggttcctttgttagcgagagcgcgccaaccccattggccggtggggctgccgatcgcgtcgggcgcggccccgccccgtacgccccggcacctccccgcgcccggccgcccgcccgcccgcccgcccgcccgcccccgtagtgcgtgaggcgctccggtcccatttgcagcggccgcggggcgccgagggcagctgcggcggcgcggacgagccgggacggcggcgaccggagcctgagaggcgggccgcagcgggaagcagcgggcccgaggccgcgtccatgggcccgcggcggccgggcggcggcggtgcgggcgggagctgggcgtcgcgcgcgctgtgaggcccgggcggctcaggagcctcggcgcgtgcagcgaaccgcccgccgggaaggaggccgggccgggcctgcggcggggccggcgagggatgcggcgcggccgcgctgagcccctagcccgccgggagcgccaggccggccaggcctgcgccgccgccgccgccgccgtcgccgccgcgccgaccatgtcggcagccaaggagaacccgtgcaggaaattccaggccaacatcttcaacaagagcaagtgtcagaactgcttcaagccccgcgagtcgcatctgctcaacgacgaggacctgacgcaggtgagcgactggggccggccc

SEQ ID NO: 17391 - DNA, 2300 bp, Homo sapien
ccagatacacacagggagttgtccagctccggctttcccatgcaaggcctctgggtggggtctgcttaggatgtgcactcctgggtggggtgtggagaggccgagcgtgtgtgcccaccttgaggtttgctgggcacagctggagttcgtagagagcacagacctctcctcgcctttgcttctgccttcccaggtgggatttccaccacatactccttggccctcctggactatgtctgcagccaacacccactcccctgttgcagcaaagcaagcctctcctgtccttgcagctttcccccgaccccaggcacacagctccacttgcaccattcatggggaaagccagtgctcctggggaccttgaggaccctgcaggcggaagccaagtaaaggggggttcttggttcagcctggaggctgtgtggcctctggcacgtggcctgccctctctgagtcacggtctgcagctaccaaatgaggtagtgtggtggggcctcctagtttggagagcactgaataaaaagcacatcaggaggacccatgaggggtcctgtgtgtgtaagcagcagtcagagaacttgggttttaatttgtgttaccgccctccgaaaggcactggataaatgggactggttgtaccttttccaatgcattctcgccagctgggtgtggctgaggaaggagattgagccagagtgtctgtctagattccccttgttgagctcctcccgtggtctggggagtggggactctgtggctggtaaaatatagcagtgcctcacatttgttgagacctcacaggccagacactgtgctcagtgttctttgtgcagctttttaagttgagctataattcacatatcttaagattcactctcttaaagtatacagtttggtgagttttagcatatttacaatgttgtgcaaccatctccactgtctaattctagaatattttagtcacccacgaaagaaaccccatacctgttagctgtctctccttatttcctttcctccagtccctggcgaccactaatctgctttctgtgctgtggatttgcctattctggaccatttgcataagtggaattctgtaatatgtgggcttttgtgcctggcttctttgacttagcatcatgttttcggggttcctcggtgttgtggtgtatgttagtgcttcattcctttttctggctgaataatgttcccttgtgtggacccatcacactttgttcatctattcatctgtccatggatatttgggctgttaccaccttttggcaggtgtgaataatactgctatgaacattcatgtgcaggtatttatttgagcccctgttttccgttttcttgggtgtgtatacataggggtgaaattgctgggccctagggtaactctgcctttaactttctgaggaactgccagacttttccaaggtggcagcaccgttttacatccctgtgctgggttttactgattgcattatctcatcagtcctcacatcagagtcatgaggtttaggtagaattgtcatcactctcacttttcaaatgggagagtttgaactcaaagagtttctgcacgcagtcacacagccagtcagttgatgattctttggccagagctggctttgatcacgaaagcagtctcttctccaggccctgttttgtatcttcaggatgaagctttttgactgtgttgttcatgtcctatttcctggcgcctggcacacactgacactcacatatttgttgaataacatgtcattttttcctgatcttggtggcttgatcagtaacttgcaggagacagcatgtcttaggggatcctgtactctccaggttctcacactcctgccagggcctgtatgctctccaccccggatgctgcagaatccccgccagcctctgactctcaagcagctgcagacgcaccgcagtggaaataggtgtcatgacctctgcagagcagaggcaacatctgtttccagcgagtgcttgctgttaacttgacctgttctctcttctgggttgaaggctgctggtgacctgccctcttttttctcctctaggcaaaacccatttatggcggttggctgctcctggctccagatgggaccgactttgacaacccagtgcaccggtctcgggtaagggcatcagagccaactctcagggaggaaccagagaagggacccatctaagggtgaactggcagagtggaagagggagatggagagttgaacagtggatcctgggatagcaggaccagcagggctcccccatttggtgcactt

SEQ ID NO: 17392 - DNA, 2300 bp, Homo sapien
accccaggcacacagctccacttgcaccattcatggggaaagccagtgctcctggggaccttgaggaccctgcaggcggaagccaagtaaaggggggttcttggttcagcctggaggctgtgtggcctctggcacgtggcctgccctctctgagtcacggtctgcagctaccaaatgaggtagtgtggtggggcctcctagtttggagagcactgaataaaaagcacatcaggaggacccatgaggggtcctgtgtgtgtaagcagcagtcagagaacttgggttttaatttgtgttaccgccctccgaaaggcactggataaatgggactggttgtaccttttccaatgcattctcgccagctgggtgtggctgaggaaggagattgagccagagtgtctgtctagattccccttgttgagctcctcccgtggtctggggagtggggactctgtggctggtaaaatatagcagtgcctcacatttgttgagacctcacaggccagacactgtgctcagtgttctttgtgcagctttttaagttgagctataattcacatatcttaagattcactctcttaaagtatacagtttggtgagttttagcatatttacaatgttgtgcaaccatctccactgtctaattctagaatattttagtcacccacgaaagaaaccccatacctgttagctgtctctccttatttcctttcctccagtccctggcgaccactaatctgctttctgtgctgtggatttgcctattctggaccatttgcataagtggaattctgtaatatgtgggcttttgtgcctggcttctttgacttagcatcatgttttcggggttcctcggtgttgtggtgtatgttagtgcttcattcctttttctggctgaataatgttcccttgtgtggacccatcacactttgttcatctattcatctgtccatggatatttgggctgttaccaccttttggcaggtgtgaataatactgctatgaacattcatgtgcaggtatttatttgagcccctgttttccgttttcttgggtgtgtatacataggggtgaaattgctgggccctagggtaactctgcctttaactttctgaggaactgccagacttttccaaggtggcagcaccgttttacatccctgtgctgggttttactgattgcattatctcatcagtcctcacatcagagtcatgaggtttaggtagaattgtcatcactctcacttttcaaatgggagagtttgaactcaaagagtttctgcacgcagtcacacagccagtcagttgatgattctttggccagagctggctttgatcacgaaagcagtctcttctccaggccctgttttgtatcttcaggatgaagctttttgactgtgttgttcatgtcctatttcctggcgcctggcacacactgacactcacatatttgttgaataacatgtcattttttcctgatcttggtggcttgatcagtaacttgcaggagacagcatgtcttaggggatcctgtactctccaggttctcacactcctgccagggcctgtatgctctccaccccggatgctgcagaatccccgccagcctctgactctcaagcagctgcagacgcaccgcagtggaaataggtgtcatgacctctgcagagcagaggcaacatctgtttccagcgagtgcttgctgttaacttgacctgttctctcttctgggttgaaggctgctggtgacctgccctcttttttctcctctaggcaaaacccatttatggcggttggctgctcctggctccagatgggaccgactttgacaacccagtgcaccggtctcgggtaagggcatcagagccaactctcagggaggaaccagagaagggacccatctaagggtgaactggcagagtggaagagggagatggagagttgaacagtggatcctgggatagcaggaccagcagggctcccccatttggtgcacttgtacgttgtacagaaaaggtctcaattatacatagttgtgtgtagtgctcccttcagaatgaggagctctcatgtgggtgttgcctgttttgtgggtcaggttgactctaggaacagtaaaatggaagaggcaaaagagcagttaaaggtttgcattataccgagcagctcccaattccttccatgccaaggcctgcccctgtagcacctcccttcttcctgagccaggggttcagcacactagcactagtgaagggttgggggcccagaggccttggcttacctcttactaaaatgtgcatt

SEQ ID NO: 17393 - DNA, 2300 bp, Homo sapien
ggccacatgagacacctgctgtcctgactcctcccgagtcctaggcttgctggagccagcccaggagagctcagcagctccacgtagtcagcagagcacctgcggtgcagccttctcccctcccctccaggttccatcctgcaaggccattagtcattgctgactgatggaacctgggccagtctgcaggggcctggggtacctggcagggttctgcacctccagcatgctccacaccttggtgaagttttaagtgcagccttctgcaggcacagtccctcagagtggtcagaagaagtggcagctgccatggcagactggaaaggcaaacctctttaatcccatagggcttgtgaacatcccaggttgtatgagcgaggccctctcctgggacctctgctcccagccagccttgatgagaagtgtgaccagggaggagaggggctcaggaccctcagaaggcctgcctgtctgctggctttgcagatagtcacagcctcctttcttgttttggggccgtggaggaatgacccacaggacctgtggcttggatctctggcattgcaggtgtttattcattctctcagcaaatcgagcatcactggctgtgggctgagctgggctgagggtggcccctcagctctgttgctgtggttccgtgcattaagcctggcctctgccgccaccacctgtcaacagcacacccatcctgaggctgtctcagaagccagtgattgtgactgacccttcctttgtctgtttgtccctccttccctcctttcttcattttctccttccctctcttcctgtcctcctcccctccctccctcctccccatgctcttcctctcttcgctcctctatcccttttccccctcccctcctctcctctccacctcaaattaaagaaatacctctgggcacagaagactcgagcccttctcctgccccaggctcagtgtgctgctgggtgctgcacccgtgtgatctctagcaggatacagcagtacagacccccccatccccaaccctgggcccaggctgccagcaggcccagcgtggaccctggtgctgaaagaagacctggagcggtgtcttctgaggctccttccactctggagaggacactagggctgcccttgcacaaccaggcccagggctggagctggggcttcagaggcaggacctacactgccctccgctcctcccacccccgtcgtctagcccccacaggactgacaggcagctctggcaaggcaactgctgttggttcctttgtctgttgtaaaattctatatggtggaagtagttgtgccatgatctgatctagctcctgatttcagaaatgagaagattgaagctcctaaggggccaggagccacccaagattgtgctgggatagtggcagaaccagatccagagtcgtcctgctggcagcgcctgcttttgctgtgttcccttgctgcacccctggtgtctatccagagtgaacttgccacacacaatccctgatgggtccctgggcagctctgcccagccttcctcaaagccagggtgcccagcaccctccctctgcagggactgtgggagttcagcaaccccccacaccctagtccctcaagagtacccattgtgggaacttgaccagcacagctcctagattctggcctcagggccagcacctgcctctgttgccctaaatgggcacagctcgtctgtactctcaccaagcccactctgggagagcagtgttagggcaattccaggccctggagacagggtcagtaatggaagttacacatcctatgctctgaggccatggccaggccaggcctctctgccagcacggagtctgtgtcgtgtcctgagcctgctgtgggtgtggcagggtcattgtccaggcttgctctgtggcacttctggccccagcgtagcagtctgtcactggggacaatgccctgctctactcctggaccacccggcaagggccagggctcctagtccccgagtgccagggtcttacctggtacttgtctccttttctcttcccaggtggctggagatgctcatggtctatccccggaccaacaagcagaatcagaagaagaaacggaaagtggagccccccacaccacaggtaggcagtgggtttgccagatggcatcccctcagtggagccagggcttgggaagaagtgagggctccctgaggttagagggtgaggacacagtcaggccagggctgaggcagtcaccaactctgcacatccttgctttgggctgcaatctgcaagatcctcac

SEQ ID NO: 17394 - DNA, 2300 bp, Homo sapien
acccccactccaagttagaattcttccttcccgttggttgccatgctccgtgttcctgctagggaagtggggagccttctgaaactgctgcagagagaggccctgcttggcaagcaaggctctagagcaacttgtgctttggggaagcgctgctgccggggtgggcagttagggtggttctgccctgggtcttcttcccagggcagcacagctgctggtttcccatgggtaagcagcccaggatgctgtgcttggtgcagggacaggtcgtcctggggcggcatccccttgggtcattggagcccttgggaaacttgtcaggagaaaccttcactgtttgcttccgagaagctggcttcttctgaggggagccttcagcctgggagtctgtctgctggcagccctaagctgagtaggtggtcaggtgtgcgtcctgggtctgtgggaagagcctccctgcttttatcctgtccgtgaggcctggaatccttgcaaaagtgccaacagctttggacccagagccccacccaaggcagtgccccaccaccccatggccttcctgcttctggagcacgtggtggaaacactcagacccccatgctgcccctcactggctgtgtgcgtgtgggcctgctgcctcttctgtcagcgcctgcggcctcccttgggaggtgggtgggtgagactggatgtatggatcccagccaggctattgataaatagtctggtggtgatgctgcatctgcaagtgtgcgcacatacatgcatataaagaacctgtgtcatctgcaagcctctccaagggcccaagccagagagagactaaggtggttttctaaaaatgaggcttggccatcaggatgggagtgggaagtgggcacttgtatatcatgctcttgtcttttgcgagagagctgagatgtgcttcacttttggagaggggccaaagccatcctgttggcagccctctgggcagggttgttggggcccaggatgtgacctggcactgcggagcagctgaggatcacagccctgctgttgcctggattctgtgtttgcagagtcaagttagggttctctgcccagggactgcctctgcatctgcctaaatgcctgccccacaaacacttctccctcggagctaccacttccagaaccatggagagattggggattgacaccttttccatctgggctactggcttgtatctagctttgtgtgtgagcttgtgagtgtgagagagcaagcatgtgcacatgaatgtgtatatgcatttgtgagtgtgtgcctgtgtgcagattcaagtggggtatttggtgtctttgtgtgttctgtctgctataataaaataccacaggctagtcagcttataaataatagaaatttttctcacagcaggctggttagtccaagattaaagtgctagtattttgggtgtctggtgagggcccccttgctggtcctcacatgttagaaggggcaaggcagctctctgaggcctcttctatgaaggcactaatcctgtacatgagggctccactctcatgacctaatcacctcctaaaggccccacctcctgataccatcaccttgggggttaggatttcaacacatgagttgtggggagacacagacattgaaaccatagcatttaatttgcatctgacgactctttccttcacatagcgtctgggcactccattttagcttcttaggggcaaaaagcagagggtgggtaaggccacagggctggcccagacttgggcgctgtgaacttgttcttgcattcactgtaaggagctacagatgatgctggacctgtctcgagggtgtgttctctttccttactctgttctgtctcaccttatttgagtcttggatgtctaggaatgacagactccaaagcaactactgtggtctcactgttttggggcagtatctgaagattccaggcccctgacattgtgtagctggcccgggtgccccctatagctaggcagccaggacctgtgacccaacctgagctgtgtgctcctgcaccttcacagacaccactttctcctcctccaggagcctgggcctgccaaggtggctgttaccagcagcagcagcagcagcagcagcagcagcagcatccccagtgctgagaaagtccccaccaccaagtccacactctggcaggaagaaatgaggaccaaggaccagccagatggcagcagcctgagtccagctcagagtcccagccagagccagcctcctgctgccagctccctgcgggaacctgggctagagagcaaag

SEQ ID NO: 17395 - DNA, 2300 bp, Homo sapien
tcactccttggaataatacaaacagacatcaaagctagcttctgctcagatggctgtagaaaagagagcacctcggaccagagataaggtgacccatgtctctgtggggccagccaggtgggctgtagatggcagtgctgtctcaggctgttcctcagggcccaggtgtgtctgggcggcacaggtggaggaaggacaagagcgctgtgcctgggcgctgcccccctgtctgccatcctgcttcttgtgggggaatacaggtcaagcctattcctggtggagaaatggcctgagggtctcagcggggctgcagctgctgcttcctcaacaccgcacgtctctgtttcccaggcttcctgtggcttctgcaagaacttttgaatcaattctcctttcagccttccctgcagatgtttcccttcaaataaaatgttctgtgactcttcatctgggcttgttttctgcctcccagataggccctgtgcagtgggccctgtacaggccggagcccacactgctcacagggcaatgagaccataccttctctcctgccagcctgccaagcccagcatctccttcctcaaggtcgcgtgtgcctacagaaggctggttgcaggcagcacccaccagggtgagggggctgcacaggcttgtctggcaggtggagaaacccctttcctggtacccgcctcatctggacagaaatactggccccatcagacactcatgacactagaagagtttcctctgagctgttcttttttctccctttctcagcccgacctgctgaatttcaagaaaggctggctgactaagcagtatgaggacggccaggtgagtgtgcagggttgccgtggcccctgagggatctggggacagggtgagggtgagctgtccttgtccccagccagtctgcaagtgctggctccatgccttcctcctccatgccccttgtcttcatgaccagggctgtggctgagactcccatctgctcctagaagtgcaggcacacagccttcatttctgcagtggggggtgctctggaggggcactcggtaggcctgtctgctgatggcaagcgggtgttggcccggccttagggatgccttgtaacactagcccccacctggtgatctttcctaaaagttgtttaggggcctggcttccccagggacaaagaaactctctggctgtgggattggcttgtgtttccatgcaagccagccaagtagacagtagcctagcactgcaagactctcatgccagagacccctcagctgcagtggcagtgttagccctggaaggagcaaacatggtacattcttgccatcagactcaagcaggaagagccatctgaggctggacctgccagcccaccttgaccctgtgccatgggctggaaggccaggcctcccaaggaggcatgaagaaaagcctgctgggtccttacctaagaggccctgatgcctagcccatcctcactcccttcctgcttcctgagctgctatcccaagacatcctctttatttctcctccatatcaaatgcccttggcctggcatgaagactcaagttcccttccttactgctcacagtgaagacttggtctctagctggttagttacccctgctggttaggaggccacatggccatggcttgcgggctgccacctgcaggtggagatgccatttcacagccacctttccgttctgatgggcccagcctgttgtctgcagcctctgtagttactgaggaccgcacggcctggccaccagccacaccattggtcatagagcccacagccaaggcctgctcagctgtctgtgctgcctcttcactggagggtcacagcttagtgagcgtcctgagggtgtgagcgcatggctgcctgcagtccgagcagagtcctctgtatgctgtcaagggaggggccagcctgtcccctgctttccctgtgctctgggagggccccacaggctctggctgcgcaccgccgtggcgtggcaggcatgctgtataggagttggtagtcgagtcatttttcttttcttcccctttagtggaagaaacactggtttgtcctcgccgatcaaagcctgagatactacagggattcagtggctgaggaggtgagtgtctgggctttgcctctgctgtggagacagctggaggggtccaggcggcatctggggctagtagatctgcttccccctgggctaatgtccccacttctgaggacagcgcccttcggtggtgttaccttgccgaaggtatgtccatgttgccctcttgggtttccc

SEQ ID NO: 17396 - DNA, 2300 bp, Homo sapien
actttgcctctcactcgattgctgcctggacaggtgacccttgctccaggtggtgacggcaaccatttcctcttttccttggttctctctctaaagactcctttccttttggccctaattgaaacacatgtgctccctggagctcctccttgggccctcactgtcctcaggtgggcttgcaactgccttctgagggcctgggtgagattaggggcccctcagtcagcctcggaccagctggcagtctgtggggcctatctctagagtctacaaacctttgcctcaaacactcccagcctccttgacaaattgccatcagcaatgtccctgtccctgccctactgcagacgaggcctccccaggaatctctgcttctagcagatggggactagacatggattcctcaggcagacctggcttcactccacttactgcagggcaggtagcagcaccatgagcacgacctgcgcagctcatgtcccgttgctggctgccgcttgcctgctcaaggtggcaggtaacccagtgtccttctccccttctgccttcctctccaagcctctggctactgcatggtgtgaactcgtggccacctgggcctcctgtttccctcacccttaggaggtcccagtctttcatactgatccatctgtcatgccagcagctggattgggcttttaaaacatagattcaggctgggcacagtagctcacgcctgtaatcccagcactttgggaggcaggcggatcacctgaggtcaggagtttgagaccagcctggccaacatggagaaaccccgtttctactaaaaatacaaaattagccaggcatggtagcgcatgccggtaatcccagctacttgggaggctgaggcaggagaatcgcttgaacccagcaggcagaggttgtggtgagccgagatcgcgccattgcactccagcctgggtaacaagagtgaaactccatctcaaaaaaaaaaaaaacaaaacatagatctgatcacgttacctgcttattaaaaggtaagcccttctagaaagtgctagttttccctcattctgtcaccactgtccagtccaggggtgcacagggcccaggcctcacctggcaggtacggtggctgtgcccaggtgcagcctaatgtagttcttggccctgagcaaggcagggctggcccgtcctgcctctgaggctgtgggagtcctgggactcccctggctccataccctggcaacgggaccaccacagtgagcccctcacagcctcttcagtcaagggacccccccagtgtcattatgtgggaaacctcagctttctgaggctcttttcccttcctttccccttcccctccccgtccccctccccctcccccactcagaaccagtttgggaagggatgtggggtaaaggcagagtattcctgtcctccctgcacttaggaagctgggattaggatagaaaaaggatgtggtgctcacaggggctgggttgtggctcagcattgccagcttctgcctggcaggccacaccagagccgcccctgacaggctatgtccatcctcctgccccacagctcgttgccagaggaaaaaaacaagagcagctgctcttttgagacctgcccgaggcctactgagaagcaagaggcagagctgggggagccggaccctgagcagaagaggagccgcgcacgggagcggaggcgagagggccgctccaagacctttgactgggctgagttccgtcccatccagcaggccctggctcaggagcgggtgggcggcgtggggcctgctgacacccacgagcccctgcgccctgaggcggagcctggggagctggagcgggagcgtgcacggaggcgggaggagcgccgcaagcgcttcgggatgctcgacgccacagacgggccaggcactgaggatgcagccctgcgcatggaggtggaccggagcccagggctgcctatgagcgacctcaaaacgcataacgtccacgtggagattgagcagcggtggcatcaggtggagaccacacctctccgggaagagaagcaggtgcccatcgcccccgtccacctgtcttctgaagatgggggtgaccggctctccacacacgagctgacctctctgctcgagaaggaggtaatagcctgggaccagatccccaccctgctcccagcagcctttccagagcatcagctgtgcccagctgtggcctgaggggttcatctagacagtcctacccgcgagggacttgcagacccctaggggagacagacgcatagatgagtcctcatag

SEQ ID NO: 17397 - DNA, 2300 bp, Homo sapien
cctggtgaacagggcctccctgtgggcctccctgccaaggtcatttgcgcttgccctccaggtttgaggagcatctttttaattcttgattgggcctcatcctataagaactggcttcaaatcaggtagtaaagataaaagttcagcatcccaaattcgaaaatctgaaatgctccaaaatccaaaactgaacgctgacattatgctgaaaggaaatgctcactggagcatttcagattttggatttttggattggggatgctcacccagtaagtagaatgcaaatattttaaaatccgaaacagttcttgtcccaagtattttggataagggatactcaacttgtactaagcagcggactttgcacattgctaacctaggaacctacctctgtctaacttgcataattgcatgagcctacactgaagcccctgttggtcagcactgggcaaagctggtctttaataccttttccctaagtctaataacctgtgacttctcaccaccctttatgctttggaaatgcttttaatcacgactcagaatgagcagggggtctgtggggttaagggtcaggagccagctactggggtgggtgctatactaactgctgggaggagcttgcatgatttggacattgagtgtgaagtgtaacttgaacttaacataactgagtgtcacatctgtggcttccccggccagcagaccgagagggagccataggcaggccagattcttaggctgggctcggctcactcttgtttgtgttgtttttccctatattaatgagttctgtctctgcatgcctttcagtgtggggagttttgtttcatttacgttgtgttttgtttttgcatgcttcactttttcttattttgaactccacaaaggtttgtttgttttgttgattattgtatcttactccatggttcccgttcccccctcgttttgacttcttacaggtagagattagttcttcctgttactctagaggactgactacactttccacaggaaaatgtttggatgtcaccttgctgacatctcccgagtgttaccttccttccttctcctcctgtcttagaaggaagtggcatcatttacctacaccttgtgtcctgcgcttgtttaggatttgttgtcaagactgcgtactttttgttttgtgaaacaaacagctgcaggtgctgtgctcctcccgcctgtccctcttcctggcgctctcttgtcctttagtctttgttttgcttcttagtgtgttccattattcagttttgtttggtttatttctcctagaagctgtttggttaaagctgttttctgatgttattgtccatgttttctgtttacctggaagcagctacttactaaaaaaaaaaaaaaagaaaatttgttggatttttttaatgggaaaaaaaaataaagttgtacaaaggataaaagccaaagccatcaaggagctttctgtggttgttcctggccagaggtgtgacactcagaactgggaggcccgagtgttactaaccagtatttaatcggtttttttaagactgaagtggccgcctccccatcgggtgcctggcagaggctccatagagtcaaccaagaccttcaaagtgagcttgaagcccagtgccagcgccaggagctgattacacaccagattcagaccctgaagcgtagctatggggaggccaaggacacgatccggcaccacgaggctgagatccggagccttcaggcacggctcagcaatgcggccgctgagctagccatcaaggagcaggcgctggccaagctcaagggcgacctgaagcgggagcagggccgggtccgcgagcagctggaggagcggcaacacagcgaggcggcgctgagcagccagctgagggctagcgagcagaagctcaagagtgctgaggccctgctgctggagaagacgcaggagctacggggcctggagacacagcaggcgctgcagcgggaccggcagaaggaggtccagaggctgcaggagcgcattgccgacctcagccagcaactgggcgccagtgagcaggcgcagcggctgatggaggagaagctgcagagaaactatgagctgctgctggagagctgtgagaaggagaagcaggcattgctgcagaacctaaaggaagtggaagacaaggccagcgcctatgaggaccagctgcagggtcaggcacagcaggtggagaccctgcagaaggagaagctgagcgccactttcgagggcagtgagcaggtgcaccagctggaggagcagctggaggcacgag

SEQ ID NO: 17398 - DNA, 2300 bp, Homo sapien
ttgttttgttgattattgtatcttactccatggttcccgttcccccctcgttttgacttcttacaggtagagattagttcttcctgttactctagaggactgactacactttccacaggaaaatgtttggatgtcaccttgctgacatctcccgagtgttaccttccttccttctcctcctgtcttagaaggaagtggcatcatttacctacaccttgtgtcctgcgcttgtttaggatttgttgtcaagactgcgtactttttgttttgtgaaacaaacagctgcaggtgctgtgctcctcccgcctgtccctcttcctggcgctctcttgtcctttagtctttgttttgcttcttagtgtgttccattattcagttttgtttggtttatttctcctagaagctgtttggttaaagctgttttctgatgttattgtccatgttttctgtttacctggaagcagctacttactaaaaaaaaaaaaaaagaaaatttgttggatttttttaatgggaaaaaaaaataaagttgtacaaaggataaaagccaaagccatcaaggagctttctgtggttgttcctggccagaggtgtgacactcagaactgggaggcccgagtgttactaaccagtatttaatcggtttttttaagactgaagtggccgcctccccatcgggtgcctggcagaggctccatagagtcaaccaagaccttcaaagtgagcttgaagcccagtgccagcgccaggagctgattacacaccagattcagaccctgaagcgtagctatggggaggccaaggacacgatccggcaccacgaggctgagatccggagccttcaggcacggctcagcaatgcggccgctgagctagccatcaaggagcaggcgctggccaagctcaagggcgacctgaagcgggagcagggccgggtccgcgagcagctggaggagcggcaacacagcgaggcggcgctgagcagccagctgagggctagcgagcagaagctcaagagtgctgaggccctgctgctggagaagacgcaggagctacggggcctggagacacagcaggcgctgcagcgggaccggcagaaggaggtccagaggctgcaggagcgcattgccgacctcagccagcaactgggcgccagtgagcaggcgcagcggctgatggaggagaagctgcagagaaactatgagctgctgctggagagctgtgagaaggagaagcaggcattgctgcagaacctaaaggaagtggaagacaaggccagcgcctatgaggaccagctgcagggtcaggcacagcaggtggagaccctgcagaaggagaagctgagcgccactttcgagggcagtgagcaggtgcaccagctggaggagcagctggaggcacgagaggccagcgtgcgcaggctcgcagagcacgtgcagagcctctgtgacgagcgggacctcctcagacagcggttccaggagctgacagagcgcgtggccacgtccgacgaggatgtggctgagctccgggaaaagctgaggagaagagaggctgacaaccagagcctggagcactcctaccagagggtctccagccagctgcagagcatgcacactctgctgagagagaaggaggaagagctggagcgcattaaggaagcacatgagaaggttctggagaagaaggagcaggacctcaatgaggctttggttaaaatggttgccttggggagcagcttagaggaaacagaaattaagctccaggcaaaagaagagattttaaggaaatttgcaagtgaatctccaaaggacatggaagagccacggagtacccctgaagagacagaaagggatggcactttgctcccaggccaaccagtccaagccactagggcacctctaggcctcccacacacaaggctcgaggatgaggacgaggacctgggggctcctccgggggaagagtacggtgatggcagccccagtagggaagacagcatggtgcccccaaagtcagtggaagtgcttgacagggagggccatcagcagggcacagccaaactcgaccaaggggcacctggtgttaaaaggcaaagaatccggttctccacaatccagtgccaaagatacattcaccccgaagggtctgagaagacctggaccagcagcacatcttccgacaccagccaggaccggtcaccctcggaagaaagcatgtcctcagagcctgcacccagtgtactgcctgcaactggcgactctgacacgtacctctccatcatccactccctggagacc

SEQ ID NO: 17399 - DNA, 2300 bp, Homo sapien
caccaccagtgggcgggcaccgaggcccagctgcgtgagcagctccgcgccagcctgctccaggttggcgcactggcctcccagctggagcaggagaggcaggagagggccaggagggttgaagggcatgttggagagcttggggacttccaggtcaagaatagtcaggccctgatgtgcctggaaaattgccgagaacaactgagatctctgcctagggccagccaggaggatgagcaggacgcacgcgcagcctccctggccagtgtggagagtgcactcgtcagcgccatccaagccctgcagcactggccggccccagcccatggcggggcccgtgcacagctggagacaggtggcaccgaggagaatgggaagcctgcctccctgcagcagtgctcccagtctgagttgacagagcaggagcaggtgaggcttctttctgaccagattgctctggaggcctcgctgatcagccagatagcagattccctgaagaacacaacatcagatgtctcccgaatgctccatgagatttcttggtcaggacagccaccgatggaatctgctggggcccccgtagacacctgggccaggaaggtcctagtggatggtgagttctggagccaggttgagtctctgaggaagcacttggggacactgggaggagaggcagtcggtgcctcaggagacgggcagcaaagcatcccacagggcctggcccccatcctggccaatgccacatgggtcagggcagagctcagctttgccacacagtcagtgagggagtcgttccaccgcaggctacagagcatccaggagaccctgcggggcacccagacggccctgcggcagcacaaatgcctgctgagggaaatcctgggagcctaccaaaccccagactttgaaagagtgatgcagcaggtcttggaagccctcaggcttccagcgggccatgaagatggtgttcagctgtcctgggacctgagccccttaggagaagtcctgggccgagactcagacagctctcaggagcccttcgatgtgtctgaccagagccctggggcctttgttgctattcaggaggagcttgcccagcagctgaaggagaaggccagcctcttagaggagatagcggctgccttaccatctctgccacctgtggaatcgctgagagattgccagaagcttctccaggtgtcccagagtctctcgtataacacttgtttgggaggcctcggtcagtattcttcattgttggttcaggatgccattattcaggcccaggtttgctatgcgtcctgcagaatccggctagaatatgagaaggagctccagctctgcaaggagtcctggcaaacccgggagccctcctgctcagagcaggcacaggcagcccgggccctgagggaggagtatgaggagcttctccgcaagcagaagagcgagtacctggatgtgatcgccattgttgaaagggagaatgcagagctcaaggccaaggccgcccagctagaccatcagcagcagtgtctggaggatgcagagagcaagcacagcatgagcatgttcaccctgcggggcaggtatgaggaggagattcggtgtgtggtggagcagctgaccaggaccgagagcacactgcaggctgagcgcagccgggtcctgagccagctggatgcctcggtcagagacaggcaggacatggagaggcatcatggtgagcagatacagaccctggaggacaggttccagctcaaggtccgggagctgcagacgatccacgaggaggagctgaggaccctgcaggagcactactcgcagagcctgaggtgccttcaggacaccctctgcctccaccaggggccacaccccaaggccctgccagcccctgcccccaactggcaggccacccagggagaggctgactccatgacggggctgagggagcgcatccaggagctggaggcccagatggatgtcatgcgggaggagctgggacacaaggacctggagggcgacgcggccacactgcgtgagaagtaccagagggacttggagagccttaaggtcttaacgccccattcaatttgcagagcagatcttccttgataatggggtgggtgtggggacgtctggctcagctaccgtgcaggcagaattgaggggatatgctgctgtccctctacttgctagccatggtgtggtctcagcagggcctgggccgcaggcttagcctcttgttcggcatcccccagtgtcctccaccaggaggagaactagcaggagggccgccaggg

SEQ ID NO: 17400 - DNA, 2300 bp, Homo sapien
ttcacttggtagaattgacacagccagaagcccacagattggccaccatgagcctcacggcactcaggctctaccaggagcctttatagcatagccgaagccaggggccctgcctcaggagctggcagcagtcagcagcaccctgtagaggctcacgctgaccttggtcagagcagggtggcccacctggaagcccctcatccctggttcacctgcaggaggacggccctcctggatccagggtggcagaacagcctcaggaagcttgggtttttgggtcttgtgtagagcctggtcctggctgtcagacacagatggcttcaaaagtgggtttactgaaaacaaattctgagtcagaagagagttctagaaatgggggttctgtgtggctgcagactggactctgtcctgactggcatccccagagaagtgctagctgtaggactgtcagactgtgagaaaggaccagggaggggcgtgaggccatctctgtaagggatcccttactctgtatgacccaggctgattaagacaacagactgtgtgggcctgacctgtgcttggctgtgtctggtgtcaaggagggacaccggcctctgagaggccttgtccagaagcaggcagaggagtgagtgctgccctctccccagggaggagctgcagtcggtgcagcgggaactggaggtcctctcggagcagtactcgcagaagtgcctggagaatgcccatctggcccaggcgctggaggccgagcggcaggccctgcggcagtgccagcgtgagaaccaggagctcaatgcccacaaccaggtgagcctgcagccaggtgagcccaaggttagtcaggggcactcaaggtcaggtagacccatagtcaggtgagtccacactggagctggagccaggcctcaccctcaaagtggcatgaaggtccctgaaccacagagtggttacctgccccagggcttctccctgccacccagcgtggccatctgtgttgtcagaaacatcaccgcggatagctagagcaacgctgtactgccacgtgcaccacctgcttacacatgacatcactcttgctttgaccctttctgagactctcgggtgtcttggtgtcttctctgtgctcctctgaacctctggctcactgtttctgggcagggcctggcagggtcatcccaatcctccaggatcctgtcccccagggattgagctgacacttctcagggtcaggcttacggctcacatttatttttgtcagattttttttcttaagatttgcttgctctgtccgggcgcggtggctcacgcctgtaatcccagcgctttgggaggccaagacgggcggatcacaaggtcagggattgagaccatcctggctaacatggtgaaaccccatctctactaaaaatacaaaaaattagctgggtgtggtggtgggcgcctatagtcccatctactgggaaggctgaggcaggagaatggtgtgaactcgggaggcggagcctgggtgacagagcgagactccgtctaaaaaaaaaaaaaaaaagatttgcttgctccttagttaattggggtgcatttaaatcctggctaatggaaaggttcaagccaggattcgttcaatattggcttttctgtgggcaccaaattaaaacagccctctatgaccctgccctgcacaaacaccccctggggctgggaacatagtccctttctcacctgaggccttcccaaggggcatggctgctgcacagggctgtgtatgaggctgctcaggcaggactgggtccactcactgctgctgtggcttaaagattaccccacaggagctcagatgggaccagccatggaacagattgacactagttattgtgacagaaaggaattaagggttatcgattggatcctgcctacgcagttccacagatacacaaagaacctagggaaatggccttcccgggttgtgtcatgcgacttggccccaggcagctctggagtgtcactgttgtgttgctgtcccccaggagctgaacaaccgcctggctgcagagatcacacggttgcggacgctgctgactggggacggcggtggggaggccactgggtcaccccttgcacagggcaaggatgcctatgaactagaggtaccatcaggagccaggccctgcctgactcagctctgcacccaggaaccccaggggagtgcagcatggcccctgtcttacagggttgtgggaggaacagacctgagacagcaggagtcacagggtccaggaagatccaaatcacccgaaggc

SEQ ID NO: 17401 - DNA, 2300 bp, Homo sapien
cttggccccaggcagctctggagtgtcactgttgtgttgctgtcccccaggagctgaacaaccgcctggctgcagagatcacacggttgcggacgctgctgactggggacggcggtggggaggccactgggtcaccccttgcacagggcaaggatgcctatgaactagaggtaccatcaggagccaggccctgcctgactcagctctgcacccaggaaccccaggggagtgcagcatggcccctgtcttacagggttgtgggaggaacagacctgagacagcaggagtcacagggtccaggaagatccaaatcacccgaaggcggcgaggagcagtgagctgccaggtggcatgagagccactagccgagtggagccctcgaggggctgtggggatcctgaccccatctcactccacccactcccctccatttctgctatgccacaaacactgaccactcaaaaggacacgttctgtagccatgtggctgctgcagctcaggtcagggaggctcgctttatgttagaatgatggattctggagtatagggtgtccttttaggaaggcacttagatttctccacattcaattaaaatttcaccctaaaatgtgctaaaatttcagcactcagccagccagagctcacccagctgggctggttctggtggctttgagctttgtctctgtcgtggagccgcctcctggcagtgacactgagaggccaaggctgggagggaccagtgcttggtgtgatcagctcctgccccgagtccaggtgttgggccgctgtctgctgtgcctgtgccttgtactaaatgagtgctttaccaaaagggcgggcaagagaggctgagtgagtctgacacaagtgtcagtggtaacatttcctgattctcgcgggcttggtccccagagacaagcaggtctagttcacagcaccccaggctgaggagggagtccttggcactgggaggaatcacggccatttccttcctcttcctgtttctgtatgtgaggctgaagctgtgagcggtgtttaaacgatgcttgcccgcattgggcaccacgaggctgccctgctcactggtgattggagagccctctgcacgcttcagcctgctgtggagactctggaggtttctttgctcctgaatattggtccctgatctctctgtcattttaggtcttattgcgggtaaaggaatcggaaatacagtacctgaaacaggagattagctccctcaaggatgagctgcagacggcactgcgggtaaggccaccgcaccacaggagggcgggtacgggaacaggctctaggtgacatgcgcctcctgaactcaggctggtgctcagcgcgggctcttctgaagcagattttactcttgtgaggaaggaggtttccaaaatcaagccctcttaaaagaccagcctgcaggcaggtgctgtgggaacgtggacatgagcaacctgcctggcctggctccagcttcagtgtgtatgtgctttttgtgtgccttgggaggaatgttccagagaaaaggcctgtgaagtgaggcaaggcttgacttccatttgagccgccccctggcttccaccagcctcctccagggactcctggagtcaggggagatgacagaatcattggtggtcactcagtcacctagggaatctaggacacagagaggatttccaggctgaagcccacaagggaggggcctgggcactcagggccacaccaggctggtcgggcaatcccggaactgcctcctgcactcaccgggcctggagattatcctgccatgtcctgatggctgtgcccgtgtccttaggccccgtggtttttcctctctgtccactgtctgcctctagaagacagaggtgaacaagcctcctcttccgcccacagcaagcctccctaccgtgttcagtccccaggaagacaggccatgttgtatgtgctcctctttcctggatgtaactaccattctctgtcatttcactcccaaggacaagaagtacgcaagtgacaagtacaaagacatctacacagagctcagcatcgcgaaggctaaggctgactgtgacatcagcaggttgaaggagcagctcaaggctgcaacggaagcactgggggagaagtcccctgacagtgccacggtgtccggatatggtgcgtcctcgggtcatgccctctcggttattgctggggggcttatgggggtttggtcgtagaggtttcccggtgcttgacttgaagcagaagagtcccagtgatgcttgtagacccaggcatcccagtg

SEQ ID NO: 17402 - DNA, 2300 bp, Homo sapien
tgtgccactgcactccagcctggcgacagagcaagactccatctcaaaaaaaaaaaaaaaaagcaaaacaaaaaaccccacacatgcacaggatgtgtgatatgactcagtatctgtttgtgttacaggtacttaagtagacatttctaagaagcctaaaggactgctatctgggtgggtggacaatgagaaggccttggccttatcatcttgctttagacagccctgtgctaccaggaggaaggtagagaatcatggataatgggggtaggggtctgctcagcattgaggtcccacaccagagtgaggggaccaagtccctttgaagggaatgctgttgtgggctacagtcacagtgcaggaagccctggcggggccccacatacacattctcccattgtgctggtgttttatggtggtctgaagagatctagcatgttttatggttattggctttgaattcccttagagttgtttaaggaattgtcctaagtatgctgcagtaggaagcttgggaaatgtttcaggatttagtctggttccagagggttttagaaagcaaaggtaacaggtctgtttgttttcattatataccgcagatataatgaaatctaaaagcaaccctgacttcttgaagaaagacagatcctgtgtcacccggcaactcagaaacatcaggtccaaggtgagtctggggtccagccccctggtgggaggggcttgagggacactggggagagtagcccaaattgaagtatgagtgctcccatgggccacagctgccaaagccccagggcccagcactgagccagcccgagctcaccctgctgggctggttctggtggctttgagctctgtgtctgtcttggagccacctcctggcaatgacactgacaggccagggctgtgaagagcagtgcttggcatgatcagctcctgcctcgaggccaggtttcacccagccctgctcatgtcggcctgctgtcagctgtgcctgtgttgttccttgcacatcactgttgtgacactggtgccgcctccaagagatgatgctgcctgctcttgttccccagccaggaagcagtacatctttagtgtgctgtccagagccagccatgcacaggagggcgggcggaggtgggagcggcaccgcgtgtgtttgggattggttgtgtgtctcatgtctgctctctcctctgacagtccgtaattgagcaggtctcgtgggatacctgaaatgcacccgcttcccggcccatgcaggaggtaaaccgcctctcccaccgcctgcatgcactgctcacacccccatggcaaacgcctgtgtcatggttactttatttcaattcatcctgctccaacaaacacataccaaatccaagtgaggtttctttaacctgctctggggagttaattggcactctaacctcttaacagagatgaccctggcagtgaggtgctcctctagcctggtgggcaggcagagagccaggcacccatcagcatgcatgttggataatctgtgcacaacggctgaactcactccaccccctcaggggacacttgtcttgccctctgtcacgaggtggaatttacagatgtccacactggcaagtgaagtctaccgtcaccaaaggcctcgcccacctagtgagccacttagtggcctctgtctgtcaaggctaacagggtggtcattctaggaatggataaaccaggactagagcttggtgaagatggttcagaagagcgtgataactacaagcaataggggcgaaatatttaccagtatttttttttttaataaaacaaaagcttctcactaggtgccattgaaggccctatgccagagaggaggtgggggagggcccatggtgggagacaccctgagaatgagtagttgccggctcagtagcttgatctcgttcatcccggaatgagaacatggaggaaagcaagaaccacgtcttcctccccatgctggccctttctcaggcacacccacagcaccccgccgtccgaaggacttcatcctgaggcttggttaaagagttgaaggttttaagcctagtcagtttggttttatttttctacagttctaagtcccctatacccaaatatggtttaggcttgattgaaaacttagcttgggcatttttctttaaacataacgttttgtttagcaaaaggaaacttgttcttttttggttcacggttttcttactgaagattctactacttatttgaggctaaactgtagctagtatctttgagcttttcttgaaggagtttgaagttca

SEQ ID NO: 17403 - DNA, 2300 bp, Homo sapien
atcccagggcgactagaggtggcagtatcgcgaatttgcaggtttattgaacaagaggtaacatcggagaggatcttgccttcggattcagcaagtatgaaggcagaagagcatggagagcaaggccccacagcctgcttagtgagttggaaggcccagcaagaacctgtttctgcagcagccaccagctcccatcaccccttgaccctccagctcatgctggagaagagggaattttggctgtttaaagaacacagttgtgaatctcagaatgtgcctgaaaggaatactgacagataaggccggaaacaaaactgatggcttgaaaaacatttttatggaatgtatttactatcattttgttttactatagaggtagatgggactcttaacttttgggtacatggaaacatgctgaaaactgaacacaatcctgatcatcactcctgcctggctgtctcctgggaggctgccgggtgccacggagctgggacacagcagagcccgctaggtgttgcagggccctggaggccaaggccaccctgtgtggggtccctgttggcagccaggtccctacacaaacaagtaatcctgtttggcctcctaggttttgcatatgacctgcagcctaatttggggtgtaggggaagctctgctggcccctgctcctttgtatgttgggtgactttaatggctggccacatacccctttctcccagctactcattcactgacttgggtaagttctaagacagttcgcacttagaaaagaatgtgacacatcaacattaacttttcctgaaaagaagagtttgcctaacatggtcctaaagaagcttggaatttataagactttcctttataagatatagtgggggtttttttgggtggaggggggttgttttttgttttttgttttcaagacagagtctcgctctgttgtccaggctggagtgtagtggcatgatctcggctcactgcaacctctgcctcccaggttcatgccattctcctgcctcagcctcccgagtagctgggactacaggtgtctgccgccacgcctggctaatttttttgtatttttagtagagacggggtttcaccatgttggtcaggatggtctcgatttcctgacctcgtgatccgcctgtctcggcctcccaaagtgctgggattacaggcgtgagccaccacgcctggcctataagatacggtaaaaaaaaaaaactgtgacccctttgtcactaagggagaaagaaattaagtattgtcaaagttctataaagaatggaaatgtatgatattatacttcaaaggaatttgatgttgaaattttaaagaaaatttgtcatgttgatgagaagcttcactttcctgggaacttcattcgttttagggcatgagataaaagtcctggctaggggagccataggtctgttgtacaaggaatttgctttctaaacaagttgtaacttgccctaaggtccctgttggagcactaagaggtgacacaggccagagacaacgtttcgtttccccttccctgcaagctgggatcagccctgtgttttctcctttcagctgaagtgagcgaaggttctcagtgctggcaaaagagcccactttctaaaaggacttgggaagaaagctgctgggaacttgcttattaaaaagttccttagaattaaggtatctacccactgttttcgcacctttcaccttcctgggctttcctgccctccagcattcttctctagagaggttcctagcccgctcagcgcgagcgtctccagtaggtaatagcagctgaacgtgggttttccacggacttcaggcttggaggtgccatatacaagcacacttcttccttcccctggcttctccatgccaccacccactttaaagatgtaaactcagtagatttttcatccagtgaacggtcatcttcacatcgaaaggtgaaggccaccactgttctcaatgccaagcaacagaacgttctgagatggccgttcttccttgcacagcagctacggcaggttgttctgcagccaccccttagagggggctcttcgttttacctttgtacagttcttgtgtttacacatttgggccaaacagctttcagcaagggcatgtgtccacagctgatgggcagttaagaaccagcctgagctgaaggctagtaataccgtgctgtaggctctttaaaaggaaagcctggcataaacccagcatggaaaggaacattatcagttatctcaaattttgtctgccagggacaagaccctgttcattct

SEQ ID NO: 17404 - DNA, 2300 bp, Homo sapien
cacttgaaccccggaggcagaggttgcagtgagccgagatcgcaccactgcacaccagcctgggcgaaagaacgaggctccgtcttaaaaaaaaaaaaaagaattttattgacataatcactgacatacatttttagttatttacaccatacaatttgacatatgtatatacctgtgaaaccaccacagtcaacccgataagcacacatccatcactccacttccttgtggctttgttggcctccaggctacactggtctgctttccctcaatctagtttgcattttctagaattttatgtaaatggaatcatacagtatgtactctttttgtctggcttttcccactcaatattaatgaaattcatccacgtcgtagcacatgtgagtactgtttttttttttttttggtgggggggggatagggtcttgctgtgtcacccaggctggagtgcaatggcatgatcttggctcactgcaaccttagtctccagagctcaagcgattctcccacctcagcctcccgagtagctgggatcacaggcacgtcagcgcactcagctaatttttgtattttttggtagagacagtgtttcaccatgttggccaagctggtttcgaattcccgaactcaagctgtcctcctgcctcagcctcccaaagttctgggataacaggcatgaaccaccgtgccaggccacttcattctattttattgctaaatagcattcccttgtacagatatacaaaagcttatttacctgtttacctgctgacgcctttttgggttgttctaggcacatacgcctgccaggacacgtgcttgtgttaatggatcccgccctttctcctaggagtgggatagctggatcatatggaaggtgcaagtttaatattttaataaacttttaatttagaataatttgctttacagaaaagtttcgaatatagaacagagagatccatttacccccacgcagcttcctttgttaaccttttacattcctttcatacatttgtcaaagctaagaaactgacattggtacaatgcgattaagctccagactttatttggctctcaccagtttttccgtgaatgtcttctttcggttccaggatccagcccagaccaccacattgccccgtttccctatgcccccggcccagtgccctcggctgccttagtctcttcctctgtttatgcttaaagcagggcaggccttccaacaacgccggctggaaaaaacctcttgggctaggaaaaaacctctgggccgacaccgcctccagtatgctgggttccaatgctgcctccagctgtgttgattccctgattatctgtgttcccaggtcattccccagcccagcctagctgctcccgagaagacagtgaaggtgtgaccccacatttccagagcagctctgctgtgctccatgcgaggaaagccggggttgctgtggcttctagcgcggagagcggtctctggcctgggcaggtgacgggtgtgctagggcccgtggcccgcgggtgtgcaggtgctgcctggtggcgcgggcttggggacgtggcttggcacgtggtgggaggtggaacctggagggcgtggccgagcgcctggctggaaggaaaatggggggcacagcctggcgttggggggtggagggtgtctgtggcagggggcgtggcctggcgcgtggagggaggcgtggtcacctgttgagggttgggggcgggctgatgggaggcgtgggttcagcttggtgcgtgacagttgtgggggcatggcgcggcctagcgcgtggccctcgggggctgagggcgtgaccttgcacgtggccgttggtggggcgtgacgggggcgtggcctggcgtgtggccatgggtgctgggcgtggcctggcacgtggcctggcacgtggccgttggcgctgcgtgacgggggcgtggcctggtgcgtggcaattggcaggacgtgatagggcgtggcctggcgcgtggccatggggggctgggcgtggcctggcacatggccgctggcggcgcgtgacgggggcgtggcctggcggtctagggctgggggcgcgcagactccgctgcggcggcgtggctgtgggtcccggattagcggcggcatgggacggttgagttggcaggtggcggccgcggcggctgtgggcctggctctgactctggaggcgctgccttgggtgctgcgctggctgcggtccaggcggcggcggccgcggcgcgaggcgctgttcttcccgtctcaggtgacctgtaccgaggccctgctgcgg

SEQ ID NO: 17405 - DNA, 2300 bp, Homo sapien
cgttgtcctggttctcgctcagctctggtttctttgctgcagtcagacccctggtgtctttgtttcctctggccttcatctcagggatgtctgttaatcccattgagttgcaccaccgaatgtaggcctccagctgtggagatgcagctcaggccaggccaggccaggtcgtgctctggtaacagcctcggatctcagcaccttcaagccatagggcctgtttcttactcatggtgtgtgcattgcaggagagtggggctctgcttgctgtggtcgtcctggcaggcagagcggcagccatatgaaaatgcttcccctaggctgggcgcagtggctcacgcctgtaatcccagcactttgggaggccaaggcgggcagatcacctgaggtcgggagtttgagaccagcttgaccaacatggagaaaccccgtctcttccagaaatacaaaattagctgggcatggtggtgcatgcctgtaatcccagctacttgggaggctgaggcaggagaaacgcttgaacccatgaggcagaggttgtagtgagccgagatcacaccattgcactccagcctgggcgacagagtgagactccatctcaaaaaaaaaaagaaaggaaaaaatgttgctccttctgccctccagaagcacagatggtgctgagggccttgtttgtctcagctcattgaccagagccagtcacgtgtgccttagccaagtagtgcacccagaaggggaggtggagacaggtggggagcagcgcagatggccactcacgagaatccccctgggtgccttgggtcactcattaggaaggggacaggagaagctcaaccgatttctgttctcggatagctcctgatgtagccggggcagagctatgctgttgggaatgattggactggtggcactttgtgtgctctgcatggagagagtatagtgggactgatcctccaggagtcaggtcctggagttggctgtgaacgagtaggggtccgagctgctggcagctttggcttaaagaggccatcccttccctttgcatttcaggtgtttgaggcagagcagtttggatgcccacagcgtgctcagaggatgaacacagccttcacgccattcctacaccagaggaacggcaacgccgcccgctcgctgacatcgctgacaagtgatgacaacctgtgggcgtgcctgcacacctcctttgcctggtaacgggcgtctctgcttttggcatatctgttaggatagagcagtcacgatacattggttggcttgtccatggatttgggagaacagtccttagccgtgtttgcttgctgcctctgtgaggagcactggcctgtgggcacttgtcagtgagcacagatctgggctgggagtccttgttctgtaggcctcttcccctgagtgtgctgaaaacatattgatgtggaactcacttcttcctgggttcaagtgattctcctgccccagcctcccaagtagctgggattacaggcgcctgtcaccacacccagctaatttttttatttttggtagagacggggtttcaccatgttggccaggctgttctcaaactcctgacctcatgtgatccacctgcctcagcctcccagagtgctgggattacaggtgtgagccaccgcgcccagcctttttttttttttttaaagcaaatctgagtcgtatcattccagccataaatataatcacaatactgtgatcatgtccgacaaaacggacagactcctgagtgttctccaggctgcaagcccttgtgcagtttaccttttgtctcacaagtgactgcattggcatcggagcagcgccccaagtctctctggtttagaacagctcccccttgcatcccctcccctccaagttcctcccatccatctattgaaggaccttggtcgttgacttgtggaactgcctgcatgcgggatctggctggttgtgccctgctggtgttcttttatacccattttttctttaaactggtaggatcaggggctgggtgagcgtcaggtttgctttttcctttggcgagaacgctcatagctggtgctgtgttctccaggctcctgaaggcgtgtggcagccggctgaccgagaagctcctggaaggtgctccgaccgaggataccttggtccagatggagaagctcgctggtgaggcaggggtgctgttgccggggccttggcccggatggccgtggggcggtaccagctgtctgctctcctggcaggaatcgctgagggagggaaacgcggctctgaatcagcccagaacgagc

SEQ ID NO: 17406 - DNA, 2300 bp, Homo sapien
tccccagaagagaagaggctttgggtcctggccagtgtccactactcagtcaaacattcagaaacttacatgattcttcatcgtcccaagcaagtctgacttgggccctttattgaaactctgtttcctctcccgctgcctgtctgcctccctctcggagtgcacctactgagcaccagccctccattccctgccagccacacccagaaagcaatggggctttctgggaaggcagaaatattctgtgacctgggctattcagaggggtggcgtgagtcgtgtgtgcctagcaaacactcaggacatggccggtgagacagaagggctgagcttttgtcctagctaatatattaattaattaattcattatttattttgagacggagtctctctgtcgcccaggctggactgcagttgcgcagtcttggctcactgcaaccttcgcctcctaggttcaagcaattctcccgcctcagcctcttgagtagctgggactacaggtgtgcgccaccatgcctggctaattttttttgtacttgtagtagaaatggggttttgccatgttggccaggctggtcttgaactcctgacctcaagtgatctgcccacctcggcctcccaaagtgctgggattacaggcatgaacaaccgcactcagcctatttatttaattttttcgagacgaagtctcactcactctgtcacccaggctggaatgtagtagtacgatctcagctcactgcaacctccacctcccaggttcgagcgattctcctgcctaggcctcccaagtagttgggactacaagcgtgcgccaccactccaggctacttttttttttttttttttgagatggagtctcgccctgtcataaaggctggagtgcagtgacctagtcttggctcactgcaacctccgcctcccaggttcaagtgattctcctccctcagcctcccaagtagctgggtttataggtgaccgccaacacgcccagctaaggtttttgttttattttgttttgtttttgttgtttttggttttttttgagactgagtctcactttgttgcccaggctcgagtgccgtggtgcgatctcggctcactgcaaccttgcctcccaggttcaagtgattctcgtgcctcagcctcctgagtagctgggactaccagcgcacaccaccacacctggctaatctttgtattcttagtagaggcagggtttcactgcgtcggccaggctggtctcaaactcctgacctcaagtgatccacccgcctcagcctcccaaagtgttgggattacaggctcatgggattacaggcatgagccactgtgccggcctctcctagctaatttaaattttaaatttaagttgtcacacatagctgtggccaccgtatggacaatgtgggtctggctgcatgtgtcaggctgtgtcacatgtcaggctgttggctgtggctgtccccactgtgcacctttgcttttgcggtctcgtttccagaacttctctgccagtgagaaccccatgacacacccccattttaaagccttctctggctttcctgcattcgttaggaaggcatactgcctcatgctgccgcggccatccctctgcaatgagtgcttggtgtccctcagactttgtgcctgcagctgcccctggccttcacatggttccgccggcatcgcagctgtactgtggccaagcttggggctttccttgactccatgtccccaccaggtgtcccattgctggctctgccacggaaactctccaaagggctctctctacccactcctgtgagctttttctccaccggaaactgtgttaaggtcacctttgacttcatcattgttctgcaggttaccactcccccttttaaaaagattgtggtgaaataatacatgacctaaaatgcgccatttgaaccactgttcggcgtgcagtgccgtggcatgaagtatgttcacagtgctgtgcggccatcgccaccttccgtctccagaactgagccccgctcttccctcccagtccccggcagctgccattctgctctctgtctctatggctttgaggactctaggtacctcctatttaagtggaatcctacagtgtttatccgtttgtgaccagtgtagatcatttcgtgtaatgtccttcagtttcagccgtgccgtagcttgtggcagggtttccttcctttttaaggccatgtgacattccagtcccaccttgctaaagcagtttacctggtcactggggtgactctggagctcccctctggcctcactgcctg

SEQ ID NO: 17407 - DNA, 2300 bp, Homo sapien
ggacccacactacatcacaaactaatggctttacaattaacttctaagtagctaaatttagtaatgggcgctctagttttaaaaaatattattcaggccgggcgcggtggctcacgcctgtaatcccagcactttgggaggccgaggctggtggatcacctgaggttaggagttcaagaccagcctggccaaaagggtgaaaacccgtctctgcaaaaatacaaaaaattagccaggcgtggtggcggacgcctgtagtccccagctactcgggaggctgaggcaggagaatcgcttgaacccgggaagcggaggttgcagtaaggcgaggtcgcgccactggactccagcctgggcaacaagagcgaaagcgaaactctgtctcaaaaaaagaatattattcaaaaactgattttcacatttttaaaaaagacccactgagggaggaagaccgaatcccacacatgcgcgcgcacagcggttccgagttctgcaaccaacctcccacgggcgccgcgccttctccgcgtcacgtgacggccgtctcccgcaccttccatactctcaatgtagggagaggacgggttccatcagcaatttaataaaaaccattggtgaagcaaaaaaaaaaagcctgccaacctcttataacgttttttctttatttttctcttttatgtggacaggaagccttaggttggctatatttaccctcaaatctctttttaaaatgatttttaagtttcagcatactcccgcgcttaatgaaatggtttcccccagcatccccagctggtgcggtctgaaccattcggaacttcccagaggggggcaccggaataggggcggtggaaaagggtaattgtcgggcagcggcccctgcttcccagtcagacctcggagttgtaggactcggactgtgttcctgggcttgcgagagctagggaggcccggctctcctcgcggtgcaggacgcgctcggacggctcccgcacccccaccgcagtgttgggtggtggtacggctcagggagtcacgcgcctgggtgtcggcggggctgcgggaccgcgagtgagtgtggtcgctcctggttctgccagctcccctgagagcctgaacccgggcttgagagcctcgccaccccgggtgacatccctgccgtgggcttgggggctctgggtgtgattccgccggtccgggtcccgcagcgaccacctacccagcgcagtcaggggcggggctgggacccagagcgggaccccggctgccgagtccaggtgtcccgcgggcctcgatttggggagcaggtaggcgggggtctgaggggttggcggaggggcatgtccgagttttcgttggtcccaggtggacgagtaatgggggagggtttagggccagagtccagggcgtcgccgagaccctgagatttgaagataggttgggggcacgcccattaaccaagtctatggggatgaggactgtgatctcatttgatgttgccatgaaacgggactgtttgccttcccttctcccaggttttgtcttcgctctgtttggaggagagggtgtgtgtcatcctcttctcccagtttggcgttcaggagggtcctctgatgcgctaatagggtagcaccgtgtcctccagggagggtggaagaccgcgcttctctccagttgagagtactgtcagtcgcgtccttgtctcctggaaagaatggattggcttgtggattgaagtccaaggtgtggtcactagcagtctcttcaagtggggacacagggcaaggaggagcttgctggaagtaggttctggctctctagcctttggccacagccagtttagtgccagattatcaccgtggtcatcaagtaattgagtaatagtggcaggtgacactgcgtttgcccttctagtgtcctatgtcagggagctctgtgaatggaaatccagggaaacggtggaaatagagccacagtgagagtggatctgaactggcagtcatcccctgcagaacttttcaccctgggcttgttgggatcccagctgctaacttaatgaggctccccagtgggagactagttatagaagctgtgtgtccactgctggttaagatccgttatagtgctttgtttatttagagtgcccttacttagtggcctctttaattctccacggtgctatgagaacaccataggaagtagggttgaaatagggccagggcgcaccacgggtggtggtgaggtcactgtccaggtctgggactcagccattgtgggagggggacatgaacagacactct

SEQ ID NO: 17408 - DNA, 2300 bp, Homo sapien
aggtgtggtaaatgcacattgacttttactgaaaatacactagttgaataaccttccgccattagcctatcaccatggaaataaggataatctgagcaaggtggtgaactccactaacaaactgaaaaaggtaattcctggaattaaagttacaaggtgaaaaaaaccttgttcttgacttaaaaatctcattaacaaacattagtttcaagaacttgaacccgggaggtggaggtagcagtgagccgagatcgcgccactgcactccagcctgggagacatagcaagactccgtctctaaaataaaataaaataaaatcaccctgtaacttactacctcctcagaaattaagtttgcgctgtccaacagcaagaggaattcgcttgataagaataattaaacacataaaggcaatgcctaacctcgtaacgccaccccatattccttaatctttaccaagccactataagacggcagaaaacacaagctgcactttcgttcttttctcgtgtcccgttttcaacagaccatggatttttttttttttttttagatggagtctcgctctgtgccaggctggagtgcagtggcacgatctcagctcactgcaacctctgcctcccgggtttaagcaattctcctgcctcagccaccagagtagctgggactacaggcgtgtgccaccacgcccagctaattttttttgtattcttagtagagagggggtttcacctgttggccaggatggtctccatctctttacctcgtaatccgcccacctcggcctcccaaagtgttgggatattataggcgtgagccaccgcgcccgaccagaacatggaaatttaaagagaaaaaaataagtgacttctgatttcaaaaacacaaccacccacttttctattctattcctggtgagcacattctggagactctgcggcaaccatagcctcggccgcggcggaaggctccggggcggccacacctcagggggcagccacacctcagggggcagcgcgcacaggcgggtcaggctctgattcccatctctctccggtcttcactggaaggacccacactacatcacaaactaatggctttacaattaacttctaagtagctaaatttagtaatgggcgctctagttttaaaaaatattattcaggccgggcgcggtggctcacgcctgtaatcccagcactttgggaggccgaggctggtggatcacctgaggttaggagttcaagaccagcctggccaaaagggtgaaaacccgtctctgcaaaaatacaaaaaattagccaggcgtggtggcggacgcctgtagtccccagctactcgggaggctgaggcaggagaatcgcttgaacccgggaagcggaggttgcagtaaggcgaggtcgcgccactggactccagcctgggcaacaagagcgaaagcgaaactctgtctcaaaaaaagaatattattcaaaaactgattttcacatttttaaaaaagacccactgagggaggaagaccgaatcccacacatgcgcgcgcacagcggttccgagttctgcaaccaacctcccacgggcgccgcgccttctccgcgtcacgtgacggccgtctcccgcaccttccatactctcaatgtagggagaggacgggttccatcagcaatttaataaaaaccattggtgaagcaaaaaaaaaaagcctgccaacctcttataacgttttttctttatttttctcttttatgtggacaggaagccttaggttggctatatttaccctcaaatctctttttaaaatgatttttaagtttcagcatactcccgcgcttaatgaaatggtttcccccagcatccccagctggtgcggtctgaaccattcggaacttcccagaggggggcaccggaataggggcggtggaaaagggtaattgtcgggcagcggcccctgcttcccagtcagacctcggagttgtaggactcggactgtgttcctgggcttgcgagagctagggaggcccggctctcctcgcggtgcaggacgcgctcggacggctcccgcacccccaccgcagtgttgggtggtggtacggctcagggagtcacgcgcctgggtgtcggcggggctgcgggaccgcgagtgagtgtggtcgctcctggttctgccagctcccctgagagcctgaacccgggcttgagagcctcgccaccccgggtgacatccctgccgtgggcttgggggctctgggtgtgattccgccggtccgggtcccgcagcgaccacctacccagcgcagtc

SEQ ID NO: 17409 - DNA, 2300 bp, Homo sapien
ttctcaactagcatgctcctttcacttgcagggtcttagcaccatactgtcctctcactcagaaatattccttcccccttatcttattaactcttcctctttcttcgttgctcagtttatgccatttcctcaagaaagccttccctgtttctcccaagccaggtcaatctcctctgtgacatgattttatagaaccatgttccattccttcagaccactaactccttttatctagggtcttcatgtgttgtctgcaggagagaaggaccgaaactgttttgttttgttttgttttgtttgagtcagattcttgctctgtcgcccatgctggagtgcagtggtgccatctcggctcactgcaacctccacttcccgggttcaagaggttttcccatctcagcctcccgagtagttgggactacaggtacccatcaccaagcccagctaatttttgtagtatttttagtagagatggcttttcaccatgttggccaggctggtgtccaacccctgacctcaagtgatccacttgcttcagtctcccaaagtgctggattacaagcgtgagagactgcaccaggccccaagactgtttttactaccactgtatttctagtgcctggtacaacacattgtaagtgtcagtaaacatatgttggataaaattttaaaatgcatgtttattttctcagtccctactatgcagcaaatcctatgctgggccctaaaggggaaccaaggttagtaagagaaatgcttgaccttaaggaactccatgccagttagaagcaatggatccgtaaaccaaaagtatctgagaccagtctcaatcgagaaagtttatattgccaaggtgaaggatgcgatgataacacggcctcaggagctcctcaggacatgtgcccaaggtgcgggtacagtttggttttatacattttagggagacatgagtcatcgatcaatacatgtaagatgtacgttggttaggatcggaaagacgggctaactcggggcagtggggggcttctaccttataggtagacttaaagattttttgattggtaattggttgaaagagttattatctaaagacctggaagtaaatagaaagaaatatctgggttatgattataaggggttgtggagaccaaggttttatcatgcagatgaggcttccaggtagcctgctattcagacagaatagattgtaaatatttcttatcagtcttgagtctaccagtcttaaggtctctgtgttgatgtttgtgaggcatgtctgactaccacttcccatcatggcctgaactagtttttcaggataaattggaatgtccttggcttcagatagggtccaccagtcagttggggggcttagacttttatttttggtttacagatatcacatggactatagagacacatttctgtaacagagtagaagtgcaacatgagaagaacaaagtgctttaggcgacaagcggaggagggagacatcaatcccagatgggaaaaatcaattcactttctgtgtgtggtgttacttatttatttattttttgcagggaagggatcgattcattcaacgtacaccttgaatgaataactatagttctccctacgtcctatgcactgtcctaagtgttttacgtggttaaggacactaagattttacagatggggaaaacaatgcacacgacagtcaagtgacccgctcaacgtcacacagctactaagtggtagaaaaggcagttgaacccaggctgcttggctccagagtctaatatcacggggaaaacctcacgggagacgtggcaacgaagttgtgcttcattgaagtatctgtccaggtggaaaaccgcagggcctctctagcaaaatccagaaccagaaaatacttgcttaattatgagtttccttccttcttttgcccactatccccatttaacctgcggagggatttcagaagtgcagtgaataaagatgcaggggactatggaacactaatttccggctacggcgaattcaggctgtttccatggaaacagtaacgggtgggcagctaggtatagtctcgcggtgcttgaaccagcggaagtgacgtcgccgctcgcgaggacctcaggtggatcgccgcggcccctcctcccagagcggcagccttttcccgcgcgtgctgccttcgccgctcgggccgcccgggggaaaacatggcgtctgccctggagcagttcgtgaacagtgtccgacagctctcagctcaaggtaacgccctaggccgccgggctgggcatgggcgggta

SEQ ID NO: 17410 - DNA, 2300 bp, Homo sapien
cagctcctcggtggaagggggcgggtccctggtgaagccccaccttcaatcctggaagggcctgaagcctgggggccaggtcaccagtcccagtaccagagcggggaacttgtggtgcttttccccaggcctgctcatggccacctatggccgcccatggaccaatcagcactcacttcttcccctctgaggtccataaaaaaccctggactcagccagactcaaagagaggacgggtagatggggagaaaaccagctgcagagaggaactaccctttctgctgagagctggacacttgttgggatgaactgcctaccagagaggagctaccctctctgctgaaagctgaacacttgtggggaaaccctggctatggagaggagctgcccactgcaggtctcttctgaagtattctgttgctcaataaagctcctcttcgtcttgctcactctccacttgtctgcctaccccattcttcctggatgcaggacaagaactcgggacctgccaaatggtggggctaaaagagctgtaacacaggctgggtgcagtggctcacgcctttaatcccagcactttgggaggccgaggggggtggggcggatcacctgaggtcaggagtttgaggccagcctggccaacatggtgaaaccctgtctctactaaaaatacaaaaatcggccgggtgcggtggctcacacctgtaaccccggcactttgggaggccgaggcgggcagatcacaaggtcaggagttggagatcagcctggctaacatagtgaaaccctgtctctactaaaaatgcaaaaaagctgggtgtggtggtgggcgcctgtaatcccagccacttgggaggctgaggcaggggaatcgcttgaacctgggaggtggaggttgcagtgagccgagatcctgccactgcactccagcctgggcaacaagagcaagactccctatcaagaaaaaaaaaaaaaaaagggagagaatgtggtacatatataccatagaatacttcacagtcataaaaaaagaataagatcatgtcttttgcagccatatggatggagctggagacaattatcctaagcaaacacaggaacagaaaattaaatacctcatgctctcacttaaaagcgggaactaaacattaagtaaacatggacgtaatgatggggacaacagacacggtgacctacttgagggtggagagtgggaggagggtgaggatggaaaaactacctatcaggaactacgcttattacctgggtaataataatctgtacactaaacccccaagacagtcaatttatataacaaatctgcacatgtatccctgtacttaaaagttgaaaagaggccgggcgcggtggctcacgcctgtaatcccagcactttgggaggctgaggtgggaggatcgtttgagcccaacataggaagactcctgtctcaaaaaaaaaaaaaaaaaaaaaaaaattaccagggtgtggtggcaggcccctgtggtcccagctactcaggaggcagaagcaggacgatcccttgggcccagaaactcaaggctgcagggaaccgagatcatgccactgcttccaccctgggtaacagagcaagaccccgtctccaaaaaaaaaaaaaaaaaaaagcaatacaggggtacttaatatttattcatatatttacctgagaatcatcagttttactaaggctgtatgatgttagcagatattggttctatcagtctctccgcagacatttgctgtaaataaagcagagaggctttcagagtgcaccctgtttttgttcctccatcctgttgtctggatccccttctaaaacgtaagttccaggatggcaggaactttgtctatttggttcacactcgacacagttagtgctcaaaaatgtctaacgacacaggcctgcttctcggtttgcactgctcctccatggtagtctgtgcagtgggagaaggcagcccgggcccagggtccacggagaagacgcaaatcgacagcgcgggagcgcggaccttctggaggcgcgcggcgcttaccgctgtccgtcctcgaagccccgccccggggctccgcctccgccggcgcgtgttcctttagggaccgcgcgcgccgcggcctcgctctggggccggtacttgcgcgcccgcaccccgcgctccccgccccgctccccgtcccgcgctccacgcgcgccccagcgttgggggcttctcctccgcggcgggaatgtctggccggctccggcagcacggcgcggcccaggtccccgcgcccacgacgg

SEQ ID NO: 17411 - DNA, 2300 bp, Homo sapien
agttgtggctcataattaagttataaaacactctgggagggcaaagatgacgtgtgattgccatggggatattattgatgaatattggattggtttttgaattctgaattcaaacccactttaacattttgaatcataaagttacagaactggtagggatccgaagtctctttagtgttggttaagatcatagacttggcatcagcaactgcgttgacccttaggctgggatcttaaccattgtaagtcttggttttctcatctagaaaatggggatcctgacatccatcttctagacctctgtctgtggattgagacagtgactgtaactctgttccctgtatctacttttactccatggtagttgtggtaattactattattattactattactatatcatctttccccagatgactccaagggtatacagtctcttcaagcacatctggcctttttctcctccatgctcaaccagaactcttgaactttcccttagttggagaggtcaatggttagaaggaagaaaactccgcaacccactccctccctttgctctctctctggggcaccgtgggcagctcttgctgcagagagctgtgctgaggccctttactacagaacctgtacagcgcaccctccaacagcacttccatctatggtcctactccccaaggatctgcctccgcacagccctcccaatgtgcctgaaaatatcagcattgatcctttccctggccaccttgctcttaaggctcctgttcatcatgctatgtggatgtggacctcctcgcctctctgtactgcccatgatggtggattacagcagaatgggctcaccagttgacagctttccccactcatgtcttctactcactagctaagcttggggtgggtgtccccattgcccggaaaattactacacagccctcatatcaaacttgttttgagaagcataaccataaacccatctttggcctatgatcctagggagtcctcatgccaacaagaccttttggggtcagccacgcatgtgaagttagaatgcagtttaggctgtgccatgaatctgaactaaatatgattttaggggtgaggaaactgggacctaggggcttggggaactggcccgaaggtatggagagtacctgaccttgtcgttcttccaggatatgatatttactcctggcaccaatcccctctaccttgtactgaaagcaaggacagcctgcctgcaaccacacatacaggtggccatccagcaggtgcatactaaatgtgtgttgagttgaattattagactctttctaagcaaccttgcagcattgaagggaccgcaatccctttgcctctgcgtccttagggctaaactcgaggtctcgatgtcttgcactgtgggctgggccgggtttggtgcctcacccagcaggtaagtgctgtctacgcctcccacaggtccagtggctcctctccagacttgggtgcactgggccaggctgcaccttactaatctcaaggcttcctgtgtttgtggctttggggccctcttcatcgtgtgaataggaataagaagattgttatttctggccgggtgcagtggctcacgcctgtaatcccagcactttgggaggccgagacgggcggatcacctgaggtggggagttcgagaccagcctgatcaacatggagaaaccccgtctctactaaaaatataaaattagccgggcgtggtggtgcatgcctgtaatcccagctactagggaggctgaggcaggagaatcgcttgaacccgggaggcggaggttgcggtgagccgagatcgcgccactgcactccagcctgggcaacaagagcgaaattccgtctcaaaaaaaaaaaaaagattgttatttctgaaataaacccctatttctcactatttaataatttagcaatcttgactcacaatccaaatccaggcaccccagacccacccacggcccgttgcctagcaacagcctccccacccccgcctccgcgccttttcccgccgactgcccagtgcgcacgctcagagccttcctccacaccccgcccctgcagggcgcgcggtggtgacgtgtagagtgcgcgacgcttttggcgacccgacctctggctaacctacccccggagccatggcctctgctggggtggcagccgggcgacaggcggaggatgtattgccgccaacgtccgaccagccgctgcctgacaccaagccgctgccgcctcctcagccgccgccggtccctgcgcctcaaccgcagcagtcgccggcg

SEQ ID NO: 17412 - DNA, 2300 bp, Homo sapien
cactgtggctgaggacacaggctagatcagtgcctgccagtgtcatgttcctgatttaaggggccagcctggacactgaccaggggagagctgggctgtgatccttgaccctcgggccctccactcatatcaaatggaccctcttgggactagagccccaggaggcaatggctgtgtggggtccaccttcactatagccctggccatcagtcatcccaagttagagcccggctgcccatgcagtgccgctgtgggaggcacaggaaggcggtgctcagtctgaaggtggttcaggtccgtaccttaactgagcccccccatgtaccctcaactggctcctttatgcagtgaacaccctgcaccactgcagccctatatccagggctgcgactcagttccttctccccttctcccagactctggcagacatacctcagatgggggcaggaaccaagaatggcggggctccagccccagctagcctgtcggataactgctgcataagtgacaccaggaatcagagccaggccagggccactgatgagcccttggatgctcactgtgtgatgcgtgcatttgaaatatctgacagtaagagtgaggcctgggagagatgcagggactctgaggatgggggccaagctgggctgagaaacaagttagtggtgtcctgcagcagcccctacagcaagtgccagcgtgggagggaggtgggtaggcatggggtgggtggtatggcactcacagcactgcctgcagaccaccacctgacagctgggccggtggtgccagctaatggctccctagttttctcgtaagtcagacgtggccaaagcaaaacactgagcacacaggttgccttgaggagcagtgactgcctcaagagctcagggctgaggagctggctccagacagcctgttgccaatgttcagcaacatcaccccactcctggttactgatcgacctggtgtgctcttgagagtacccccaccaggcctcatgggtcaatactactgttattgttgctattgttattaccaggccccgccctcctaaagcatttgcatattttcatccttaatcacagaaccagaatcagtatcttccagaagagaaaactgaggcccaggagaaagcaagaggctgtgctgtgctcccagggccttcctggctcgctgtggctttgagctccaggtctctcagctagacaatgagaacgtcggcccacgcgcggcacagtaaaagcccaaaatgctatgatggacggggtgggccgctggctgcagagccctccataccacagagcatctctggctgggagaaaggagcaggctgaggcctgcagcagagcgcggggttggggaccgctcctgttgggccccagcaaggcgccctgagacccctgctccatccctgccgctccccacccgcctgctcctagcctctgttctagctctgcccgcggcggccacagcctccccgagccgccggccgggccctctgctgccctctggcggcccgagcgcgcggtgccgagctccgcgcctgaggccctgaaaccccgcgtccgcccggcggtcgcctcccgggaacaagagcccggctggggaccggagcggaagggggctggggctggggctgtgctctgaggactgcaatatacggtccgcgcaagcactcagcaaacgctgctgcgcttactgggttacttactagattcctattctctggggaaactgagaaccaaagaaaataagtgtacgcgcgcgggaggtgcaggaatgggggtccttgcccgaagtcgcagagggacaggggcaccgccgggaccagaaccccgacgcccctgcggccgccgagcccgcggcagtggaaaagcggagtccgagcgcctccagcctcagcccgaccctggactgctccccccagcccccgcgcccagagagcaggagcccggcagcgggtgacgaggtcgccgggactgggagccggtgcgggggaggcgggccccgcggggcgtgacgcaccgagctgggagggccggggcggggcagccgagcaggctgcatataagggcggcggccgggcgccaaagccagagcaagcggcctgtgcccagatcctgggagaaccccagccgagcccagcctagcccgagcccagcccgagcggagccggagccccaagcccgagccgcgcccagcccgagcagagccctccagccgctcaccccgcgtgccaccccagcgaccctcagccgctctctgcccttctctcggccccgcgcccgccctcgcgg

SEQ ID NO: 17413 - DNA, 2300 bp, Homo sapien
gctgggattataggcatgcaccaccacgcccagctaatttttgtgtttttagtagagacggggtttcactatgttggccaggctggtctcaaactcctgacctcaggtgatccgcccacctcggcctcccaaagtgctgggattataggcatgagccaccacgcccggcctagagcatttaacatctgcttagccctgcccttggccctacagtgagatgattgtttgcacctcagggatgcaggctgatcaggtggggaggccacacgtgggaaggatggcaggccatagcagaagatggctttatactgatagacgtctgagggacatcccatggtcacaccctgcaagtgacctggtagcaggcagagttatgtcaggagactgtcgtttggggaagcaaggattggagtggaggctgcgcttgccccccagggctggctgaccctgggcagaagcaccatctcctccccaccgcttccccaaaatgtgggagatcaaagcgctctttgaaggaatttactgtatttccaaatgcaatagaacaaaacacaccattatgggaaagatcacagctctgatggactttacacttattttttttattttttgtttttaattttttaaaaaaatttttattattatactttaagttctggggtacatgtgcagaacatggaggtttgtacataggtatacatttgccatggtggtttgctgcatccatcaacccatcatctaccttaggtattcctcctaatgctatccttcccctagccccccgccccctgacaggcctcggtgtgatgttcccctccttgtgtccaaaaatgtggaacgcttcatgaatttgtatgtgtcacccttgtgcaggggccatactaatcttctctgtattgttccaattttagtatatgtgctgctgaagcgagcacaactttacacttattttataatttagtatttttaaaaaattttgagttgcatgtggagagacaccataatatttttcagtgcattttagaaaaagttttttattttaatttatttttaaattaattaattgtttattttttgagacagggttgcccaggctggagtgcaagtggcacgatcacagctcactacagcctcgaacacctgggctcaagcgatcctcttgccttggcctcccaagtaactggaactacgcccagctagtttttacatttttgtagagacagggtctcactatgttgcctagactggtctcaaactcctggcctcaagtgattctcccaccttggcctcccaaagtgagcccaggagttcaaggttgcagtgagctatgaacgcgccactgcattccagcctgggtggcagagggagactctgtctcaaaaaaaaaaaaaattgtaaaatctgaatatttgatactatattttatgttgttttctagaaatttctgtctaggtgctgaatcatgcagcctgctcttctactcagccgtgtgtttcagaacgtttcacagtgctgtgtgtagacctcgtgcttttttttttttttttttgagacggagtctcactctgttgcccaggctggagtgcagtggcgcgatctctgctcactgcaagctccgcctcccaggttcatgccattctcctgcctcagtctcctgagtagctgggactacaggcgcccgccaccatgcccggctaattttttgtatttttagtagagatggggtttcaccgtgttagccaggatggtcttgatctcctgacctcgtgatccgcccgcctcggcctcccaaagtgctgggattacaggcatgagccaccgcgcccggccgacctagtgcttttaactgctgtagtttagctgctgtaggaatgggccgtgggttttttttttttttcttcatttctttggttgctggacacctaagttgtttgtcattgttcctgacgttttcatgcaagatgatggcggggcgggggcagtgtccacgtgccccccgtatgcgggtggcgtggccgggatgtgggcacacactttttcagtttaccccgccccactcacaccctcgtgtgcactcaagattgtcccctgtcgagtgtgggcgaggagaggcacaccactattgttttaatttgcttttacctgattcctggtaggttgagcatctcttcacatttatctcagctgcttgggtttcctctggggcctctgagaaccctcatccaggagggtctcggtcacaccagggttggtgtcacctcccttcagggtgccaggcacccctcttcagaggtgctgat

SEQ ID NO: 17414 - DNA, 2300 bp, Homo sapien
agttccagaccaaactgggcaatgtggtgagactccatgtctacaaaataaaaaaaaattagccaggtttgggccgggtgcggtggctcacgcctgtaatccctcggcactttgggaggccgaggcaggcggatcatgaggtcaggagatcgagaccatcctggctaacacggtgaaaccctgtctctactaaaaatacaaaaaaatagctgggcatggtggcgggcgcctgtagtcccagctacttaggaggctgaggcaggagaatggcgtgaacccgggaggtggagcttgcagtgagcagagatcgcgccactgtactccagcctgggtgatagagtgagactccatctcaaaaaaaaaggaaagaaaaaagaaaatggggtgaagctcacaaccagcagaggagtgagaagaggcagcccagcgtggaggcgagcagggccttgagaagcaccgtcttacccgtgggccccacacccacccctgctggagcacgtgagctgtcagtgccttttgagtttggtgcaggtcacacttgttaattgaagaatgaatgacatttcaccctcctgaaaggagttatggatctagggaactggagcagctgcctgccatttcgttttactgtgggatctagagaccacagtcgcattgtgacattctaacttccacccctcctgccatgaggtggtttttgctgcccagggcttgcctgacctcagattccagcatcggggtcttcccaggagggtccctccagagagtgaatggtgagagagggacctgtattagttgacattaagcagacagagtagaggggccgccagcctcggccctgagtgggccctgtacttttacatctgttcttgcttctgtgcagaaggtaacctcaggtggcctgtctcatcacccccattccactcaagggaaacctgggcttagattggtcatgggaggcttgccatggtccctcacggtgggtggtgaagctcccagctcagacagtggctgccaaaggccagagtcctctgagccaggtggcctcttatgtggaaaaacagggttagggggctggcttaatatgaaatggcttctcctcttctaccagagaataaactttttaaaaaatatttttattttattttattttttgagatgaagtttcactcttgttgcccaggctggagtgcagtggcgtgatctcggctcactgcaatctccacttcctgggttgaagcgattctcctgcttcagcctctccagtagctgggattacaggtgcctgccaccacgtctggctatttttgtatttttagtagagacggagtgtcaccatgttgtccaggctggtctcgaactcctgaccatcaggtgatctgcctgctttggcctcccagaatgctgggattacaggcgtgagccactgggcacggccagagaataaacttcttctttttttttttttttgagatggagtctcgctctgtcatccaggctggagtgcagtggcatgatctcggctcactgcaacctctgcctcccaggttcaagtgattcttctgcctcagcctccccagtagctgggactacagtcgtgcaccaccatgtccagctaatttttgtatttttagtagaaacggggtttcaccatattggccaggctgatctctgactcctggccttgtgatccgcctgcctaggcctcccaaagtgctgggattacgggggtgagccatcgcgcccggcccagagaataaacttagaggaaaaagactctggcacactcatccttatgtctttgtgccaggcacagggctctaacccaaagttgccctaaataaacgttacccgagtcagcttatggtgccagggcatgagggcagctctgggggcagtgggggctgcagcgctgcaggcagattctgcaggggtgatggatcccaggaggacctgtcccctctccagcagcccccacccattcccctgccctttgttgtgtgtggtgtgtggcctggaatcgatgtgactttgcctgtccaggcctgctgtttgtccatgtgtcacaatgtgacatgttgacccactgcagatcattccctgaccacagagcgctgctcccgagaaccctgcacccctcaatggagtaaattaccataaagcctcttccttacccatgctttggggtgttaacagctgaggctattcgtcggtgacctgtgggactcgagctattcctgcagctcagcagacctcctggccgtggtgggtagctcctttcctttagtcagattccgagg

SEQ ID NO: 17415 - DNA, 2300 bp, Homo sapien
ggattccaggtgtgagccaggcaggaggtttttatctgacttgtttcaagctgcaagtctgtctcctgggtggggtgtttgcttttcacagaggaagggtggcccaggttgggtaggctggagtagaggatcggactgcatcagttctggtgtgacctcttacggttgccttactttgttctcagataaagcaaacgcacaaaaatttgttttctgggcttaacaaaacaggagtgaccagttaggtcagaagactggaacatcagtgaagtggatgtgtggtaggcggaggggaaagacttgctagaagccctcccgctgcggggggctccttcagaaatggctctgcctctagcagctctgcctggacactgagcagggaaagggtcccgacactcattagtaacagtggtaagtcagagaaccagccctgagcctgtgtccccagccctgccgggggccaatgcctactgagcacttcccacaggccagttcctgggtgatgagttttaccaacatgtatttcccttttacttttgaggaaaatgaaggtgggctcagtcacagagatagtgcatgctccaaagccagtgtctttcctgtctcctcggttggcctgccccatcctagcgatgttgtgaagattgggactacctctaaagcagcacacagtggctgctcagtaaatgctcaacactggtaggtgctgtgggccaaggtggagagaaacgggccatctggagcaggaagcagctgactgcagaagtcctgtctgggcccccagcagtctgggtgactgagcaaatcttggaacctctcagtctatttccccatattacataacacctggctacaaaagggcttttttcttttttgagagggagtctcgctctgtcgcgcaggctggcatgcaatggcaccatctccgctcactgcaacctccacctcctgggttcaagcgattctcctgcctcagcctcctgagtagctgggattacaggtgcgcgcaccacacccggctattttttgtatttttaatagagacggggtttcaccgtgttagtcacgctggtctcgaactgccgacctctggtgatccgcccacctcggcctcccaaagtgctgggattacaggcatgagccaccacacccggcctacaaaaggggttcttctgggacccgatcgtctaaactcttctccatttgaccccctccatcactactccacagctcaccggtcttttctctgttccttaggtgcccgtcctgtctccaggcctttgtacataccattcgtcttgccttgtttgccctgccctcacacttggcacatctggcacctcccctgcacattctaagacagcatccttccgtaccatttgacccaccccgttttttccaccacagtactcatccatattataaccctttattcacattttgtcttttatctcagtcaggaggaagcgagggcgggggactctgtgttgttccctaccgtaccctcagcgcacagtctggttcagaaaatactcgagagtgaatgagagaatgaatgaaggaaaaaatgagtggaggaggggtctttggccgagctaaagagcctgggcgccgcgggggcgggaagctctaggcagtgctcgtcgcgcaccgcccccagagtaaagcgaatttcagaagagggcgtggggccctgggcgtgtggggccctgggcgtgtgtgacccgggccaagtccaagtccgcaggaggctgcgcgggaagctgcttatagctacgacccgcggcccccggcctctagccccaccgccgccaggcaagggcagggacgccaggtcagttacaggctcgggtgcggcagccggcgaccaaaggcactgggcgggaggccggatccaaggggatactgctacgtagctgcagcggaaccggcaggctctgcggcgaaacacactgggacttgtagttctcggctcctctagacgctgtcgcgagcccccagataaagaggcacttcgcggtgacggggaactacatttcccagaaggccggaatatgttgggggtcaccgggaaagcgccccgactggcggcacttacccggctctataggtccggttccgggggcgcgtggctgcagcggggcccgcgtggtgcctcctgaggcggcccccggatgaagagatctgggaacccgggagccgaggtaacgaacagctcggtggcagggcctgactgctgcggaggcctcggcaatattgattttagacaggtactgaccgcaccggaccgccgcggaaac

SEQ ID NO: 17416 - DNA, 2300 bp, Homo sapien
gacccatgaggtaggtactattatccccattctacagatgaggaaacggaggctcagcaagttaagtagtttgcccaaagccacccagctgggcatagaggagccacgtttagaaaccagatttgccaggcgcggtagctcatgtctgaaatctcagcactttgggagtccgaggcaggtggatcacctgaggtcaggagttcaagatcagcttgaccaacatggagaaaccctgtctctactaaaaatacaaaattaggtgggtgtggcggtgcatgtctgtaatcccagctactcgggaggctgaggcaggagaattgcttgaatctgggaggcagaggttgtggtgagccaagatcgcaccattgcactccaggcagggcaacaggggcaaaactccgtctcaaaaaaaaaatacataaataaataaataaaaataaaccagatctgtcatccagaaaccgcacttaaaacaagcttaaaacaacacagttcgcactgggatccagctctgtcttgctcttgacattcaccctgggagacgggtagccaagtccagtaggaaggactgtggggacctgtgttgattctgtcctgtagcttgagaacctggacaggggacttcaccactctgcgcctgtttcctcatccacaaaatgtgatgagccgacctcacagagggggcaccaggatctaatgagaccatgcacagaaggggcacagcaggcctgggacagagtgagggccccccatctatcacaataccttattttgcagatgcaggattcacttgtcccaggtcacccacaagctctgatgccttgaccagctcccctctgccctaccaaaggacaaatgagggaggcttcgatggggctgttaatggggtcatatcccacagaccctagagcctgggtggggctgagaggcttcccaagcaggtggcagtgagctcccacctgagctatggcaagtagagacctaggcatgaaattgctccgaggtctgtaccttaagtttcatgcaaggactctctcattcaacatgcctctgtttaaagtctgccagtggctaccttccttgcactagaattgcaaacaaattcctcactgagctctctgcagccctgcaggctctggccctcccgatatggctctgacttcaatgtgcccattacttgtccccttgctgacggcctcctcacaattccacttactcaccaagttctctcctgcctcaggacctttgcacttgatgttctttctgccaatgatgctcttcccaggagggcaggcccctgtagtcccagctactcagaaggctgaggtgggaggactgtttgaggccaggaattcaagttcggcctgggcaacacagcaagaccctgcctctaaaagaacaaaatgctcttcccagactctacccatggcggttcctcttgctatttagatctttgcacagacaggcctccttctctctcccccagccaaggagccctagccgtcacttcacctgctaattttcgtcctagcacttactgctctaaaattatcttcgtcatgtatctaagcatttgtttgctgtctgtctcttcccaccaggatgccagctccacgacagcagggaccgcattgtctctgctgattcctcaagactcagcaaggtgccaggtgcccagtaaatgaagtttacatgaagccaatggagttttgaaatcgaaaatgtttctcaaactgcaaagaagtgggcacaggtgagggctaatggtggggtgagggtgggggcctggcctgacgctggaagctcctgtacgcagggcgctagtgtcctcccaggccgcaccgggatcccaccgcagaggccccctcccgcaggccggccagcgggcggggggcgcgcagtggggcgcgcggaccgccagggggtgctgtcggggcgcgcacggcccacctggcgcccggggccgcgagcgagcgcagccaggccgcccgggaacttttttcctcgcgctcttgctctccttctccccccgcgcgtcgcccgcccgcccgtccgctcgtccgctcttcctgtgcggaggggatcgcattcctcgcggcacccgcggacaccaggcaggcccggccgggtgcgcggccaaggcccgctccccgcgtccccgggcgccgcccccgcccgcggctgggctccgagagacgagtgggagagcgagtgcagcgagggcgagaggcgagccgagcaggccgccctgcccgcggccctagcgccggcgcgaggagggggcgccgcggcccaccctc

SEQ ID NO: 17417 - DNA, 2300 bp, Homo sapien
cccaaagtgctcggattacaggagtgagccactccacccaggcttttttttaagacaagagttttactcttgtccccaggctggagtgcaatggcgcaatcttggctcactgcaacctccgcctcccaggttcaagcaattctcatgcctcagcctcccgagtagctggaattacaggcgcatgctaccatgtcaagttaatttttatatttttagtagagacggggtttcaacatgtttgccaggctggtctcaaactcctgacttcaagtgatccacccaccttggcctcccaaagtgctaggattacaggcgtgaggcatcgcacccggccacccaccctttttttctcccaagaaaaccagttttctgaaattttcagggggaaccaggacctcctcgcccatgtctttcacccctgggtgcctgtatcctgtattcaccaaagccccacgggcatctccccgattgaggtcccacccctcagggcctaggacagggggaccagggagggcccccagaggctggagtttggaatacccccttctcttctctggagctcagtttgcatgtctgtgaaatgacaggtgatgtcacctcccagaagggcagtttgagagaagtaaaatctattgaggcaccttggacacaggagggggtcagacggcatcagcctttgagggtgctgcagttacacggctccagcagtctgagccttatcaagacctttccagatatgagggaagtccatgcccagtgtctagctggctgggggagaagccccttgagaacccccactctgtaatgctaggctctgcatttgcttaggaggctgtgtccctgtctctccccttctgggccagccttgctttctgggcaggcccaggagtgtcccgggcccagcactcagagtcagcgctgtctttaatctgtattccacaggcatcctcaccccctcccctcccaggagctaggaacctgccaggcttcttacctctctgctggaatctccaccccccaccagaggctgccctcttggggaaggggcccagcccttgaggcctgtctcctccagactagctaaaccacagagagaactccatctcaggttcccaaataggcggtattcttccccgccaccaagctaggcagctcctggcggctggaatgccctgctcctttctcagcccaccacttcctccaaccttccgtcctctgtgctgcagcagggagtcttaccccacctccttcaggagggaggtgctcacgggttcctatgcctgtgggtctccaggattgggcacggagcagtctgcaaaatgtcaagtgagggagagatccagtcaaagccccaggggggcctctgagctcagtcagctcctctgctgctccccacctcttgggggaaggacaggctggggtttgcatgggtggccttttggagagcagagtaatgggagcctacttgaacttcctgcggcctcattccctgactgggggcggagggtagtctgagctgctggcctggggtgcttggccgcaggggaaggggctgggagggaggggtctgggtgagtctaagggagggtgagcctgaaaaggggacggcagcactaaactgccttcggggagtccccactgtgcgcccctggcactttcccagtcccctggcgcggtcgcaggcacgggtggggtctgcctcaaagttgttggtacggccagcccgctgctgtttaaatggtgtgtttgtttagagcggcttagggagggaactggaaatggggggcgggggcagcgccccacttggcgccaccgctgccggagggtctgcgtgttagaagccccagcttcgtaaatgaccgaagaagggtgggcgttgaggagggaaggccgaaaaccaacggagggctcggggccccgggccggccgccccctttttgcggggggagagcaggagccgcctctcgcagccactctgcgcgcggggtgggagggagagagggaggcgaagggacgacagcgccgggctccccgcccccatcccacccggttccaatatttcgcagaaaggcacgcggctcctaatcggtcttttccaggctgagatttagccgtgcgatgcccgcgcaggggcgggggccgcgggccaggggaggcgctcagagtccggagccgccgagcgaggtgaggagcccgcgtcctcggctggtggagcgggcgggcgggcgcgcaaacccgagaggcagatatagaaaggggggcaggttaaaaataaccctctccggctgggaagctcgcgc

SEQ ID NO: 17418 - DNA, 2300 bp, Homo sapien
agaccatggggttagcccaagcagcacaggatagggggtccagcagaccctgctttttggctaaggcttctgtccagaggagaggggttgcccctatctggcctcagtttccccatccctgggaggaggggggtggatggtgtggtaggatccctttggaggccctgcatcaggagggctggacagctgctcccgggccggtggcgggtgtgggggccgagagaggcgggcggccccgcggtgcattgctgttgcattgcacgtgtgtgaggcgggtgcagtgcctcggcagtgcagcccggagccggcccctggcaccacgggcccccatcctgcccctcccagagctggagccctggtgacccctgccctgcctgccacccccaggccgtgcagctgttcctgtgtgacctgcttcttgtggtgcgcaccagcctgtggcggcagcagcagcccccggccccggccccagcagcccagggcaccagcagcaggccccaggcttccgcccttgagctgcgtggcttccaacgggacctgagcagcctgaggcggctggcacagagcttccggcccgccatgcggagggtgagtgcccgatggccctgtcctcaagacggggagtcaggcagtggtggagatggagagccctgagcctccactctcctggcccccaggtgttcctacatgaggccacggcccggctgatggcgggggccagccccacacggacacaccagctcctcgaccgcagtctgaggcggcgggcaggccccggtggcaaaggaggtgagggggcagctgctgaccagggatgtgctgtctgctcagcagggaagggcgcacatgggatgtgataccaagggaggctgtgtgtgtgtcagacgggacagacaggcctggcgcagtggctcacacctagcactttgggaggctcagttgggaggacagcttgagcccaggagttggaggccgcagtgagcctgagtgacagggagagtccctgtctcaaaaaaaaaaaaagaccaagcatcttcttgatggttacctgatgacaattcctttcacaaggaatcagtggggtgactgtcatttgtgggatacatgactgcacgtgcgtgactcagtctgtggactttgtgtgtgggctgagactagggtggggagaggggaacccgccaggcccccgccaggtacctgtgtgccaggtacaggcggctggtgccgtggcttgtgtgtgggcagggctcccgcgggggcgtggccagcttgagacccatccctgacacatcctcgtgtgcgcaggcgcggtggcggagctggagccgcggcccacgcggcgggagcacgcggaggccttgctgctggcctcctgctacctgccccccggcttcctgtcggcgcccgggcagcgcgtgggcatgctggctgaggcggcgcgcacactcgagaagcttggcgatcgccggctgctgcacgactgtcagcagatgctcatgcgcctgggcggtgggaccactgtcacttccagctagaccccgtgtccccggcctcagcacccctgtctctagccactttggtcccgtgcagcttctgtcctgcgtcgaagctttgaaggccgaaggcagtgcaagagactctggcctccacagttcgacctgcggctgctgtgtgccttcgcggtggaaggcccgaggggcgcgatcttgaccctaagaccggcggccatgatggtgctgacctctggtggccgatcggggcactgcaggggccgagccattttggggggcccccctccttgctctgcaggcaccttagtggcttttttcctcctgtgtacagggaagagaggggtacatttccctgtgctgacggaagccaacttggctttcccggactgcaagcagggctctgccccagaggcctctctctccgtcgtgggagagagacgtgtacatagtgtaggtcagcgtgcttagcctcctgacctgaggctcctgtgctactttgccttttgcaaactttattttcatagattgagaagttttgtacagagaattaaaaatgaaattatttataatctgggttttgtgtcttcagctgatggatgtgctgactagtgagagtgcttgggccctcccccagcacctagggaaaggcttcccctccccctccggccacaaggtacacaacttttaacttagctcttcccgatgtttgtttgttagtgggaggagtggggagggctggctgtatggcctccagcctacctgttccccctgctcccagggcacatggtt

SEQ ID NO: 17419 - DNA, 2300 bp, Homo sapien
atccaaggccagtcggtgatagagacctgaagagcaggttgaaagtgggagagggaggtctgtgtctgcagccccatgctttatttctgcaggaagccctcccgggaacacccagcagccgctgcctggcctgccactggcttccccgccaggggtcccgcccgtctccttgcacacccaggtccagagtgtggtcccccagcagctactgacagtcacagctgcccccacggcagcccctgtaacgaccactgtgacctcgcagatccagcaggtcccggtgagggggtctggccaggggttggggagggggcagccccagcccagacacacagcttacagccaagcctctcccaccctcaggtcctgctgcagccccacttcatcaaggcagactcgctgcttctgacagccatgaagacagacggagccactgtgaaggcggcaggtctcagtcccctggtctctggcaccactgtgcagacagggcctttgccggtgggtgacgtgggcagggcataagggagtggggtctacacacacacacacatgcccacctggtaacatgtgcctggccctgcagaccctggtgagtggcggaaccatcttggcaacagtcccactggtcgtagatgcggagaagctgcctatcaaccggctcgcagctggcagcaaggccccggcctctgcccagagccgtggagagaagcgcacagcccacaacgccattgagaagcgctaccgctcctccatcaatgacaaaatcattgagctcaaggatctggtggtgggcactgaggcaaaggtgtggagaggcctgcaggggcacagaccggggtgtccctaggaaggaacagatcaggggcaactggaaggaagagagggagtgagactgagcctggacaagcagggaattggaattcagcctccccaggcctggccagcctcgtttatttagttaaactggtttgcaggcctcttcaataaaggtggggctgtgctaggcattggggatgcagcaatgaacaagacagacaaaaattgtccctcaaagaagagccgaccttctggtgggggagatggacagtaggcaggatgaataagtgctcgagaccaccacgtttggctcgttgcagagaaagcaggaagaggatggtgagggtcccctggtggtagccagggaaggcctccctgagatggcggcaggcacagcagcagctagccagaccctgctgtctgcatcttacattctaaccctatgcccggcctgggaggtgggtgctactaggcgaggaacggttcaggtagaaggaacaagtgcaaaggtcctgaggcagtaatgttgcaaagcagctccgcacccccttgctagggctctccaaccccacaacccccgacctgacaggccacctgtgcgctccccctccctcccacaccgtgcagctgaataaatctgctgtcttgcgcaaggccatcgactacattcgctttctgcaacacagcaaccagaaactcaagcaggagaacctaagtctgcgcactgctgtccacaaaagcagtgagtcctggctttattgagctccagtctggcctcttctctagccttgctccacctcccggccccaccccatccctagccccaccccacccttggttctggcccaccctctgccctgcccacctcacccttggctgtagccctgcattcagctctagtcccttggttacctctggtcctgaaagagacctggtgcctccctttggccctaacccagccccatcaaagcgtcctgggctagctttaggagctacagtagtccctaggcctccaagggcctaggctctgatttggggtcacatatccagcctttactcctggctctgttcctttcggcccacagaatctctgaaggatctggtgtcggcctgtggcagtggagggaacacagacgtgctcatggagggcgtgaagactgaggtggaggacacactgaccccacccccctcggatgctggctcacctttccagagcagccccttgtcccttggcagcaggggcagtggcagcggtggcagtggcagtgactcggagcctgacagcccagtctttgaggacagcaaggttgggccctgccacggtgcccccttccccactcccagccatatcctctgagcctcatgacagggccgggaagaccctaacagatcctacctcccatttcatagacagaataactgaggcctggagccacgtggggtcccacagtaaggtgggcagaatcctgaccccccccttccca

SEQ ID NO: 17420 - DNA, 2300 bp, Homo sapien
cagccccgataccagctccccaggcagcttgtctccacctcctgccacattgagctcctctcttgaagccttcctgagcgggccgcaggcagcgccctcacccctgtcccctccccagcctgcacccactccattgaagatgtacccgtccatgcccgctttctcccctgggcctggtatcaaggaagagtcagtgccactgagcatcctgcagacccccaccccacagcccctgccaggggccctcctgccacagagcttcccagccccagccccaccgcagttcagctccacccctgtgttaggctaccccagccctccgggaggcttctctacaggtaagggggatgtgtggcgggaggggacacccggggtggggcttccaggagcacaggaagaagcttctgctgtgatgtgagtagaggtctgtgcaggctttagaaactggggctccactcggctgcttgagatgccctgttactagcagtcctggtgtgcttgttgccggggtaggcgcaacctcgcactggaggcctggcttgaagccagtgcatttgcatcagagcccaggcagggactgtccataggaagccacatggggcaatgactcatccaaggccagtcggtgatagagacctgaagagcaggttgaaagtgggagagggaggtctgtgtctgcagccccatgctttatttctgcaggaagccctcccgggaacacccagcagccgctgcctggcctgccactggcttccccgccaggggtcccgcccgtctccttgcacacccaggtccagagtgtggtcccccagcagctactgacagtcacagctgcccccacggcagcccctgtaacgaccactgtgacctcgcagatccagcaggtcccggtgagggggtctggccaggggttggggagggggcagccccagcccagacacacagcttacagccaagcctctcccaccctcaggtcctgctgcagccccacttcatcaaggcagactcgctgcttctgacagccatgaagacagacggagccactgtgaaggcggcaggtctcagtcccctggtctctggcaccactgtgcagacagggcctttgccggtgggtgacgtgggcagggcataagggagtggggtctacacacacacacacatgcccacctggtaacatgtgcctggccctgcagaccctggtgagtggcggaaccatcttggcaacagtcccactggtcgtagatgcggagaagctgcctatcaaccggctcgcagctggcagcaaggccccggcctctgcccagagccgtggagagaagcgcacagcccacaacgccattgagaagcgctaccgctcctccatcaatgacaaaatcattgagctcaaggatctggtggtgggcactgaggcaaaggtgtggagaggcctgcaggggcacagaccggggtgtccctaggaaggaacagatcaggggcaactggaaggaagagagggagtgagactgagcctggacaagcagggaattggaattcagcctccccaggcctggccagcctcgtttatttagttaaactggtttgcaggcctcttcaataaaggtggggctgtgctaggcattggggatgcagcaatgaacaagacagacaaaaattgtccctcaaagaagagccgaccttctggtgggggagatggacagtaggcaggatgaataagtgctcgagaccaccacgtttggctcgttgcagagaaagcaggaagaggatggtgagggtcccctggtggtagccagggaaggcctccctgagatggcggcaggcacagcagcagctagccagaccctgctgtctgcatcttacattctaaccctatgcccggcctgggaggtgggtgctactaggcgaggaacggttcaggtagaaggaacaagtgcaaaggtcctgaggcagtaatgttgcaaagcagctccgcacccccttgctagggctctccaaccccacaacccccgacctgacaggccacctgtgcgctccccctccctcccacaccgtgcagctgaataaatctgctgtcttgcgcaaggccatcgactacattcgctttctgcaacacagcaaccagaaactcaagcaggagaacctaagtctgcgcactgctgtccacaaaagcagtgagtcctggctttattgagctccagtctggcctcttctctagccttgctccacctcccggccccaccccatccctagccccaccccacccttggttctggcccaccctctgccctgcccacctcaccctt

SEQ ID NO: 17421 - DNA, 2300 bp, Homo sapien
gtcaaaatagggtctggactcagttgagtctctgactctataagaacttaggccagtaagtcacctctctacagctcagtttcttcacgtgtagaatggggccaatgatcacatcaccctctcagctgtgggtgaggattaggggtctagcctggccccatcaatgtgggtagccccacagcgggcctggcttttggaccagacccacccttctgacatgggcccccacccttagagtccttctagtgtggatgaggaccctgctctgatctggggtcctcttgggggacttccctgtctgccattctctttggggatcctgcgctgccctaggaagagtgggcccaggctgcacagttggtccttggtcacagaggatcccaccacttcttcagggcctcaaggcaatcctgcctctctctgcacccctcttccccctgtaaactgaggggaggggaaaatcacccactcctcagcagtttctaagttgctttgtcaaattcagtgcccagaggatcctgctgggggtgcgttttaggatgagaccaggagtggccaatggtggggtgtggggcccatcgctcctatatgaagaccccctctgccctagactgctcctccctccccatccccatctccatcccaaagactggagctgctggatctgtggatggaggcgtgccccccgtttcacacattgagaaacaggccccaagtggagccagggaaggctgcacctgggcctctggattccttttgttctgtgtggggttgggggtgatggactgtggagagggcaggagagctgtctggaagggttggtcacctcatgggcaaatgcttggaagctggtctgagtccacggtgcagtgtgtatgtgtgtgtgtgtgtgtgtgtgtatgtgtgtggactcagaggtggatgtcttgtagaatgcatgccccatgaagacaggagtaaaagtttaccaccatccacatcaagctacaggacactcccagctccccagaaagttgcttagttctaggcagggatttcccttattcacagccgggagcagtgcctggcatagtgtgggcactcagcactcagcacatgctcactggatgagtgaatgaatgtgagcctgctgtttgctgtggactaaggatgtttctagatgtttgggcaaataccggatggtgggaagagctcaggctctgaagtctgcagtcttgggcccgaccctgggctcagccccagcctagctgtggggcaagattgtgagccttgtggtgcccaccttgtccaggtattgtgatgcactcgcagcagcaggcattgctttagacagcacaggtgctcgcaaaatggctgtatgtccgggaacaccagctcctgtgggtggctttctgtcctggtggcattgcccacacatacagctgtgtgccaacaagggttgtgcaaataaggttgtgtttggatgtgtgtgatgccctgtttgggggtcagtctctgcctcactcacgcaccctcttctccttttcacagacatgcttcagcttatcaacaaccaagacagtgacttccctggcctatttgacccaccctatgctgggagtggggcagggggcacagaccctgccagccccgataccagctccccaggcagcttgtctccacctcctgccacattgagctcctctcttgaagccttcctgagcgggccgcaggcagcgccctcacccctgtcccctccccagcctgcacccactccattgaagatgtacccgtccatgcccgctttctcccctgggcctggtatcaaggaagagtcagtgccactgagcatcctgcagacccccaccccacagcccctgccaggggccctcctgccacagagcttcccagccccagccccaccgcagttcagctccacccctgtgttaggctaccccagccctccgggaggcttctctacaggtaagggggatgtgtggcgggaggggacacccggggtggggcttccaggagcacaggaagaagcttctgctgtgatgtgagtagaggtctgtgcaggctttagaaactggggctccactcggctgcttgagatgccctgttactagcagtcctggtgtgcttgttgccggggtaggcgcaacctcgcactggaggcctggcttgaagccagtgcatttgcatcagagcccaggcagggactgtccataggaagccacatggggcaatgactcatccaaggccagtcggtgatagagacctgaagagcaggttgaaagtgggagagggaggtctgtgtc

SEQ ID NO: 17422 - DNA, 2300 bp, Homo sapien
gaggctgaggcaggagagtcacttgaacccgggaggtagaggttgcagtgagctgagatcgtgtcactgcactccagcctgggtgacagagccagactctgtctcaaaaaaaaaaaaaaaaaaaaaagaaattggccagtagatcagccccaggggagagtgagccagggtttggccaggccttgagtttcagaggctggccatggccagtggcacccaggcccttcccccttcctcggggcatcttagcttagtctgtgccctctgcccaagggccagccctctgttcccaggtcacaccccctcctcttggaaggccccccccgccccacccccatcagagtctttaatgactctgctgcccctggggctcagagagcaaccgccctctcccatcgcgcttcctcagtgggatgggagggggttagagcaggaagatgagacaaataaagacacaataagaggcaggaatatgtggtaaagccaagatgggtaaggggaggggacaggcttgactgttcacagtggccctggccctgctgtctcaggctagtatctgcttgttggtctcaccacattctaggctcagaaactggggagcaaagtaatgaaagaaccaggctgggaggccatggggaactcatgcctggagttcagctctcagtgtgcttttgggtcaaggacgcttccctgtcttaagtcactcatgtcagagcctttgccaagagcaatgctgtgttttgttttgggggtgagggaacacccgcgggctgaggggagggttgggccatgctagagaggccgtctgttgtccttgaacctcccaaagctgggaaataagggcctgggctggacggcggtggcgaggacaggttgcgagagagacatggctgggttttcttgcttagggtcctgaatagagagcaaggttgaggccgcagggaccccagcccccaatggactgctgagtcgctgggtctgcccagggttcaggcaccctctcaggttgcagccaactggggtgtggaccaggcagaggcgctggcctgcagtttggggcagaggcaggctttgctggtggtctacttggctgcaaaatcaactggccaggctctgatcactttgtgtgtgtgtgtgtgtgtaacttttacctttgacaaaagagggaagacaggcccaggcacctcctcaaaagaaccctagagcctgtcaccccttccttacccatcttctgtcctagggactgcagcccttcctggcttcccagggccctacaatgaatagtgggtcgggactcacttggtgactgctgggttgtgaggccttgagggggaggggcagacttcacccatctggcagagggacatcggtgctggcagtcaggaaacccttatttccaggcctcagtttcccggaagtgacctgttttcaggagtggcctcatcccagaccatcagccccgctgtggtgaggggtggccccttcctggggctgccctagaagggggaggtccctgcacccaccgcagctgccactcggcagcccttggccttaattaaacgcttcttgcgtactaagtgctgcacccatattatctcccttctaccattcgacgccagggagataatgactgtcctgttttctggaggagtaaacggagggttggagcggttaaggctcgctcagggtgccagcgaaccagtgatttcgaacacagagttctggtgtgttgggccaggacttctctgctttgaccctttaacgaagggggcgggagctgagggccagtgaccgccagtaaccccggcagacgctggcaccgagcgggttaaaggcggacgtccgctagtaaccccaaccccattcagcgccgcggggtgaaactcgagcccccgccgccgtggggaggtggggcgggggccggggccgggccctagcgaggcggcagcgcggccgctgattggccgcgcgcgctcaccccatgcccggcccgcagccccgaagggcggggcggggcgggacctgcaggcggggcggggctggggcggggctgggggcggggcggggcggggcgggcgcgccgcagcgctcaacggcttcaaaaatccgccgcgccttgacaggtgaagtcggcgcggggaggggtagggccaacggcctggacgccccaagggcgggcgcagatcgcggagccatggattgcactttcgaaggtatttttggaggcctccccaccagccctttatacaatgcctccgtctcctgcaggttctcctggggtgggcgggcatgcgggctac

SEQ ID NO: 17423 - DNA, 2300 bp, Homo sapien
aacaacaacaacaaaaacagtgatagccaggtgcagtgactcacacttgcaatcccagcactttgggggggccgaggtaggtggatcacctaaggtcaggagttcaagaccagcctggccaaaatggtgaaacctcatctctactaaaaatacaaaaattagcctggcatggtggcgtgcgcctgtaatcccagctactcaggaggctgagacagaattgcttgaacctgggaggtggaggtcgcagtgagccgagatcatgccgctgcactccagcctgggtgacagagagagactttgtctcaaaacaaaaaacaaaacaaaacaaaacaaaaaacagtgaggcagatctgttgtgatgatgactccaaaacaccctccctgcctctgcagagggactgcagaaagggttattcccattttatagatacagtagctgagactcagaagtgaggtattggatccaggtcacacagcaagcaggtgaaaacccagatcacctgcctagctctgaagaaaatggtatttaggcttcacccagcacttcctatcccaccccctccctgggaagggctgtttaaattttcagggaagtcaccagcttcctgcagcctctagagtgttggtgggggtggggcactgaggagaagccagctttgttctctgtgttctccagcagttgttcatctggagggagtgggtcctgggtggacccttgagcagggctacttggggagatgtggtttggcgacccctatgacttctggcgccgctattctgggtaattttccaccgcagccacttctgggagaggaacaaagggagctggatgtccaggctgagccccagggacttgggctctgtggcttctctcccccacacaccccttctaaaatgcatcatgaatgttactcctgcttagggcgtggccagataggctatatctggagtttgagcaaggcagtctgcaggatggcttgacttatgaaggtctggggtcgggaaggcctgaggcccaggcccctgatgagtttcctggactgccctccaccaagggtgcttctctctgcttgcatacctctggggacagggagctcactgccttatcacattcagattcctgaatgttaattctggtttatttcaacccacctcattgggaccccttccctccttcctgccccacctggctctgtccctaggccacagaaccaggttcggtttccagccctcttctcaacagggctgcctgctctgatctagtcccagcttgtgatgatccagggcagcctggctctgatctaaagcacagctacctcttccttgcggcccctatcctggctgctcctgggaataagtgccaaatctggggtcagacagccctggggccagtcttccttgggtactggcttcctccttcaggagctgcactgggcccactggtatcctatccctacagctggatctgggaggaaaccagatgacgaaattccagcctctttctttggccactcctgtcctcaagaggccaatcttctggtttctttgcagagagggggcaggctgatctcacaggtcatgctcccctccacattgtcactagcctcccagcctgcccgtgagaaagcatcattaggcccatgttacaaatgaggaaaattgaggcagagtgatgtaactggcccagcagttacatcaggcctgctcacaacacagcaggcctgggacccctataacttggatcctggtctgtcttgttctaaagagtcaaatctaggaaatgaggaaatgaagtttgggatgggcccaggcctggggcttccactcggcttccttgcttggtgctggagaaacagaggcccagagagggggctcggcttgcccgcgttcccgcagcagccggccagaggccgctgccattgtgcgcgaggctggataaaatgaatgactggagggcgctctggaggaggggccggctgaggggagatttgtggcgcagaccggggatcaggggtcccccgctctctcaaggtggggcggggccgtctatctgggagggcgggtcctccccgaaaggccccgcctccgcctcgaccgcccagcagagctgcggccgggggaacccagtttccgaggaacttttcgccggcgccgggccgcctctgaggccagggcaggacacgaacgcgcggagcggcggcggcgactgagagccggggccgcggcggcgctccctaggaagggccgtacgaggcggcgggcccggcgggcctcccggaggaggcggctgcgccatggac

SEQ ID NO: 17424 - DNA, 2300 bp, Homo sapien
acccagcatcttggtgcactcagcaccctgagtcctgcttggggctcagtagggtaagcagaaacccaaggtcccatgtacccttcaccaccaaaggttgattgtaaaacagatatagctaaaggagtcggagagtggaggaagacctcccataatcagtgacaggcccgggtcccagagaccaccttccctgtcaaatgccactgaggctgctgctaataaaataagaattaatgttactttgtgtttatctagtcttccctctgaggagtattagggcactttggacattcagcttcagagatgctcagtattgttactcaagagagggatgttgaggtgcacaaaatctgagatcgcagagattagtggctcagcctgagctaggacccaggcctcctagcatccactgcagggagacagacaacatgagcccttagcctctgctcaatgtcaaggtttcaggaaatgtttttccaaggacatctgaggaaggaccataggatagaagtgattacaggccactaccccatccctccatgaccactggaggaaaatgaactctgcttgtgctgcttcttcatctccagggtaacctatgaggatcctcaggctgtcggaggacttgcttctgcactagacaatcgaaaacagagttcagaaggggtaggtctttaaccctgtttttctgcctggagtcttctggagggaaagtcaggtggtttggcaaagctggctgggtaattcagcagaaactggcttgcacagggggcagggacaccctgggggagagacccacgggggacaccccgtggaacccaggtagtgcctcattgagtcttcacctcaccccgtgagatgaggccacacatgagcttcccaatccacccaagagaaaacagtcccaggcaggtgggagacaggctgagacacccagagagcagacagcaagctggggttccaatcctaggattagtgtccatttccagaacccctgctgttcctaccacagtggccccaagttctccaggcacaagtctcctatggtcacctgttacagtgccacagggtggtcagtgctctgataaaaccatggcctgcaccaggaaggacaatgctgacccgagccacatctctgatggccatttgtcactggcctagcagagcagtaccaaccccattagaaggcactcgagagccagggtttgtttacagagctggtgcagttgggtggtggctgggagggtgtcctgtggcggtgagggggtgcggcacagtgaagtggagggaatggtatgtgtttgggcctccccaaacataaccatgctttctgtacaatttcggattactgaaggggaaagaatgtgtgtcttaatgcttctcatgagatttttgtttttgcctaacaaagaaatgtgtatgaatgcacgtctgtttgcaggggcagggaggaggagggtccttggaatagctgccgacaacagctggaactcctgtctgggtcccccagctgggctagagagggcagtgatcatctgtccactggacaggaaggtttgcaaagggctgtttgcttactgggtcccaatttttagccttctgaagcccctgtccaatgggcccaggcaggcagcagtgctggtttccacgggatgctccttcttgggggaagggactcactccctcatccatgctggtcttcacctggtggatctgagggcatgcatccctctgcactggtcaccagagggcgcagaagagccagctggctgccttgggtcctcagtgccgtgcctttccacaggagtgggcagtgccacctgaacccctgagactgggacactcaaaatcaatgcagtgctcatggctctgattctcccattacttagaatgtcctcccacctgccccagcgtgggcattagagagcccagccaggggcctaccaggatactgcctggtgaggacatcccctcctcgtggccaaccctggcctgcactgggagcagccctgttgtgcccctatgaggctgacctcatttgtccctcactctgggtccaggacctgccttgtccatgccagggtgtgtcctgctgcacccctgccattatcagcgcccaggcctgggtctgagcccaggagatgtgagtgacttcccgcccttcaccctttgtgtgtgtggcttggactagctccctgttttcaaaggtcctgatgactccagcaggttttccacccagcagtaggcagattgctttttttgagatggagtctcgctctggcgcccaggttggggtgcag

SEQ ID NO: 17425 - DNA, 2300 bp, Homo sapien
ttggtgatgtgttcagcagatgattactgggctttttcactgtgtgtggctcagtgcggggcttgagggcatccttgagtggataaatggtaacaccccctcaagagtttatgatgtggtaggaaggaagaccctgtagccaagctagcaagattatgagacaatatgaggaactaaagagagattgccgtgtctcctgtgaataaatcagttacttctaccagaaacggtttcaaaatgaagtcgttttgaggctgagctgtgagaaggagagacttatccttcatgtcttatccccttaactcactggcaccctccagtgcccaggtaggtgggaacagcatttccctctgctttaaccctgtatggcacactgggacttgtagctttggtcacatgcttgggggccagcctggcagtgttgccagctccctcctctgtagcatcctcagtctggcatcgagatggcaaggggcctggcaggaattgacggagctctgtaagcaagtttgaacaagggcatcagtaagtctgctgttctggaacagggaaggctcatggaagccaggccataaagtgctaaggctctgtcgtcacggggatgttgcttctaagggtagagagggctccaggggcaaccgggggtgtgcgaatttcctctttcggccagccagggagctgcctgggcttctgaggtctcggcaaagtggcagacgtgccaccaaaatatacctaatgcagtcataaaatacactcctgctgttgctggaagtgtaagtaaactgatgtcatatttttggagggccttttactattactaattaatgttataaatgaccataccctttcacctagaaatttccctgctaaggaacctgtcctatggaagtgcttgcccaagtgcatatgcatgtgtgtgtacaggtgttcattgctgcattatttaggttggccacaaaaagagagaccacaatctaaatgtccagcaatagaagaatggcgagatacattatgaaacacacagaaaggaatgaggcagtctgtaccaagtgatggagaacggtgtctggaatattttgttgagaaaaagcaatctggaaagaatcacattttaatattttttaatgatttgtacaagcatgtacttgtatacatacaacagtatgtctggacatttgtctgctgaaaaagtacttgtttcctctgcggaaggaggggcaggcagtgaagagggaacttctactttgaattcggcacatgtctggttttatgaacaagcatgtactccttttgtgacttttaagaatcagtacaaattttttcaaaggagatagaatgtgacgaaaagcacacccagcaggctacccagaggtgcatgtgttccctaggagctcaacaggacctgtcgggccatgcagcagcgcatcgtggagctcatctcccgcgtgtccaatgaggaggtcaccgaggagctgctgcatgtgaacgatgacctcaacaacgtcttccttcgatacgagaggtgggagccggatttctttttttttttttttcccttgaaaagattgttgccataacagagggatttctttcataaacaaaggaaagagagggagagggagagagattagagttggaaaatactcatcagagatgctaatttgttcccggctgacaggaaaaatgcttcttgtcctcctgggaactgagcagcagaagcagcaggaagttgacgtgcagaattaggctctgccctttgtaagcctcaggctgctctgcctttccccactgccccgccacccccagccccagggaggggtagcacttgggggcctctgggccccagagcttctgcacctgctcctttgatgatcctttgaatttgaaaaggattaaagggaaaaaaaatctctagtaagaaaaaggatttcctctttcccatcttaaaaaaaaagaaaaaagaaaaaaagcttttccctttgcaaatgtcaatgttatctagagcattcaggggaagcaggcgggtgtaagtgccggaatgctgctgcttagggaagcgtgcacacattcattccagttctttctgcagccaaatcatttttgagtttgaggtaacaaacctgcaaattctttttcatttccaaagccttccctcaggacaaagtccaaaatgtcttatttagacctagttttaaataggaggaataatggcaagcacagttcccatctcatcacctgatgggagcacactgggctttcatgaaggactcagcataaggaccagaaaggaccatgatcag

SEQ ID NO: 17426 - DNA, 2300 bp, Homo sapien
actaacatggtaaaaccccgtctctattaaaatacaaaaaattagccgggcttggtggcaggcacctgtaatcccagctactcggaaggctgaggcaggagaatgtcatgaacccgggaggcggagcttgcagtgagccgagattgtgccactgcactccaggctgggcgacagagcgagactcccatctaaaaaaaaaaaaaaataagtaagtaaataagtaaataaagtatggaaccttttcctccacaaataaaattttacagtgaatggcagtgtttaaaatcgagaaaagcagagcagcctcagctgccctggccccgtgccatggaggccgctgcagcatgacagtggccttctgcagaaaaacttcctcatgaatgcagcccccttattttacccagggagaagcaggcctggagaggactggagacttggagagtgtatccagtcacaggctacttgctgcctgcagcttcgtccccagcacccagctggggctagggctctgttgaggagactgacatcaacccctgctcccttccatcaggccgccggtgctgggagtatttgtagccatgtttctgagacacttcctgcagtctactgaggaatctggtttggttctcctctaaatccagtgaaccacccttgaggcctactctttgtttcggggcttctgctgtgtggagtgcagatgggggctggtcaccccttgctggaggtttttgtagaggggctctgatgacagactggagtgtgttgaatgctttgggagtcttgaggagggtggggtggtgggagatccccagaaaacattgtatgtggacaggaagatgaataaatgggaagtacgtgttaaagctgtcactgtaaaatgttaatggtacaatctaggtgataggcatatggtgtctgttcactgtaaaattcttcctgttttgctgtatgtttgaaaatttttatgacaaaatactggagtggggaaacatcctgaggccttgaaggatgagtaagagtttgtttgatggaaaaggaaataagggacattgcaggcagatggccaacttctcaggagcccttaagcagtgtggcaagtgcctgaggccacctatattctggaaagtctgaggtgtatttgaagatggcctgtgggccttaggtgctgataccccagtcttctggagggtaacttggatctgtttcccacaacctactgccacactcccctgacttgcacgtcctgtgccttgtgattggcctgcagtttgcatgagaagtgattgacttttttccttctccctccccagccaaggacagccagggcttgctgctaggccacaagccccagaggccacactttcttgtaatgggcctgtttgctggagggggtgggtcctgagctgggacttgagatccttttgctcatcagagattttccgcagacacctggagcgctggagcaaagaggagctcagcagtgcctggctcggtcctcatgtgtgttggcacgtccacatccctggggaggagacccgcacggtggcccggaacagtccatggcagagcagagaggcagaagtttgtttgacctcttttctctgtcctactgcccagcctcccttttccatcctgcacactttggccaggtctccctctggtgcttcttccaaagtatggggtaaatctactgcccaagtgttggccaagtatcctttttttcttttaggaagcaggggaggatggtctgtcaaagttaacctaaatctgtgctcctctgtcagccctgaacagatgctcactgtgttttaacaatctattagaaatactataattattttaattgttcacttcagtcctggctgttggaatccttcacgtgatctatgtgattgtttctttcataagtttggacatttttattttgtttttgtttgttttaatgttaagggcctgccttggttttctgcatcactcctgagtatgcttcattctgtaatgagtgtttcccctgtgttgttggttttcctgtgtacagtaattgtgactgggttttgacctgtgagtgtccattggcgcctgtggccattattgcctggcaatccagaccacgtctggcaggccccaaggcccaggcagctttttgagagcccctctcctgcctggcctggggacatgagccattcacaacagaggagagtgggtattttgtggagttttctctttactggatagtagtgtcccctgcaattaagatcccgtattcacctcttattaattctagcacttgtctgtatgtt

SEQ ID NO: 17427 - DNA, 2300 bp, Homo sapien
ttcataagcaaagcagaaaataaacaaatcactactgctgaaatcaggcccataagaacaccaaagatcctggctcataaaagacgttttaccagtccttcaaccaaccaggaggaatccagttttcaaacaaactaatcagcattcttgactgatcaagtggcataagccactgccttgggtaaaaaggcaagttgctttcttagtaaggaagtcccatatggtggccatttcagtattcctttacctacactttgggctttccttatccatgattctggccatctctggtgtccccaggtgtccacatcccccctataggattaacagataatgctgagtaccattctctctacattgccaacaaaagatttcagctttggtaaacttaatatgaggtgggggaggaagcaacagtcaatgtgcagagtactacaaagaatatcaaaacttgagaactttaagggatctatcacatctcatctccaaacactttgacagacaggggaacttcaaaccagaaagggcacaaggtcatatggagtcactgacaaaaccactgctagagtccaggcttccatgattcccagtccagggctcttatcattaaataacacagcctcccttctttcctgggaggcactgcaggcatgccatccccctgccaagataatcaccctccaagagcccctcctcctatcccagtccctcctacagcacagctgagttgcagctcaaattagcaagtcccggagcagggggcatttctgggagggtgcccagtctgagggttgctggtaccgaagaggagggacaaagatggagaagaaggtgacatcccacaaagggtttgggagaactgggtccttggggcagtggcagtgagcctgctgggctggataaagacacatgcagtggcatctcccaaagcgcattggggaagcagaccagcagttggcaccacctctagcagcaaaaggaagggctgagccttgatgggcagggaagcctggggcatctccgagtccaagttgggcctcaggggtgcctcctggcagagtggcactggcgcgcccgtgaggtggcaccagtgcccgggaggaggcccgaggacacagatgccctgcctgcccgtgggatagcaccggcacccggcgaaggcccagcccccccgggaggtggcaccggcgcccggcgaacgcccgacgaccaggatgcccaacccgcccgtgaggtggcaccgacgcccagtgaaggccagacgaccaggatgcccagcccgcccgtgaggtggcacaagcgcccggcaaaggcccgacgaccaggatgcccagcccgctcgtggagtggcacccgcggctggcggaggcccagcccgctcgtgaagtggcaccggcgcccggcggaggcccgcggtcctcaccagccggatcagcggccgccgttgcccagcctcctgccccacacgcggccttaccgaggcactgccccactggtgtgctgaacgggttccccaggaggaactccatcttgggtggacaacacgcagcggcccgggccccctgtctgccacctaggcctccgctgtaacccgccggactcccgtcctgactgacacttgccccctccccactctctggaacgccgagcttagggcctttggccccgcccccttgccgcgtctctattgggggacacctacgaagcccgcctcctattggtcgttacacctctgtcagcaaagcccccacccaccccgcagcgtccgattgggcggaggagcgagctaggtcaccggagtccctgtcagccgtggcggcacctcccctggcccgcccccaaaggggaagctgcgcattttgattcctctgtatattggtcaatctaaaggattcttactattattggacaaaagacgagtcaatcacgcaaatggacggaacagaggtgaatctaggaatatccccgcccatagaaagtactgattggagaaacatttgttttctctacggctggttggtgtaaggagtgtttcaccacacggagatgtggtcacgtgacttgtcaactttcacccaggatgtctcccttctgacttccccttagcaaccaagtcgcggcgcttggttccccagcaaccgggagacgcgtctgctgcgtggaaccgccgagttcccagcgcttgagaaggtgagacctgggagctgaggctcccggaggacttgcagggacagatagtgcccgacgtaactctttcctgtgacctttttctcggagaacgccggcccggcccttctcat

SEQ ID NO: 17428 - DNA, 2300 bp, Homo sapien
agtcccagctaccctggaggctgaggcaggagaatcgcttgaaaccgggaggcggaggttgcggtgagccgagatcgtgccattgcactccagcctgggcaacaagagcgaaactccatctcaaaaaataaaaaaaataagggaagcaatgtgatcagatcttagtttttaagaagctcactctagcaacagtactgagaattgcaaaagtactgaggtgagagatgaccagggtgttagcaagatgtagatgggagaaatttctagaaacttaatttacatgtagggctaatactcaccaatatccagataagaaaacagaagctagttaaaaaggttaattaacatgcccaacttcatacacttagcacgtggcagagttcattttcctaatcatgactcaactgtatccagggtactggggactatcattgccacagctcacagtgtttctcacagttgtcctgggttcagggccaaggcccaaacagtcctcttctatggggatcttatagtttaccacccaacctgggtcccctttgacttgcctgatgatagtgttgttgaagaccagagaggttggagctggggaaagcagcagagttttacacaactgtcaacggagtggcctcctcacagataacagatccagaattttcctgggaaatgataacctgaagtcaacaggatctgaaaactatagtccctattggccatgaattaataaggagaaaattggttgggcgagatggcttacacctgtaatcccagctctttgggaggccgaggtggaaggactgcttgagttcaggagttcaagaccagcccgggcaacataggaagaccctgtctccatttttaaaaataaaaaataaataaataaataaataatgaacaaaatttttcttaaaaaagaataaaatcaatcacttactgaatgcttactgtgtgctcagtgcacatgcattatttaagtacatgtaagctccggaggccataaaaagggagtcctaatgcccttatttcccagctagggaacctgaggctccagggaggtaaaggaacttgtccaaagtcgtacaatgagttactgacagagacggatacagaacttgagtagccgtattcacatccaaagcggtatatacagtaccaagatgaaatcatttgatagttatgaggtcagttatgatggctaaattctgggaaaagttatcagtggaccgggtacctctctttctatgaaaggaggctggaagacggaaccccttaaaaatccattctggccctgctccctcgggaaatgcttccttagtatttttttttttttttattcaaaagcttgacaagcccaggactaaagtgtcttggctgtctcacacgactgtaaagtggctgggagaggacctacgtgctcattttataaatgagaagggccgggccggcgttctccgagaaaaaggtcacaggaaagagttacgtcgggcactatctgtccctgcaagtcctccgggagcctcagctcccaggtctcaccttctcaagcgctgggaactcggcggttccacgcagcagacgcgtctcccggttgctggggaaccaagcgccgcgacttggttgctaaggggaagtcagaagggagacatcctgggtgaaagttgacaagtcacgtgaccacatctccgtgtggtgaaacactccttacaccaaccagccgtagagaaaacaaatgtttctccaatcagtactttctatgggcggggatattcctagattcacctctgttccgtccatttgcgtgattgactcgtcttttgtccaataatagtaagaatcctttagattgaccaatatacagaggaatcaaaatgcgcagcttcccctttgggggcgggccaggggaggtgccgccacggctgacagggactccggtgacctagctcgctcctccgcccaatcggacgctgcggggtgggtgggggctttgctgacagaggtgtaacgaccaataggaggcgggcttcgtaggtgtcccccaatagagacgcggcaagggggcggggccaaaggccctaagctcggcgttccagagagtggggagggggcaagtgtcagtcaggacgggagtccggcgggttacagcggaggcctaggtggcagacagggggcccgggccgctgcgtgttgtccacccaagatggagttcctcctggggaacccgttcagcacaccagtggggcagtgcctcggtaaggccgcgtgtggggcaggaggctgggcaacggcggccgctgatccgg

SEQ ID NO: 17429 - DNA, 2300 bp, Homo sapien
ccgtcctccctcctgagcttacatgtagtgtgaatagtcacatcagcagcaaatacacatcagccaggtagtttgaaactatgatgaggctctgacctgacctgataaatggggcatgtgatacagagacagtggtttttctggaagttgatgaagaaaggcctctcccaagagctgatagtcaagctgaaatctgaatgacaaggacaagccaggcacatggggacctaggaagagcgtgtctgccaggtggaatatcaactgaaaggagcaagcctgggtgactggggaagagctcagaggctgccgctgagcatcaggagtgagggttctgggggtgggaatcgcccagatgggcagggtcagcccgagggtctgggggactatggggaggagctgacgctaggggtcatgaaagccactagaaggtgttgtgtaaaagtgtgcagtgatagggtttgggttttcaagggtccctctggctgccacatggaggacggactgtaagaggacagtaaagaggcaagcagtccaggccaaggacgatggtggcttgccttggtggtgatgtcgcgacagagagaagctgagaaactggcagtggagtgaatgatgcatgcactaaagcaggccctgacaacatagtatctctgtctgggccctgacaacatagtatctctgtctgggcccttgatgcccacactccttccagagacatagacatgctgccgcgggacccagcgcagacatccgggagagccttcttagcgtgcagaccccagggatggagccaggttcctcaggccgaccctgctgattttgtgaccattcatcagtggatgtgctggtgcaaaccggatggcattgtgcaggatcagaaatggtggttccaacacccccacagtactcattatacagactctaaggttaagaagacctccaggggaaatctcagacttcaacctctacctgtaactgcttctcttagaaagtgccagaagcctccacataattgaacttttggaaacgaccctgttggaaagttgaaaccatctaattatcatgagctcctctttaactgggccccactgggtgccccaccaggtgctttgttagcctattttatctgccagcaaccctgtaaagcaggttagtgtgcccttttgcagatgagaacactgaggctctgggaggttgtcaggcttactcacagagcctcagtccagccacagagctgggctggaccacatctgtcaggctccgagcagcccgccccgcctaccgcgcgcaggtcgttaggcaggtcctcgtccaggtcgccctcgacaatcttctccagggtgctgatagagatctccaggagcttctcgtggtggtgattctccaggtcccggcactgagccatcgtgcagccccgagttaagcaaaggcccgggaggagcaggcccggcgcgtccctgatgctctcagacggcgggagacagactttaagggcccaaggcgagctcggaaattctggctggcagcaccgtccactcacaagctccgaaccctgggccttcctcgactccctgcccctgccccacacctcggacggaccctcggcccctgccatcacactcttctctccctcctgcatggaggctcctggcctctgggttaactgcttctcaccctgtgcatttggcaccacttgttgcctctacaacttgtctccctgagggactgtgagccccaggagggcaggaccacagggctgctgctagctggagcacagcagtttgccccatgtggagtgccctgagttcgggtggaagaagggttggccatgctccgatgttggctcctcaccctaacatttcacctgatgtactccttatagtgtcttccacgtgggggttgcctcaaccccagagtgtgcttgcctgcaacacagggggcgtcatttcctagtgaacatcactcatatgagaacaatcatgctgggagcctactgcaaacagtttggatgttgtccctctgggcatccaaaccacagctctaaccaggccatcattgttctgagggtcgggaaacctcctcagaccctgtggaacattcttttgtccagaggccgggacaagcccaggggctctgtagcacctccccatggggaaggtcatcacagaaaggatataggctttggacattttcgataaacagtcctaccatgtcaacaatgttcctttcaaacatgtttatagtctcctggaaatgttaaagaacacagttaacatgcatatttagatgtccagcacaga

SEQ ID NO: 17430 - DNA, 2300 bp, Homo sapien
tctttactggcccttcatggcccatttccaggcccttcccctgagtcctgcaggtgaaacttcagctccctgctgcatccagcccccttccccatttctataaagttatagaacttggctgggcgcggtggctcacgcctgtaatcccagcactttgggaggccgaggtgggcgggtcacaaagtcaggagttcgagaccagcctagtcaatataaaccccatctctactaaaaatacaaaaattagcagggcatggtggcagacgcctgtagtcccacctacttgggaggctgagaccacaaaatcgcttgaatctgggaggcggaggttgcagtgagccgagatggtgccactgcactccagcctctgtgacagaggagactccgtctcaaaaaaacacaaaaaaacagaagaagaagaaaaaaaaagaacttgacagccagaaagatcctcaaaggcaacctagtacttcaacgcatggagaaaaatgaggaagtagttgcatgcccaagatcacacagacctcagaggttcagccagcatcagatcctagatttgcactcctgccacaatgccaaactgcctgtgaagttctggattttctaaaacaggcagtgtcagggaaaagtccctcataccttgctgtcaccctggacacgttctagatacccaacactctcccacctttttgctgaactcctactcatctatcatggctcagcttaaacaaacgccctttcacccaagacccattctaaaccctgaacatccccaagatgggagtaagcgattctctgtgttctcacagtttctttgtatgtcccttatcaggatattataaaccacaatttaatcagaatattataaccttttgcaatgaacagtgaacatcattcaggtgggcctttttcttctttaattgagcttctctaccaatacatacaggtgggtcttaaagacaaccgtgcctcctgcctccagcacaataaaactaattgaatggtgggagggtgttactgctcttcattcactgaaatgagtcattctcactcttaccctgacaccactcaccatcagcaatgaaagagccactacttctaagcttcatcagagttggaggtggaggtgactccacagtcagaggtggaggtgtcaatttctatttaggagagaaggctgcagatggcagaggttgtggtaggagggaaagtcaggaaacctgcagcagaagtgcccgggatggaggaatgaaggcccaggttctaggtcccttctgggcaggtcttgtgttgggcagtggagacacggaaaacagtcagacagacaccacaaacctctgagagagtctgcctgtaacccagacgaagtcctgattcagagcccaaacttccccttttgaaaacaaagatgacacctgctttccttattaaagggagggcagccataagctttgagaaaacctgcacaggccaaatatcaattactgtatcgtgcgtgactcgctgttccctctcgggtcgtctgcccttgtctgggcttcactttctcatctgtaaaaagacctgactggcctgcataacctcatgagcctgaaccctgcctcagttacttcgctttgcacagccgaagcccgaagcccaccttaccccagctcggccccaacccaaaagaacatgtcatggtcttacctgtcggcggggcgtaagcccgggctggagacgggatggttggccccggactcatagaagcgctggggccacccgccggccgattcaggagacggcgtcccccgtcccgcagccggaggcagctcctccacatcgcgcccgagggtctgggaagatgcgagacgcgaaacctggagcaggaaacacagagcgatgggatccccaaagccgcacggtcgggctgtacggaaacctctcaacgcctcctcagagccctcaacctcccttggacgccgccatcttccgcatgacacctacggcgcgccgtcgccgccgcgcgcctcctgcgcacacccccagtcaatcagcatcacaaacgcacctcgccccgccccctccacgccgcgcctcggcgaggagactacaagtcccagcgggccgctcgcgcaccgcgccacgtgttttctcctcccgccaatgggcggaagcgccgcctgagcctgctcccgccccccaggctcgcctgagccaatcggaaggggcggggtgtgtgtgtgtctgtgtgtgtttgtgtgttgtgtgtctgtgagtgtctgtgtgtgtgtatgtgtgcgcgagggcaagtcgggagg

SEQ ID NO: 17431 - DNA, 2300 bp, Homo sapien
aaggagagcttgaggaataaatatactgtacattccaccctcacaccccggggggtggggcgggggggaggcagtggggcagcacacagtgcctttcagagggacaggtgtttggaggggcttctgggaacagcctggcagatgaggtgtcagactaaggaaaaaaagggcaaagggaaggggaaaggggtccttagtcaggcaggggtaggtatagaggaggaagagttttgtggggaggggagataaaagagtattcaccactgccactccatttcagctggcaaaaagtgtcaagcctgagaggagtgaggtgtgggaaaggcccagacaagtgaagctgtacttccgaagctgatcagggactggcagcaggtattcaggaatccaggtcaaatggggggaggcgactggacatgaactaaaattgggtgagttagatttcccagtacatgggtaccagagactaagaggaagccctgtgcctgtgtagagaaaagttaagaacaggaaagagggtcccctggaaccaggatcgagcaagacgaaggtatggggtggggaagtctggatagaggccaggaagactgggaaaagactgcaaatggtcccagagcaggggcaggaggcctgggggtggagaagctggaaggagctgggtgcctggaccatgaagagacagaagcagtgagtggaacaggggacccaggaggcaacatcccaacagactgtgagcagcactcagggagtgagtgcctggtcttgaggtgaggccagggcctgaccaatcagttgcgggttaggtgctcccccgtctgggggtctgatgaagccctcctaaggagatctcaggaggaggaagaccccaaggtctgcggattcctggaactgaggaaggggcaggaggacatgtctcaggtctgagagaatctgacgtgggcccagacatggggagggtcccaagtctggtgaaaccaatggagagttcttcagggtctgaaaagggctggtggcagtccctgatctagggacgacaggtcatggggaggaaggacccaggccttctccgagtcatgaggggcttccggatcccagacgggccggtcacgggcttcaagtctgggagtgttcggggtccgccaggagccggtcacgacgggctctgggtccgaaggggcaggtcagggctggggctcggagagtgtgagacacaggctgggaaggtcccgggtgggaagcgccgggtgcaggaggccccggcggcgagggcctgttccgcggctgcggggtcgaggagccgaagcgggcacggcccgtgagcgccgcgaggaggccctcgggccccggcccggcccggcgctcacctgcagcaccacctctacgtcgtacgagttccccttgctcttctggtggccgcggaacttggagccgctgtagagcaggctggtggccacgccgggctgctgggtgttgatgggcggcggcgggatgagtgaggccgcggaggcagcggaggcaccggccggcgggggacactcggtgcggaccggcatcgcggggtcccccggagccagggctggggggagtgggagaggaaccgccgccgccgcgcgggagccgaggagggtggcggggagggagaggccggggcgcgcacgcgcggggtgggggcgggaggggcgaccacccgcccgctgcctgcggagcaagcgctccggccgccaccgggacccagggacctgcgagcagggcctcccagtcctgagctgggtccccctcccgacttgccctcgcgcacacatacacacacacagacactcacagacacacaacacacaaacacacacagacacacacacaccccgccccttccgattggctcaggcgagcctggggggcgggagcaggctcaggcggcgcttccgcccattggcgggaggagaaaacacgtggcgcggtgcgcgagcggcccgctgggacttgtagtctcctcgccgaggcgcggcgtggagggggcggggcgaggtgcgtttgtgatgctgattgactgggggtgtgcgcaggaggcgcgcggcggcgacggcgcgccgtaggtgtcatgcggaagatggcggcgtccaagggaggttgagggctctgaggaggcgttgagaggtttccgtacagcccgaccgtgcggctttggggatcccatcgctctgtgtttcctgctccaggtttcgcgtctcgcatcttcccagaccctcgggcgcgatgtggaggagctgcctccggctgcgggacgggggacgccgtctcct

SEQ ID NO: 17432 - DNA, 2300 bp, Homo sapien
tgtctcgaactcctgacctcaggtgttccacccgcctcggcctcccaaagtgctgggattataggtgtgagccaccgtgcccggccggtatataccacattttatttatccattcattatttagtggacacttagattgcttccattgtttagctcttgtgaataatgctgctgtgaacatgggtatatctgagttcctgctttcaattccttggacatatacctaggagtgaaattgctaggtcatacggtattgctatatttaactttatgaggaactgccaaactgtttcccacagcagctgcaccattttgcattcctaccggcatgtatgagggttccagtttctccacatcctccctggcacttgttatcatgtctctataattatagctaccctagtggatgtgaagcagtatttcattgtagttctaatttgcatatttttgatggctaatgcatatttctttcctgataatttgtttttggtaagaaataagccgctttttcctacgttcttccacactcctgtatgaaacaagtaggggagagccaacttgctagacattgactctaaatgtgcccgaggttgtcatcccagcatgtagattgtctgcccctatttctcctccctctgcatgactccctggatcacctgccaacaggggaggcaaacacctcagatatcactaatgttttccaagcctaataccgtacctaggaaagtgagaaaatttaaatgaaaggtaaaatacagtttaaggcagtagtgaaatgaatttttctacgctctctttagataccatgagaatcagtttatgcctatgctagccataaagttcttaggatatgagagcctggcattacatgctacagcaggagaggtcagagcagccggtgaggttagggcttgggcgtgggtctccatcttctcccacagcttattgaggtctcctttttataaaacataccatagttaacttcatgattagagcagaatgaaaaaaaacattcatctagtgcatggttcaggaggattaaccaaaaaaagaaagaatgaatgaaatcaaactaggttcaacttgagaaatagaaaatgaatgtgcatttcagtccaagtatgtgacttgttgggtgctctgctttttgaggggttactaatgtcctttgctcagggtgcattagatgactacctcccgtttctgtctcctcccccttgcaggtatcagtccctcaatctaacccatgttcctgaacacagtgcacccatctatgaattccggtgacaacggttcagaacagcaaccaaataaaactgaacttggcaaaaaagaactttgccgagaaaattgtgtacctgccagaaccaggagaagtgtgttcctgtttcttcacgagcagactcgcatcacaaagcatgaatgttaacccacagaatccaaggagcatggctggcccgtggggcaggtggagggagcagtcttcgttcttcctcccctcagtggcagtttggtcttcacctgtttttaagctaccttaaacgcacttttccttcctgcacagctaacttctacatcactgaaatgcccattccttcctccgtcccacctccagccgaatagaaggtctgctcccggatcaccctcagccttggtgctcagtggtcccgaggccctagacccccaccccccgccagttgctttgtctggtagctcaagagaaggcagagccccagcacctctgtgccccccagagctctgtgcagggagttggccagctgccgcatcatcggccaccaagggcacaagaggcggaggctccagtccctgctgggctgcctcagtcttcagtgctgattgtgtcacgggtcagcgtgcgctgctgagccctgtactgttaacagtgcaaagctagtgagtagctgtcaggttccctgggcctgccatcagggatcactaaatttaaggcttccagatccctggcaggaacagattccagtcctgcttactcagtacatttgctccaaacttttcaacttgagggcaatactaaacttaaaaataagagtttttttattacaaaattatttttatggtccctttaacgaggaccctatggcaaatgcacaattattcagaattacattttatcgttttcacattgaaaacagcaaatgttgacttagtaatttttatatcgatatctatatgtatatgtatatttaatcaaccagcagttttgaaactagtcatcctggtacaaaagttttgcagcattgcctaaattatagtgctcaaca

SEQ ID NO: 17433 - DNA, 2300 bp, Homo sapien
ctccctacttaccccctggccactgtcattgacaattttgatgaaccaaggccaattgccttataaaatgttccactttctacatttatctgatgtttcctcatgcctaaactcagttacagtatttttggcaagaattctacataagagatgctgtcagccagatgaggtggctcatgcctgtaatcctagcaccttgggaggccgaggtgggaggactgcttgagaccaggagttcaggagcagcctgggcaacatagtgaaaccccatctctacaaaaaaaaattttttttaattagccaggcatgatggttcgggcctatagtcacaattactcaggaggctgaggtgggaggatcacttgagcctggaaggttgaggttgcagtgagctgtagtcacgccactgcactctagcctaggcaatagagggagagcctgtctaagaaaaaatgtcacgagatgctgtctactttacactgcttcgtatcaggaggcatctgatggtaggtgatcctgagttggagtactgcgttaaggtggtatggggggcaggtgcagtggctcatgcctgtaatctcagaactctgggaggccaaggctggcagattccttgagctcagaagttcaagaccagactgggcaacaatggtgaaactccatctctacaacataatacaaaaatcagccaggcgcggtggctgattttctcccagactgaggagggaggatcacctgagcctgggaggtcgaggctgcagtgagctgtgatcacgccactgcacaccagcctgggtgatcaagtgagaccctgtctcaaaaaaaaaaaaaaaaaaaaaaaggtggtatggggatccactttttttttcttgagacaggttctcgctctgttgcccatgctggagtgcagtggcagcatcttggggatccattttgaacctcttcaagcttgtcccacctgaggtctgcagccacatgtggcccaggaccactttgaatgtggccaaacacaaattcgtaaactttcttaaaacattatgaaatttaggcagggcacagcggctcacgcctgtaatcccagcactttgtgaggctgaggcaggcagatcacttgaggtcaggagttcgtgaccagcctggccaacatggtgaaacctcgtctctactaaaaatacaaaaattagccgagtgtggtggcacgcgcctgtaatcccaactacttgggaggctgaggcaggagaatcacttgaacccaggagtcggaggttgcggtgagccaagatcacaccactgaactacagcctggatgacaaagtgagactccgtctcaaaaaaacaaaactaaaacaaagaaaaaaaaactgaggttttttgtttgtttgttttttgagatggagtttcgctcttgttgcccaggctggagtgcaatggcgcgcaatctccactcaccgcaacctccgcctcccgggttcaagcaattctcctgcctcagccttcccagtagctgggattataggcgcgcgccaccacgcccggctaattttgtatttttagtagacatgggtttctccatgttggtcaggctggtctcgaactcccaacctcaggtgatccgcccgtctcggccttccaaagtgctgggattacaggcgtgagccaccgcgcccggccaaaacattgagggtttttttggcgatttttttttaagctcatcagctatcgttagtgttggtgtattttacgtgtggcccaagacaattcttccaatgtggcccagagaagccaaaagattggacacctccatttatagtataaaatgaaagccactaggctttcggctcagccccttttccttacactgccagtcagctgcgctcagggacccgcagttcagagttcaacacgggcagattccctctcttccttgcttgctcctgccagccgcagccgtgggccagtacagcatggcccggccccgccccggctctttccagaggtccgcagcctggccggcccagcgggcggaaccgatagtgtctggcacttggctcgcccggactctgaatcctggagcaccaggcgcccacgagaacgctgttctctttggcttccgggcgcacgctactctgtcgccgccgtcagaccggaattgccggtgccgccgccaccgctgtctgtgcgcccacctctgctgctaccatggggatcttagagaagatctcggagatcgagaaggagatcgctcggacacagaagaacaagggtgagggccggccgggcggggccttcctttctgcctg

SEQ ID NO: 17434 - DNA, 2300 bp, Homo sapien
tctacatgtaaaggctctggtgtctccagagccttggttctcccctcttcttgctgaaatccctgctggacttcctggcagtcccttgctcctctcaaggagtgaactctgggtgtcagggttcctagcctttgcccatggtcccgtcacagcccccggccatctcgccatggcagcccttcactaatcacacatgctgcaaccctccacagagcacaggcttgccagcccctaggagagatgctgaccctggttgagtgtgaccatgattggtgcccagaggcactggcagcagaaacatcaggctgccatcatagtaatgggcttgtttccctgtgggtaccagcgggccacctggccagtggaggttatccgctccaatagtgagaagtggagaccccagcctctgaattcacaggggcccctgcctgactggccgcctccctctttgcagctgcggcatgaagctgaacctggactatctgctggagatgctttgggagtacttggccctgacctgcatctacaccaagaagagaggacgtgagttgcactgcgcgtagctgaaaaacaggctgagcttcatccctagaaggctgccaggccggtgtgtggtgcccagagaccccagcaccggctctggcctggcttgtctagacacacctcagctcttttcccttctcagcactgggcactgctggttttgagggtaccctggtggggcaaggctaccttggggtccccactggctgtagcagtcagtgccctcctgacctcccctcacagtgacaggccctaccgcaggagcattagggacctgaatccacaggagccatccccatgtctaactcctgcccatcctcctggtgcgcacacacacatgccctggggtcccaacagctgaattcggagcagtttgcatcaaccctgactttggcaaggagtgagctacagcttccctcactagactccagcatccctttgcgccctgcccgttcagtccaggtcctggtctctgtcagtgctgtcacagcagatgggtggcaggcactgtgaatcctagacgtgatttattttgagtcactgtgttaagatcaaggtcgtagaagatggtacagggatctatgtggagggtgtgctggatgtcagggggaggttaggccaaggcaaggagaccgaaagggcctctgtggccagctcttccctcgcgcagaatcacaagatggcagtgtgggccctgatgtgtggctgacgttctccccatcctgccctgcagagaggccagacttcacagacgccatcattctccggaaaggggcctcagtggagcacgtggtgagttgacaagacctgccgtgacaaggggtgggagctctgcatgccctttggggctctgttctgcctgaggtgccctgggctgggggtgggctctgctggtctcactctcagatgtcaacgcaggctctggagttggacagcctggggctgcgtctgcagcaccccttcttagccatgtgccgaggctctgacctctactgtgaggggggtgtgctgcctgccccctggatagtcaggaggacacgttgaatgaggtccagtgtgtagggcactcagcatgctgcctggctttgcagagatgccagtaaccctgcttccatgccattcaggcatcagtcaaggagagtagggagtggcaccagcttaacacagaggtcaggacagcggcttcaaggaggcaacctgagccggcttataggactagtgggtctggcagtgaagagttggggtggggagcatcccaggtaggggagcaggcatgcacaggccccaggggaggtggtctgggctcagggagcaagaggctgcctttccctgtccaggattctgtcacctgaacatgaccctgcaggcacagatggtggccaaccttcaggtcacatggccgtcctcctgggctgatgctttcctggtgttgttttcctctagctcatttcttcttgggatctgtatcctggaggcaagggatgctgtagacccagctgtccctgcagccccttaggacagtggtggcagggcctgtaatctggtctcatgcattcattcattccgcaagcccagccccaggtctctgagtgccaccctagaggtgttaaacaaaggaggccaggcaaagtcccatctccctcagggcctaggcttgagatcacagcaggaggagccaaggagactcacgattaccctcctgaatcccttcagtcactcacaagtggcaatgctgggcaagctgagtaaaacaaaac

SEQ ID NO: 17435 - DNA, 2300 bp, Homo sapien
atgtctgtgtgtctgtcctccatagaatgtacatgccaacccagggtagacatgggccttccccacccttttttttttctggtttttttttttttttttttttgagacagggtctggctctgtctcccacgctggagtgcagtggcacgatcatggcccagtgcagcctcgacatctgtgcaaaagcgatcctcccacctcagcatcacaagtagctgggactacaggcacacaccaccatgcctggctaatttttcatggagacaaggtttcgctatctggcccaggctgtctcaaacacctgagctcaagtgatcctcccaccttgacctccagaagtgctgggattacaggcattagccactgtgcctggccctccccaacctttgagatcagggatggtcagacaactgcggacatcctgctgcctgaggcccccaccttatgccatggcatttacccttcaggacacacacgcccagggatatcttccttgaccttggccagtccaggctgaggtgacccctctgcccccattcctcacccagggcaccagcaccaagtacagtccgcagcgggtgggcctgacccacaccatggagcatgaggacgtcatccagatcgtgaagaagtaacggcgcctgccgggcctcccgcccacctgcctcgtctccctggggaggtggtcccactgggacacacaaacacccaaacagaaaaatacaaatacacgtaccccaggaaggggtccctcaagtctctgctatttacagaagtttcttcagtaggcagacgaagagtgtgttggggcaaaggggctcggttggaggcatttcccataagactgagccctctcatgggggttttgagtttgtagtgctgagcctgcatctgtgcctcccagccccctgcactgagggagcaagttgcccacatgcccgccagccagggcctaaagcagatggcatgctcagtgccaggctggtagctgggcctgtttgggtccctggaggctgtggctgctgtcatggcacctcactccctcagctcttgccagcttctctgacacttgggttgggggcccttccaggaggaaacccccttgggtgccccacacagggctctccatgatgggaaccagtggttagtggcttcaaaggcccagctgacaccctccacagcctaaggggtgtcctaaagtgcctccccctgtattccccctcccagggcagcccctgcccagcacaaaaccccaggaccctggctctgcacgcctggggcagggacttttgagtttaggatctgtattttctaagtccccagttctcctggctctcctttctgaaataaaggattgaaaacggttcctgttcagactgagaacactttgtaaacttgctgaacagtagccaggttgagtcaggtgggcacaggtcagacattgggcctgggggtcggagagggtgcagcctgggccccaaggcagacccaggccttgtgtggcaaggagactgcagggttcctcacccaggcacaggcaggctctgcccagggggttggtgttcgggggtgtcaggcccagactggcccctccggaggggcctggctgccaaggtgggcagcatcccaggaggcccttgtgaccatctgggctggcagggaggctctgtgagaacaaggtggcgggtcatttcctgttgcctcagaagtcaggagtagaggggctggcaggggctcgatgagtgcctaccgtgtgccagggactgtgccaggccccccacagtgttctgctgtcccccagaagctggtgtaggctgcacagtttgtgagtgcagaccccggatttaagacctctgagcagcggggaaggcttcctggaggaggtatgccttttgagatggatgcagcaggttctgtgaggctgccaggaggggtagagttcccgggggcctcgggccccgctggagtgtggagcaggcccatgctcagctctccaggctgttcgtggctcccctgtcagctgctcactcctttccagagacaaaacaggaataatagacatcattaaatatacatagggccccaggcggtcggcgtggtgggctgggcctcccttccccataacactgagctgctctgctgggccaaccgtgctcctgggccagccagaggacccccatgaggcggcatgcaggcggggagcaggccacagaacgcaggtaaggagaccttagcctagagtccttggggtctgtcactggccaccctcgcatcccaggctgcaggggtgataagggaag

SEQ ID NO: 17436 - DNA, 2300 bp, Homo sapien
caacctggccagtgagaaggtcatcctcttctcagcccgagcgcaccaggtcaagaccctggtagatgacttcatcttggagctgaagaaggtcaggatcttctcacagatcttccctccacccaggctgagggccagcaacagggatctccctgttccagggaaatatgactgtgtccatagatttctgtctaccttaaggcctttgcactggctgtgccttccacttggaataccctttctcccttttgcctgctccttcagaaaacctttgccagtgccccctgccgggtggcacagcacctcctctgaggtctgcagcaattgtactccttaccctcctgccttggctgcatggcccgcccactgcatcacaatctctttccatcccctctgcccactcctgactggcagcccccaggcctagggcaggtcatctctgtgccccaggcccgaggaagacttcagcaggaaagtctgtgagggattgagtggggaaggcctatgtgtgtgccctaaagtccatctgtgtccctcagactcaccctccagccctttcttccacccagaatgcccttccctcttctcacctaatgaaggctcccttccctgatgagtcaggaaggatgtgaggagcaggggtggccctaggcctctgggagtggggtgatagggctgttgccctcaccctgcctctggctgacccaggactctgactacgtggtcgctgtgaggaacttcctgcctgaggaccctgcgctgctggctttccacaagggtgacatcatacacctgcagcccctagagccacctcgagtgggtcagtgccactggggtgggctgggggcaggagggggaggctggccaagggggcctccctggcagatgctgacccgagcctggcccataggctacagtgctggctgcgtggttcgcaggaaggtggtgtacctggaggagctgcgacgtagaggccccgactttggtgtgtgccccagaacctggaaccccatacggggcgcatcctagtttcacccactcgtggtgcagatgcacagtgagggtttcttggtgcccgaaagtggcctgggctggtcaggtctcctaaggtccagccgtggcctgtcagtatctgttggtggccagacagcccagccctctgctttgcctgaggggtctccgtgggcatttccatgtttgtggcctgaatctctctttatgtctccacatgacctgagagtccacaaaccctgctttgcctttttgcttcacttcccctttatggtcctgtggccctgagaaaatccctttctttccctgagcctgtttcctcatctgtaaaatgggtttgatggcctggcctgcctcatagagttccagagaagggttaagaatgttcccaaatctccctaaaggacccccttagtcacaagacaagaccctcctgtttgcctcagaccttttacccacccctaggctggaggttcgggaccatccacgggcgcgtgggccgcttcccttcggagctggtgcagcccgctgctgcccccgacttcctgcagctgccaacggagccaggccgcggccgagcagccgccgtggccgctgctgtggcctctgcagccgctgcacaggaggtgggccgcaggagagaggtgagaccagtgtgggtggggtggggcggggtagaccagggggaaggggccgctgcagaaggggtgaggcgagtggggataaggtgggccaagggcctggccaggctcttggggcgtggctgatcttggactagtgtgagggtgaaccaggtagagtgagccgcaggtgagacccgggagatgggaccagagatggttggaggtgtggccaaatggggtagggaaggatgaagatcagctggttgtaatcaggacaatggggtcagaccagccggggcccgccagttggtgaagtctactgggtttggggcggtgccaggtgagtgggcggcttgtggagctagcgaggggcggggtcagctgtgacgtggcagttgcggaagtcaaccccgggcaagggcgtggccaagtggggcagggagccaggttagcacagcaagtaaaaggcgtgggcgggctgaaggggtaagaacaacgggatgcgggtgggtccacagggatgggtgggtgggcggcttgagaatctgggtccagtcagctaggggttgcgttgtcagttttgaccgaagggctaggcgtggtgtggccggactgggccttcctagctccgcctcttctgcagggtcccccagtcagggcccgctc

SEQ ID NO: 17437 - DNA, 2300 bp, Homo sapien
gtttggacgattaattgggctagtatatgcacaggtcctggcacatagtaaaaacttgataagctttttaaaaaaatgtccattccaggctgggcgcagtggcttacgcctgtaatcccagcactttgggaggccgaggcaggaggatcttgtgcccagtagttccaagaccaatttgacaacatggtgaaaccccatctctgctaaaaacagaaaaattagcggggtgtggtggtacacgcctctacatagttccagctactcaggaggctgaggtgtgggaggatgtcttgaacccgggaggtcgagattgcagtcagccaagatcgtgccactgcacttcagcctgggcaacagagactctgtcaaaaaagaacgaggaggaggaggggaagggggagagagagagggagacgggtgataaggaactggcatgggcaacagccatggcaaacagcctgggcaaaggccaggaggtgagacacagtatgtttgtagacctggcttacaggatgaggaccaggctggggctcagtgtacatggaaagagaggagaggaggagccaaggccagaagagtcttgaagaaaagctttgagtgccaaataaagcaggggaactttatcctgggagacatgggagattttccagcagatcccccccgacccccatttgttggagccctccagtgcatcctgcacggctacgcctttttgttttgttttgcagctctgtcgcccaggccggagtgcagtggcgccagctcggctctctgcagcctcaatcccctgggctcaagggatcctcccacctcagcctcctgagtagctaggaccataggcgcgcgccaccacgcccagttcatttttaaaaattttattgtagagatggggttgccatgttggccaggctggtctcaaactcctgggctcaagtgatccgcccgccttggcctcgcaaagtgctgggattacaggcgtgaggccccgcgcccggcaacgcctttgctgactgcttcaaaacttttttgaattgactgtagtcattatctatagcttagccttagccttgcgcccgttcgtttcctggagttttcttccagagtccccgtaggaggtgcccccacgcccatctccagcaccaaggaggctcgacgccaaccccagcgcgcccccacgctcgccgtcaccgggacgtgactcgtgaaacgtccgctccgggcggcggcggcagcggcggcaggctggcttgtaccccgacaacgcgcgtctggcttctgccggacgttcctatctgggttcagaactggggccgggtgctgcaggtcccgcagtctgagaagttttcgcgggtttcagaagtttccttaggcgttctaagggctttactcaggtggagtctccattcaggcacttatttaaccacccatttctcctttaggggtcctcgctgctcgcccagccgctaattaagtgacggacacagtagctaaggagactgcctgattgacacgcatgattaccaaccgacttccggaaactccagtcagggcctgcccggcgcgtggcccacggcccaattaaagaagtggaagcgccaaagggggaggtaacggagcggcctacgttgtggcggttccctggtgaatgcgccctggggttgaggcgtctgcgggcgttcggacgatgccgtgacgcggcacggcgacactgttggcaatatgagcgcacccctgtagagggagcccttcggtcctggaggcggcgcggcgtgaagacaggttgctatttgagagcgttcccttgaagcccctcagagagtgggggaggggcggcggacggcaagcggttcctgtctgcgcttgcgccggcgcctctgccgacccggcctgcacgcacgcgcatgcccgtagcgcgcggagccgcggtggccggcagcactgcgcgtgcgcggtgaggagcccgctaaggagcggcgctggcggacgtcgggctggctgcccgtgacgtcgtgcggagagctttaaagtgcgggccgggccgggcgtccgagggtctggtcgggagtcgggccgcgtctccgcagcagccctccgcggcatgaggcgctgccggcgcccctgccccgcgggacgtggagaaggtggaggaggaagaagccccgttgtcgccaccgttgcatgacccgccgctcctgaggccctaccccacgcccggaccctcgacgccccccgccgggtcccccactcacgcatgggggttcggcgctaaggacccccctccctccgggggccccggggcg

SEQ ID NO: 17438 - DNA, 2300 bp, Homo sapien
ctgcccgtgacgtcgtgcggagagctttaaagtgcgggccgggccgggcgtccgagggtctggtcgggagtcgggccgcgtctccgcagcagccctccgcggcatgaggcgctgccggcgcccctgccccgcgggacgtggagaaggtggaggaggaagaagccccgttgtcgccaccgttgcatgacccgccgctcctgaggccctaccccacgcccggaccctcgacgccccccgccgggtcccccactcacgcatgggggttcggcgctaaggacccccctccctccgggggccccggggcgcgtccccttagagccatgcccggctgccccgcccgccccggaggaccctagagcagcgtcgtgggggccatggcggccgccagcggctacacggacctgcgtgagaagctcaagtccatgacgtcccgggacaactataaggcgggcagccgggaggccgccgccgctgccgcagccgccgtagccgccgcagccgcagccgccgctgccgccgaaccttaccctgtgtccggggccaagcgcaagtatcaggaggactcggaccccgagcgcagcgactatgaggagcagcagctgcagaaggaggaggaggcgcgcaaggtgaagagcggcatccgccagatgcgcctcttcagccaggacgagtgcgccaagatcgaggcccgcattgacgaggtggtgtcccgcgctgagaagggcctgtacaacgagcacacggtggaccgggccccactgcgcaacaagtacttcttcggcgaaggctacacttacggcgcccagctgcagaagcgcgggcccggccaggagcgcctctacccgccgggcgacgtggacgagatccccgagtgggtgcaccagctggtgatccaaaagctggtggagcaccgcgtcatccccgagggcttcgtcaacagcgccgtcatcaacgactaccagcccggcggctgcatcgtgtctcacgtggaccccatccacatcttcgagcgccccatcgtgtccgtgtccttctttagcgactctgcgctgtgcttcggctgcaagttccagttcaagcctattcgggtgtcggaaccagtgctttccctgccggtgcgcaggggaagcgtgactgtgctcaggtaacccacccgggtggagggggcggccctgcgcctgctgccttagctacccaccctggcccagaaagcagcagcccgtaggagtctgcgttttttacagttctgaccagttcttctgtttgtagattgtagggagcgagagaagggttttgtgtttaagatacctatagcaagaaaatagggaaccgatgtggaaatcctgtccccgaaggcaggtttgacgggatcactgacttggctgagaattcatcgaaagccatcttttcagaaggctgttccctttgatttttttttttcccaccatccatttcttagcataagtccctttgtgattttccggttttccattctggccttccatttacaaatctatgctttaaaattttttttttttttaatttatctaaaagtctttcttgttctgccatttttggattccttaacagagaaagtagtcacaggcaaaggccccagagattatttaattgaagcacattctccattcccaggagggggagtgacttccctggagttgaacagattagtggttgggccaggcatacagagcagcacactcttaaaattcttccctcctggctgcagaagagcccatcagttctttgtaagaacgtgttacttgtagtcaggactgaatacaacagaatacagctggtctcttgactgtttggccttacagttgcgtgagcagcagaacttaggcttttggcctatattcggttcccagatcctgctgagaattagctcagtgccctggcccccagaggagattgccattgggaacacctttgctgtttatgtgaagtgaaaatttatttggaagcggcctccttccagtcctgaaaaaggtaaacctagtaatgtaattcagtaatacccaaaacatcttaggtttagaccgcagctgttctcagagcagcttggttgaccaccaccaaatacaaggttgaggacacactgggcttttgtcgtgagcagcccaggttctgaagtgagtcagtagggccaaagtcatgaggagaagcagggtccctggagccttcttgatatgagattaggtcatctgtttcatttgagtctaacagctgaggctgcttccatgttggggatggcagcagagccttgtaatgtccaagac

SEQ ID NO: 17439 - DNA, 2300 bp, Homo sapien
atcccaaagcaaatgagagaaaagctggattcaaagcctggggcagcacttttcaggacatggctgagcctcccacactaacaccacagccaagtctgaatccagaaagggttgacagggactgggaaagctttaggactttactattctgaggaaaagatgaagagaattttcctgatgatgcaatcctgttgctgatcactaacagacctgcatactaagaactcgaaacttctgttcttaaaatacagggtgggcatgtgttaaggagagtagtagtcccaaaaccaaaaaaaaatgccttgtgatcccctcattaagcaccagaccactactagacctcctgacaaccaccctgagggccaatgactacgcagaaaattaatatcccgctaagagaccaaatggtccttgtgtgaggtaatttttgcactgagaacccgtcaatggggtcagaccccaacctgccttacacagcaagcacccggagagggtgtgtcctggaaatcccatcttaaagcattttgccaagacatccatctaggagcgccatgaagatctgagaagctcagaagcccattataagaaggcatctgacagctaggctgtcctctaagtttcagatgcctaaagagctaaagtatcgcttctgctactactgacttcccaccttcccaccaggacgtcttggacattacaaggctctgctgccatccccaacatggaagcagcctcagctgttagactcaaatgaaacagatgacctaatctcatatcaagaaggctccagggaccctgcttctcctcatgactttggccctactgactcacttcagaacctgggctgctcacgacaaaagcccagtgtgtcctcaaccttgtatttggtggtggtcaaccaagctgctctgagaacagctgcggtctaaacctaagatgttttgggtattactgaattacattactaggtttacctttttcaggactggaaggaggccgcttccaaataaattttcacttcacataaacagcaaaggtgttcccaatggcaatctcctctgggggccagggcactgagctaattctcagcaggatctgggaaccgaatataggccaaaagcctaagttctgctgctcacgcaactgtaaggccaaacagtcaagagaccagctgtattctgttgtattcagtcctgactacaagtaacacgttcttacaaagaactgatgggctcttctgcagccaggagggaagaattttaagagtgtgctgctctgtatgcctggcccaaccactaatctgttcaactccagggaagtcactccccctcctgggaatggagaatgtgcttcaattaaataatctctggggcctttgcctgtgactactttctctgttaaggaatccaaaaatggcagaacaagaaagacttttagataaattaaaaaaaaaaaaaattttaaagcatagatttgtaaatggaaggccagaatggaaaaccggaaaatcacaaagggacttatgctaagaaatggatggtgggaaaaaaaaaaatcaaagggaacagccttctgaaaagatggctttcgatgaattctcagccaagtcagtgatcccgtcaaacctgccttcggggacaggatttccacatcggttccctattttcttgctataggtatcttaaacacaaaacccttctctcgctccctacaatctacaaacagaagaactggtcagaactgtaaaaaacgcagactcctacgggctgctgctttctgggccagggtgggtagctaaggcagcaggcgcagggccgccccctccacccgggtgggttacctgagcacagtcacgcttcccctgcgcaccggcagggaaagcactggttccgacacccgaataggcttgaactggaacttgcagccgaagcacagcgcagagtcgctaaagaaggacacggacacgatggggcgctcgaagatgtggatggggtccacgtgagacacgatgcagccgccgggctggtagtcgttgatgacggcgctgttgacgaagccctcggggatgacgcggtgctccaccagcttttggatcaccagctggtgcacccactcggggatctcgtccacgtcgcccggcgggtagaggcgctcctggccgggcccgcgcttctgcagctgggcgccgtaagtgtagccttcgccgaagaagtacttgttgcgcagtggggcccggtccaccgtgtgctcgttgtacaggcccttctcagcgcgggacaccacctcgtcaatgcgggcct

SEQ ID NO: 17440 - DNA, 2300 bp, Homo sapien
gcactatctcggctcacggcaacctccacctcccaggttcagcgattctcctgcctcagcctctgcgatagctggaattacaggcacctgccatcatgcctggcttatttttgtatttttgtagagacggggtttcaccatgtcggccagactggttacgaactcctaacctcaggcaacatgcccaccttggcctcccaaagtgctgggtgggattacaggcgtgagccaccgtgcctagcctgtctactgtctcttatgggactggtgttcatggagaaaattttgaaaaattcttgtctaggagcagcttgagggagaaggtggatctataaaataaaggtttgggccgggcgcggtggctcacacctgtaatcccagcactttgggaggccgaggctggcggatcacgaggtcaggagttcaagaccatcctgaccaacatagtgaaaccccatctctactgaaaataacaaaaattagacaggcgtggtggggtgcgcctgtagtcccagctacttgggaggctgaggcaggagaatcgcttgaacccggtaggcagaggttgcagtgagccgagattgtgccactgcactccaacctgggtgacagagtgagactgtctcaaaaaaaaaaaaaattaaataaaataaaggtttgttctatccccagcatgagctcaaatcagatttccaaatcagaggtgcttccttaaggctgagcctgaagcagtctggctttttatctcttgttggctcttgcatccagttattagagctgaggtttggccagcctggccatcttgaggggtccttcccaggcctgcagtgtttttaatagttaagtttgtgtctgtacaactagcctttgagaagggagctgatcagcagccatgagagaagggtttgtggtacagggccaggtagggaaactaagccatacttgtcctactaggcttgtggctgagtttctgggtgtgtagaactgctgcagctcagtagagtaacttggagtgggagtatcttgtggctgccatgcttccagtgatagcatgtgaggggtataggaagctcagagcttgcttccagagtttcaaattggaatgacgctagctgagaagaggacagtcatctacccacattagttggtctctgagcggttttaaaagtcatgtaacttgttgaaaataaacagatatctgagtatgatggaaatcctttttttttgggcggggggcagggggtgggggtcagtggtggggacagagtctcgctctgttgcccaggtgcagtgggcgtgatcttggctcactgcaacttctgcctcctaggttcaagcgattctcctgcctcagcctcccaagtagctgggattacaggcgcccaccaccatgcctggctaatttttgtatttttagtagagatggggtttcgccatgttggccaggctggtctcgaactcctgatttcaggtgatccgcccacctcggcctcccaaagtgctaggattacaggcatgagccatcacgcccagccggaaattcttaaaatattcaaacacaactgtcttcaaaattttggatccccccaaatggagacttcatgtagatattctattttggaatgaggcagtcctagctctccctggtgactcagtgctatcagtggctgccttggctttctctacctgctaaatggagggagaatgaggaggagctacagtgtactctctggagtacccttttaaaaaagggttcctggcctgttcagggagagtcttgcttccagcctctgccttaagtggccaaggggtctcctttgtgtcataccaggtttttccttgagtattacagtctcttggcaaaagcatcctggaacttaatatgatattcccttccatgtagatccttgaaactctcaagtaatgggtagagagcagccgtaagacctaggccatgttcctgtcctgttatatcccccaggaactttggttgtctgtctactcttcatggtcacatgttctgtgtttcttttcagtggatatgctgctgatgaaatcactcactgcatacggcctcaggacatcaaggagcgccgagcagtcatcatcctcaggaagtaagtgccttgatgtctgaccttctgcctcacctgcaggcctgtctggagatgtagctctgggtccacttagaactcagctcctatgtatcagtggcatggcagagtggagagcagaactgttaagttctctttttatttgaatcctgtgaggataaagttgttttgttgttttatcagaaa

SEQ ID NO: 17441 - DNA, 2300 bp, Homo sapien
gcgacagaaggagcccctgtctcaaaaaataataataaaaataaaaagctcatctggagccgggcttgatggctcatacctgtaatctcaacactttgggaggctgaggtgggaggatcacttagaagagttagagaccagcctaggcaaaatggtggtaccctgtctcgccaaaaaaaaaccattagccgggcatggtggcccagtcctagcttcttgggaggcttgggcaggaggatcccttaagcctaggagttcaaggctgcagtgagttatgatcataccactgccctccagactgggcgacagagcaaaacacgatctctctttaaaaaaaaaagaatggttctattctatttcacatactcatctctggtagttgcccagtaccacctctacccagagaatcccagccttgaaggaggcaacttgccttcgattccttagaccctcagcgcaaagaagccttagagctagtcacatttctttcttttgctcagatggggaaactgaggcccgaggagggatggtgactagcttggactctgaatggcagtgccaaaactagatcatcctcctgttgatgttaggttctgcatccatgagtctggaggagtccagagtggagtctgagactgaagagtcactcactgcagctgggccctactggcatccccctctgcaaggccaacccaaagggatggggatgcctgtcctacctgcctacccaccagtttgggcctgaggcatcagaacattggttcccagctggaaggaaggagatgcccctgctgcctttaggagagagatttcctacccacgttcagagtaactcttgcctgtcaggcttgaagtctcactttggctttaaactttcccccgtgacttgcaggatgcatgacttactgcctttctgatccttcccatctatgtacagtaggccagccagtggaatgtggagaggcagccatggggaatgggggaaactgaggaccagatgcagttgttaccaaggatgccaagcagcctagcccaaggcagttcttggatttccctcctgcttacttctccccagcatcctctagtatccttagagtcctgctctgactgcagcccctactccttcggaactaagttactactttgtgtctagcagaccctggaaaaggtgccttcagggtctctgctagctatgtcctatcgcttcccacccagtctattacatgggtccttctgccctttgctcccacctgcctgacttgccagccttctctgtaccacacaaggagcctgagggctttgaggttttccatgccagctcccttctgttctggcttcataaaggacttggatcactgccctgagttaccgctacccagcttctccatccccctcttcctcatctgtatttgtgtgccttccctttactaggcagtgtattccttgaaacctatggctacacctgctgcttggtggggactgtgccttcaaaagccctctggcctttaccttgtcagcatcctgaaatgagcagaaactgccagatgactgctcatggttgtggagtgggcctgggttccctaccctggctctgccactcagtctcagcatccctgtctgcacagtgagaagatagggtagctctggctctctttctctccagcccctctacaggcctggaccagggatccttcctgtgttgggacccaccagtggggccgttggtcctctggcaaatgaagtagatggccccagagaacctgtgggtccaagtggagtgaggtgaggctgcttggttcagctaagagcgagccctgggatcttgcccctagggtagcacagcctgtcattgggagtttccagacagaagtgttcccattccttactcctaaaggtggacttgaggagggtctttgaaagtcagctagaccaatctctagttgaacctcaaggagagtgaggtacagagcagagactgctggcttccaggtctagctggctcccacttggcctggccagagaattggtctgatggtgcccacaccttcaccggaggccctttggtgaccccatgcatgtttcctttgcaggacaagattagatgcaccccggttggaaacaaagtccctgagcagctccgtgttaccacccagctatgcttcagatcgcctgtcaggaaacaacagggaccctgctctgaaacccaagcggtcccaccgcaaggcagaccctgatgctgcccacaggtactcagtttaggaccctcagcaaaggctggcaaaggcctggctgcagggtga

SEQ ID NO: 17442 - DNA, 2300 bp, Homo sapien
gaaactgaggcacagagaatttgaggtaacttgttccaggtcacatagcttccaaatggtaaagtgggaatgtgaatcaacgttttttttttgtttgtttgtttgtttttttcatttatcacgcttgttgcccaggctggagagcaaatgatctcggctcactgaaagctccacctcctgggttcaagcgattctcctgcctcagcctcctaagtagctgggactacaggcacctgccaccatgcccggctattttttgtatttttagtagagactgggtttttcccaaactcctgacctcaagtgatttgcccgcctcagcctcccaaagcgctgggattacaggtgtgagccactgctcctggcctttttttcgagatggtcttgctctgttgcccaggctggagtgcagtggcacgatcacagctcacagcagcctcaacctcctgggctcaagccatcctcctgcctcaacctcctgagtagctggaatttacagctgggccaccatgcccagctaattaaaaaaatatttatttattttttttctgtagagatgagatctcaccctactgctcagtcaggtctcaaactcctggggtcaagagatcctccctccaaggcctcccaaagtgctaggactacaggcatgagccaccgcgcccagccagcaacttcttaacacttcctgtgtgaggcagggcagggaccagaacccagacctctgagctgtccctgctgcctgtgctggtgtggcgtggccagtggccaaaggggtctcatcctcctcagtccagcagctctgccaacaactaacagcctttggctgatggtctcagcttcctcatttgggatgggtaatattgttggctccctcgtagagctactgacagcactaagtcagctgaaaccaggaaagggctttgaacagcgcctgccccgcagtagacacttaggggctttactgtcgtcattctccctcctctcacctcctcactcactcctgggccctcttccggatccagccccaaatacggggaagggctgaacaccgccggcctggcgtgggtggagggggacagccaggccccaaggcttggcagccgcctcgggctcagaggtcagctcctgctccctggacacagctggtggggttggggcctgtcctacctgccccacctaagcttctaggacctcccgcagccccagccctgagccaggcggcctatcctcagcctggaaggaaaggttcagcctcgaggccattgtccagatgagaaaaggcctgggaggtgggtggggacaggcagacggcccctgagagtaggggcagggctaagctttgttcagacgctgttctctgcggggggaggtccttcccccatctccgtaaagctccaatccaaccccagaacagtcccaaatgccacctcctggggatcccgtctctttctttggctaagaaagaatcccctgtgctgtgacacagagccttttgcgttgggtcctgaaagatgtgtaggagttccccaggggctgggggtgaggaaagaattcctgactacaaagccaaggcaaaagcacggcggtgggaggtgctctgacagagcggggaacagacgaaatggagttctgtgaaattggtaaaatataaacttggcaatcacttgaccaatggtgtagatggggaaactgaggcgcagaggggccagggagttgttccagtcagagctgtcttggctttcggaacagggctgccccattacatgagtgggcacgtcgctcgctctctgggaggaggaaaaagtctcctccaagcccgggaacgtgcgccaatccccctccaaagcgcttccccagccgcccgcgctggagccccggctcatggactacaagtcccggcaggccccgcgccgcggcgcatgctaggcgggcgtcccttcgcgagcccggccgagcccgggggcccagttcaccattgtctggccaacaggggcggggcgggcggcacggcgggctcgctcactggtcgggcggcgcgtccgtcgcgcccggcgcccacccccgtgcaggcccggccccgcgcgcccgcgcccgggccgcctggcgccccgcccgcgccttaggacccgcggggccgcgcggcgcatcctgcgggcggcggcggcgggcgaggcgcctgcagccgggcgcaagatgatgaagtttcggttccggcggcagggcgccgacccgcagcgcgagaagctcaagcaggagcttttcgccttcaacaaggtgcggcggcggcccgggcccgg

SEQ ID NO: 17443 - DNA, 2300 bp, Homo sapien
ggtgcctgccagcatgcccggctaatttttgcgtttttagtagagacgaggtttcaccatcttggccaggctggtcctcaactcctgaccttgtgatctacctgcctcggcctcccaaagtgctgggattacaggagcgagccaccgtgcccagaggaggtgggttttcttacccatggctgaagtttggcctgaagctgtgggaaaaggcagcctggactcttctgccccctggctttcttgtccaggcctggccttgcacctctggcctgcctgatcccatccggcaaggcgcagctcccagaacccatagacacacggagctgaagtggagcggagccccatcctctcaccaggctgaggccaagcctgctgggtgtgtttattctcacttgatctgcaacagtcctgtaaagtgggagtcactggcccaatttacgggaagtgaaggtcctatagcagcacctgacttgcaggagtgagtggagcctgcacactgatcttggggatactgtaggggtgcagagtgggagctttagggagggggcctccgttcttcagggaggactcctggatggtcaggcccatgccggggcccactggaatagtccgggtcaaggaggagccttgggtgtcttcctcactgtggtttgctggtctatgcctatttccaccttgacctgccaccctcagctatggtgcacctggcgtggagttcacaggcctgcaccgggatgcagccactgtcacacagatgcacttcttgaccggccaggtgagcctctgcttcccactagccagctccctgtggcccccatatctactcatccccctaggccagcctagttttcatctctgctcacacaccagggccgcctcctgtccctgcttgatgacagcagtctgcatctctgggagattgtccaccataatggctgtgcccacctggaagaagcactcagtttccagctgcccagccggcccggctttgatggtgccaggtactggagaacttggctggggccagccaccgggcagggaggatctgggggaggctgtgggaacctgctgtgcaaaggcagcatggagatgggcagcggttcagggcgggatgccttgagctgggcctgggtcccaggctgcagctgttggaccctgctttactgaggtatactctgaacttttcaggttaaatgggaggtttgggttgagtccgacgtgagcaggtaattaacattgtgagcagcaggaggtacatgcattatatgccaaacttctaggacctgaggcctggcactacacttactgcaatgatgggggtgtctaggggtttggggcagggcctaagccagttagtaacaggaagggtcccctggcctcttcagttgtgggtgggagacaggcctttctgtgcataggcagggttgagggcaaggagggtcccatgggctgtgcttggtaaggcgctggcagcatgccccagctgagtgagagtgtggggcatctctctccccagccctgcctgaaatagctggaaaaggggagtaccaacccagggatggattcctgatgcctcccagcttctgcagatgggggtatctggggccctcctgcgaagtcaggagatgtctgagcgctggcagcgggattcctaggaggggctcagcggggagctcctggtcctggcttgggcagtgccctggttcctgctgtcctctcctggtgggtgggaggagctgggagcccagtctgcaagacctagggaccctatttttatccatctccctgctgacatcctgatgaataattgagcgggctgatgatgatgcatgtcttcctggggtggctctgtaagtaggccctggtgagtgctgtggggccagtgatgagttatcagcagtggcccagcccctcacaccccacctgagcaggtggatgggcttgtaccctcactcccttccccttgttccctgcagtgctccgctcagccttacccgagtcacagtggtcctgctggtggctgccagcgacatagcagccctgggcactgagggcagcagtgtcttcttcctggatgttaccaccctgaccctgctcgaggggcagacgcttgccccaggcgaggttctgcgcaggtaagaggccggtgggcttcccagcacccactgtgtgcccgggaagttctgctggctcacctgccttcctccacagcgtgccagacgactaccgctgtgggaaggcactgggccccgtggagtcactccagggacacctgcgggaccccacaaagattctcattg

SEQ ID NO: 17444 - DNA, 2300 bp, Homo sapien
tgctctgtcgcccaggctggagtgcagtggcgtgatcttggctcactgcaacctctgcctcctgggttcatgccattctcctgcctcagcctcctgagcagctgggactacaggcgcccgccaccacacccagctaattttttgtgtttttagtagagacggggtttcactgtgttagccaggatggtctcgatctcctgacctcatgatccacccgcctcggcctccctaagtcctgggattacaggcgtgagccaccgcacccggccaacaagaccagattaaaccacttagaggtggcagtagtttggggcttgggagctggtttggccagcctgtttcatagatgagatcactgaggtgcacgaggtcaggtctcatcggttgggcccagcaagtggctgacttacccctgcctgagtctgtggatcctcacctagatgtggggcccatagatctgcccagcgcatttgctgcctcatgttcccaggcacctgactgtaggccatagcctcaccctgcacaggacatggacacctcccagctctttgtctggtgcctctccctggcctcagtggggcatatgtggcctggcgcttggatacccatctggagactcagcaagcccatctcaggtggtcactgaagggccatgcctgccctgcagaggagacagtggcagcacctgtgtggtctggccgctgtggcaatccatctgcccttttgccctccctcaccttctgctgatacctcttctctccctcttccaggaaggccagaactatcccgacctccacctgccctgctcggagctggagtgctggatccctggcacctgcctggccccttaacatagaaccacgcctgctaacctgtaggctccactgggacctgctgtcctgtcccgcctgaccctgggccctggagcagcaccagccccagggtgtgggcctgggacctgggccagaactgagccctcctgcaggcatttggctgccctgggggcccactgcctagggaagaggacaggtggggcccagcacctgtgccacctccccccctccacacaccatccttccccctcactttgcagagtatttttccttttttttttttttcttaaagacggagtcttgctctgtcgcccaggctggagtgcagtggccccatctctgctcactgcaagccccgccttctgggttcccgccattcttctgcctcagcctcccaagtagctgggactacaggcgcccaccaccacgcccagctaattttttctgtatttttagtagagatggggtttcaccatgttagccaggatggtctcgatctcctgacctcgtgatccacccacctcagcctcccaaagtgctgggattacaggcgtgagccaccatgcccagccctgcaaagagtatttttctagcgcctgggctggacagttgtttctaaaactaaactattttggtacctgcttctgggccagtccccagcctgtcatgagtgtgtgtgtgcgggcatggatgtgactgggagctctgctgggcacccacatctggggcctagtcaggtgtgtgtgtccggcggggggggggggcaggggggggggtcaagatgagtttccctgtagattgtaccttggggtttttttctgtcgttttgttaaaattagcgccattttaatattaaaaatactgatttttaatattgaaaataaaagcatttaatatctcttaaagggcatccacatctgctttatccctagcggaagagtgagggggcttcacacgtgcactcacactgtggagagagttggatttcccagacccctgagggcacctgtcagggtcatccccattggtgctgcttgaggctactggggactgtggcactggacgtggctggagcaggtggtgtcacctgagtacattctttgctagcagacagtggatgaggccccttcctcttcctcaccaagcctggggctgtgccagcctgtcttaggccagggccttgcagaaggcgctccaggcgtggaagcagcgggtaaaggcgtgctgctcattgcccttgcggaccaggcgcagccggcgcggccgctcatgttccttggaccgcatgtgctggatatatacctggcaaggggacagcgagccttgggtgatgaccctgccctgcccacaggcccacctcggccctccctccacccagattacctggcaggccttcaggctcagcttgatctccacctggctagtctgggtccccacccacatgtagacctgtgggggcagcagggg

SEQ ID NO: 17445 - DNA, 2300 bp, Homo sapien
tcgtgcgtggcgtggacctcagcggcaacgacttcaaggtgagccgggccgggcgcgtgccgggcctccctgcaggccttctcttccgcccggcccgcttggcctccgcttcctgtcccgctcggctccaggccctgcgtgtcccagggactgcggccggggcggggtggggctctcccctggccaggaatggacctccgaggcctccgcccagtgcctgtacggggagaccgaggctgggcaggccggggacggacgcttgggctcggagtcccgccgggggcccggccgggagcccccaccccgcgtccgtgttctcggtctaggctggatggtggcctggggatcgggcgagcctccccgcccctctgaggtcacacgcccaagccaggccctgactcagggatggctgcccggctgcccaggggcgggtgtggagccgactcatcactgccctctccccgccaccgccacccgccatactgtgtgatcctgggcctctcagatcacttcccctctcagagcctaggctttctcagccggtgaaggggcttaaaagtctcctccttggacgcaaggagtatagtgagatttgttggtgtggagagtgtgtcaggccggtgtgccaggtgctgggtggcagttgtctgagcagctgctggactgagagaaaagggaccggagcccagccctccgcagccagtgggtggggcggcggggtggttccaggactcaagaatgagacaggcattgcctgaccaaaggggaagcagagaaagagagggagggagagctggctggagggtcagcctcaccttcagggtgggtgactggcagggtcggcctgggttgttggtctggggctggggccgaggaggcaggtttttcctgcgtttacctgcctgtgtacacacctttgaccccaagtacaagtggctacaccacttttccctgaccccatccccaccaccctaacctggggtccccgttcctctttgctgaactgggagagtccgagtcaccagctgggaatgtggcgctagggggaaaggaatatcagccgcaggcactgaaggcacctactgccccagacttggtgccacaagggctggaggtgccgaggtgggcgttcacacaccaggggagtgcagtgatgctggcctgccctgcagggtggggagccacggtctccgcaagcaagggtttgaccctggccgtgagttgccagtgtgctgatggcaggatgagggcacaggtggcgcctttgcaaaggcttggaagggggatcccccaccccaggcagccagtcagagtgtggaatgctaggtgaaggaatttgagccgagctaaccacagagccggatgctgggctttcacctgaaacaagccagttttgtcctggccctcctggggcccagaatccagtaggagagacaaatcttaggccaacacttttgtcacgggggggcttaaaattcccattctatgggtgaagaaattgaggcacaatgatgaaatgacttgtctgtgttctcacagatggtgagagttggttctgtggctccccaaaggctcccatgggctggaggagccatagaaggtggtgagcaggggctctgtgcttcaccttgacatccttcccccagggcggctacttccctgagaatgtcaaggccatgaccagcctgcggtggctgaagctgaaccgcactggcctctgctacctgcccgaggagctggccgccctgcagaagctggtaagggggtttgggcgggcaggggagggtccctgtggatgagccaggtgggcagagcctgtggagaaggcagacaacttctccagagagaggaacaccgacagctatgagcagagctggaagaaagggagtgggcaccctgtccagggaggtgtgcaagaagaggccgggtgagtgagggagggaagctgcaggggtagttgggccagtgtggctgaggccttcctggatggtgcagagttgtggaggcaggcagggactctggacaccccacccaccctgctgagcctgtgctccccattccggcccaggaacacttgtctgtgagccacaacaacctgaccacgcttcatggggagctgtccagcctgccatcgctgcgcgtgagtgctggccgggaggccaccgagcttggggttggggccaaggtccggtcagggacgtgaagcctgggctagacaccaagctgggccagcatttctgcccacctccgtgtcaggctcagaggctcaggtgtcacagaggggccctctcattagaggt

SEQ ID NO: 17446 - DNA, 2300 bp, Homo sapien
ggcggaggcctcggaggtccattcctggccaggggagagccccaccccgccccggccgcagtccctgggacacgcagggcctggagccgagcgggacaggaagcggaggccaagcgggccgggcggaagagaaggcctgcagggaggcccggcacgcgcccggcccggctcaccttgaagtcgttgccgctgaggtccacgccacgcacgaacggcagcaccccggtggcctccatggcgccgctctcgctgccgggccgcgccgggctagggagcgccggggcgagggcgctggggggagccgcgggctgggccagcgccggccccgcccctttaacccgcccgcgcccgccgcattccgcggggaagtgtaggctttaggcctcttagggcctcagtttccccgtctgttcgaagactgcggaggcaccaaggagtgcgggccccccctgtgctggagttggaggcttccacgatctccaggcttaagtcccagcgccccagggcaggggccgtaacggccgctggtcgaggcaccgtcacctgcgctgctgcagcacatgaagctggccctgacctcagagagattctaaacctcggccccggggcgcagaggcccaggaagtgcctgtacttggctgaccggtggtagtgagacacctggatcctcgggtcctagctctcctgcttctggacttagtttcctcatgtgttgtttttgttttgttgagacagggtcttcttgctctgctgcccaggctggagtgcagtggtgtgatcatagctcactgcagcctcgaactcctgggctcagcctcccgactacctgggattataggcgcaggccaccacacctggctaaatttatttattttatttattttttattttttttgagacagagtctcgctctgtcgcccaggctggagtgcagtggcgcagtctcggctcactgcaacctccgcctcccgggttcacgccattctcctgcctcagcctcccgggtagctgggactacaggcacccgccactacgcccggctaattttttttttttttttttttgtatttttagtagagacggggtttcaccgtgttagccaggatggtctcgatcttctgacctcgtgatccaaccgcctcggcctcccaaagtgctgggattacaggcgtgagccaccgcgcccggccttatttatactttttgtagacacggggtgcttgctatgttgcccaggctggtcttgatctcctggcctcaagtgatcctctggtatcagcttctcagagtgttgggatgacaggcgtgagccaccgcgccctacccagtttcctcatttgtaaaatactttctaaggttgtcaccatgagcaaattaacaaagaatgcacgtgtagctcgcagcatacagcaggcgctcagtgagtggcaggttattattccgttttgttttgttttgtgcgccaggttattattcccacttagtgtcagcacccctgtgctcgtacccccctacaaagggaggctccagaagagaagcatccgtcttggtccttgctgttcaagggggctcgccctggctgacacatagcaggaccccaataaatgagccacagctgttatatgcccaaccatccttcgcaggggaggagggggtctagtgtccccattttacaggagaaaaactgatgcccaggtggagaatggcccacacaagctcgcacagagcaggtggcaggggtaggcgctgtgcccctcaggcccacaggtaagaatgaggccaccaagacactctctcgcagaggtgacctaagaggttggatgtgccgggcctctagccatgtgcagcctctctacctggtccccagaaggaacggggcccagacagcttcctccacaccggaggctcacattacaacgcacagacgtcctggagggtcgcctgtcacgtcacctgttcgcggtctcggaatgcagccctgcacctttaaatccagactgcgtcagggagtcccgccccagagggagtgcggctgtcggctggggggcgggacctgcccttcattggctgaaccgcgcagtattttggcacctgtgcgctggactcgagcgctccgattggagttagggcctgcttgtctgcgtgctgcgaagtccgcggctgcccccggggccctagtcgttgggttccagggtccttcacgttccattcccaggctggtctgagctccggggccgtggtcccgctgcctcctccggtcgtcgtgcggaagctgcgacgcaggtacagctggagcgcgg

SEQ ID NO: 17447 - DNA, 2300 bp, Homo sapien
tccccagcggtgatcgcgggccacgcccccgatctgcgttccgtcgcgcgccaagccccgagcccggtgaccctgggggccgccccgccgcgctccagctgtacctgcgtcgcagcttccgcacgacgaccggaggaggcagcgggaccacggccccggagctcagaccagcctgggaatggaacgtgaaggaccctggaacccaacgactagggccccgggggcagccgcggacttcgcagcacgcagacaagcaggccctaactccaatcggagcgctcgagtccagcgcacaggtgccaaaatactgcgcggttcagccaatgaagggcaggtcccgccccccagccgacagccgcactccctctggggcgggactccctgacgcagtctggatttaaaggtgcagggctgcattccgagaccgcgaacaggtgacgtgacaggcgaccctccaggacgtctgtgcgttgtaatgtgagcctccggtgtggaggaagctgtctgggccccgttccttctggggaccaggtagagaggctgcacatggctagaggcccggcacatccaacctcttaggtcacctctgcgagagagtgtcttggtggcctcattcttacctgtgggcctgaggggcacagcgcctacccctgccacctgctctgtgcgagcttgtgtgggccattctccacctgggcatcagtttttctcctgtaaaatggggacactagaccccctcctcccctgcgaaggatggttgggcatataacagctgtggctcatttattggggtcctgctatgtgtcagccagggcgagcccccttgaacagcaaggaccaagacggatgcttctcttctggagcctccctttgtaggggggtacgagcacaggggtgctgacactaagtgggaataataacctggcgcacaaaacaaaacaaaacggaataataacctgccactcactgagcgcctgctgtatgctgcgagctacacgtgcattctttgttaatttgctcatggtgacaaccttagaaagtattttacaaatgaggaaactgggtagggcgcggtggctcacgcctgtcatcccaacactctgagaagctgataccagaggatcacttgaggccaggagatcaagaccagcctgggcaacatagcaagcaccccgtgtctacaaaaagtataaataaggccgggcgcggtggctcacgcctgtaatcccagcactttgggaggccgaggcggttggatcacgaggtcagaagatcgagaccatcctggctaacacggtgaaaccccgtctctactaaaaatacaaaaaaaaaaaaaaaaaaaattagccgggcgtagtggcgggtgcctgtagtcccagctacccgggaggctgaggcaggagaatggcgtgaacccgggaggcggaggttgcagtgagccgagactgcgccactgcactccagcctgggcgacagagcgagactctgtctcaaaaaaaataaaaaataaataaaataaataaatttagccaggtgtggtggcctgcgcctataatcccaggtagtcgggaggctgagcccaggagttcgaggctgcagtgagctatgatcacaccactgcactccagcctgggcagcagagcaagaagaccctgtctcaacaaaacaaaaacaacacatgaggaaactaagtccagaagcaggagagctaggacccgaggatccaggtgtctcactaccaccggtcagccaagtacaggcacttcctgggcctctgcgccccggggccgaggtttagaatctctctgaggtcagggccagcttcatgtgctgcagcagcgcaggtgacggtgcctcgaccagcggccgttacggcccctgccctggggcgctgggacttaagcctggagatcgtggaagcctccaactccagcacagggggggcccgcactccttggtgcctccgcagtcttcgaacagacggggaaactgaggccctaagaggcctaaagcctacacttccccgcggaatgcggcgggcgcgggcgggttaaaggggcggggccggcgctggcccagcccgcggctccccccagcgccctcgccccggcgctccctagcccggcgcggcccggcagcgagagcggcgccatggaggccaccggggtgctgccgttcgtgcgtggcgtggacctcagcggcaacgacttcaaggtgagccgggccgggcgcgtgccgggcctccctgcaggccttctcttccgcccggcccgcttggcctccgcttcctgtcccgctcg

SEQ ID NO: 17448 - DNA, 2300 bp, Homo sapien
agcacatgaagctggccctgacctcagagagattctaaacctcggccccggggcgcagaggcccaggaagtgcctgtacttggctgaccggtggtagtgagacacctggatcctcgggtcctagctctcctgcttctggacttagtttcctcatgtgttgtttttgttttgttgagacagggtcttcttgctctgctgcccaggctggagtgcagtggtgtgatcatagctcactgcagcctcgaactcctgggctcagcctcccgactacctgggattataggcgcaggccaccacacctggctaaatttatttattttatttattttttattttttttgagacagagtctcgctctgtcgcccaggctggagtgcagtggcgcagtctcggctcactgcaacctccgcctcccgggttcacgccattctcctgcctcagcctcccgggtagctgggactacaggcacccgccactacgcccggctaattttttttttttttttttttgtatttttagtagagacggggtttcaccgtgttagccaggatggtctcgatcttctgacctcgtgatccaaccgcctcggcctcccaaagtgctgggattacaggcgtgagccaccgcgcccggccttatttatactttttgtagacacggggtgcttgctatgttgcccaggctggtcttgatctcctggcctcaagtgatcctctggtatcagcttctcagagtgttgggatgacaggcgtgagccaccgcgccctacccagtttcctcatttgtaaaatactttctaaggttgtcaccatgagcaaattaacaaagaatgcacgtgtagctcgcagcatacagcaggcgctcagtgagtggcaggttattattccgttttgttttgttttgtgcgccaggttattattcccacttagtgtcagcacccctgtgctcgtacccccctacaaagggaggctccagaagagaagcatccgtcttggtccttgctgttcaagggggctcgccctggctgacacatagcaggaccccaataaatgagccacagctgttatatgcccaaccatccttcgcaggggaggagggggtctagtgtccccattttacaggagaaaaactgatgcccaggtggagaatggcccacacaagctcgcacagagcaggtggcaggggtaggcgctgtgcccctcaggcccacaggtaagaatgaggccaccaagacactctctcgcagaggtgacctaagaggttggatgtgccgggcctctagccatgtgcagcctctctacctggtccccagaaggaacggggcccagacagcttcctccacaccggaggctcacattacaacgcacagacgtcctggagggtcgcctgtcacgtcacctgttcgcggtctcggaatgcagccctgcacctttaaatccagactgcgtcagggagtcccgccccagagggagtgcggctgtcggctggggggcgggacctgcccttcattggctgaaccgcgcagtattttggcacctgtgcgctggactcgagcgctccgattggagttagggcctgcttgtctgcgtgctgcgaagtccgcggctgcccccggggccctagtcgttgggttccagggtccttcacgttccattcccaggctggtctgagctccggggccgtggtcccgctgcctcctccggtcgtcgtgcggaagctgcgacgcaggtacagctggagcgcggcggggcggcccccagggtcaccgggctcggggcttggcgcgcgacggaacgcagatcgggggcgtggcccgcgatcaccgctggggaaggcggggaggggacctttgggggaccaagggcagcgttcgaatcctagcccagcccccttcccctctcggtctcttggtttatcctgcgaacggggcgtcacccgcccacctagggctgctgcgcggcctgctccgcccgggcccagggcaggcaggtttggcggaggagggaaggccaaacggcctccagggccccgctgcgcaaacttgggttattttcagccacccgtgccctttcctgcttctcggagctggaaggctgtggactgaggcctgcgcgaccccgccagagatggggctgagtcccaatttagacaggttgggagtatttaaagcgctttacagtttgcaaagtagattcctggtctctctgggggcgggtggcagtattgatccccgagtcaccgatgaggagattgaaaccggccctggggccgtggcgggtcacccggttggcctgggatcg

SEQ ID NO: 17449 - DNA, 2300 bp, Homo sapien
aatgtccaatttctccacatcctcaacaacacttgttattttacttgttttttttattattctatttaattattatcctaatgggtatggagtggtacctcatcatggttttgatttgtgttttcctaatgattaataacattgagcatcttttcatatgcttgttggccatttcttatcttctttggagcaatgttggttatatttttggtatcataaccaagaaatcattgccaaattcaggatcagaaagaattatacaaaggaatccattgttttaaacgtaatttatattttttacttatttttgttttatagagagaaggactttcaaaattcaacaagatctatgaatttgattatcatctgtatggccaggtaggtgctaaaatatttctaaaatatttcaatcataagcaagagaaagtagtcagcctcgtcatatgtagaatatgtcgctgtcttaagaataacaactgttaacaacctaaaggttcctggatatggggtgatcactttataatttatgaggagttctctttttaataaaatatggtcccatctcagctcttcattacaaaaaaaaaaagctaatatacaatagtttgaggaaaatttaactgatgcaagaggcgtcagttatacaccatatcattagaatggtgattgtattcctgtgacttttggctttgaagagcttatatttatgtttatttcttcccaatcaggtttttaaaaatgtctttaatagaagctcctccctctcattttaatgatttggcagaataataactgcaaaaagactaactgaattttgaattttgtcatcattcagaatgttaccatggtaatgacttcagtttctggacatttactggctcatgatttccagatgcagtttcgaaaatggtcagtacaattctcaagggaaggactttcagattatagtaagttgtgaaatttcacaggaattttgaggcatgttgatcttactgggtaattttttttttttttttttttttttttttttttttttgttggagacaaagtttcagagtgagactctgtctcccaggctggagtgcagtggtgtgatctcggctcacagcaacctctgcctcctgggttcgagtgattctcctgcctcaccctcccgagtagctgggactataggcacgtgccaccacacctggctagtttttgtatttttagtagagacagggtttcaccatgttgaccaggctggtctcgaactcctgacctcaggtggtctgcccacctcagcctcctgaagtgctgggattacagaccgtgagccaccatgcccggtttttttttttttttttttttgagtcagggtctcgctgcgttacccaggctggagtgcagtggcgcaatctcgtctcactgcaacctccgcctcctgggttcaagcgattctcatgcctcagtttcccaagtaactggccttacagccatgtgccactacacccagctaattttttctattttagtagagatggagtttcaccctgttgcccaggctggtcttaaacaaagcagggtttgccttcttttgcctcccaaagtgctaggattacaggcgtgagccactgtgccttggtaatttatttatttatttatttattttatttattttttgagacggagttttattctgtcgcctaggctggagtgcagtggcacaatcttgactcattgtaacctccacctcccgggttcaagcgattctcctgcctcagactcccgagtagctgggactacaggtgcctgccaccacgcttggctaatttttcgtatttttagtagagacggggtttcaccgtgttagccaggctagtctcgatctcctgacctcgtgatccacccaccttggcctcccaacgtgctgggattacaggcgtgagctaccacgcccagcagtaatttataatactaagatgacctaggattatctgatccattgtgaatttttattaaatctttaaacagtcacttttggtgttcctcaaaattgccagacctttttcatgcagccattggattgcatttacctgtgaaagggctccagaatgccatcttatcagtcctgttcacactcttggagaagtggacagtgtgtcatgcagagggtcatagccttactttcaattcaccgggaccttttcttttggggatacaccatgaacccattggaacagtttgctgtcattagattggagggctctctgtcatgtactgagttgggactctgttttcatttcttttctaggcagagc

SEQ ID NO: 17450 - DNA, 2300 bp, Homo sapien
gggctagattcttgcccaaagaattaatgtttctattgagcatattaagcactctaagaaccaagatctttcctgaaatgtgtgaaggaaaatgatcaaaaaagaagcaagtcaaagagaaagggttcacctgaagtgccagcctgttccattgagggaagtacactttgtgagaaccaatggaaaagagcctgagccgctggaacctattccctatggattcatggtatgatagggtaaaaatagataaatacaagacctctggattgcttaaaaaaaaaaaaaaaaaagggagagagagagaatgaattcagcagagccttgaaggataagaagttaggcgtaggagaaccatttttcaatgtctacttcattgtctagaagtagacaaaccttggggctggtcaccaggacttctagcactggaaacaggtaaagctgtcagccagcattcacacaaccctggctccactcccactatccttgatctggaaacaggtcttaggaccctgggaactaaagaaaaatgagcagggaacttccacccatgctcttagaaaagttctccagaaaaccatttcaggatctacttttgttatctgagatattttcctggacagctctttatgtctcccgtggcacctcctttatgaaactttttcttatcctcccttgcgtttgtgcctcccgtgtgtgtagaacacattcttaccacttacctctctcagaatcagttcattcgggtaggaacagggctgacttcaaatctaatccccaaaccttaccgtgttgctgtaagtgtgcactgtgaggctggaaagtcacaagggctgtagaatgcagtggctgtggcacaggatggggagggctaggttggctggggaacgatcgggcagggcttgaatgccaagttaagggaatctggtcagtagttcccaaatgaatttctgaatctctagggaaaaacagtaaaatacacacttccccagcctcacacaagacccgaagggcagccagcgcccgaggcgattccgagaatcagacaagtttgggaacctgctaagcgcaagcaaaacaaaaggtttccacgcaaatgagtgagatgtatcaactacgttttaaaatgcactccagtccgagagcagacaggaggccactgcaataatccagacgaggggcagtgaggcctgagaaatgggagataatcgccttcatctcgattcttggcgcccaccacgctgtcccgctcggtgggcctcccttaaggcacgcagctgatcggaacgcgctttcttacccgcctcatgcgaccgtttgacagcaggtcggcgatccccttggccgcgtcgtttttttcggccacacagaggactttccgcacgcctcggagggccatctccatggcggcgcgggaaaaggcacggtcttcgggccgtcgcagccaccggagcgcgtagcgggcgacaggaaagatcatcctcagacctcgcgcccggagccgctccccggctgccggcgcatcctggggaagccagagatgaggctcaaatggcgcccaccgaaagggaaccagagcctcgcttcggtcacgtccccaccagcctgctggcctttggagcttcagtcactgagcctttcccgtgccgcagccgccgcctcagcaccgaatccagtatcttggcgtggaacttccgcccgccttctccagctacttccgccaggcgcgcgccccacagcgacctggaactacaactcccagactgtcccgcgcccctcgtccaagcacgttcccctctgccaccttcccgccgcccccgtctcactccgcccctctttcccctccttcccggcagtggttggttaatcggactccttcttgcggggagccgccagacactcccatccaaggcctctttctcatgactttttaatctcctgctcggaagtctacgaggacgcttccgggtcacgcggcgcggacaccaggagtcatgtgatgtcaagatggcggcgccgcggtagcaggatccgggttgtggcgtcctaggagccgcgacggtttctgccctcgggcagtgaggggcagcagcgcttggctgacccctgcggcgtcccgtagcctcgcgttaagccttgttcagagcgggggcttttgctgtcgcagtgggttccggagagtgcaggtgatttcgcagcaggtttcttgtgctggccgcgctcgccggacgaagaagagaagggcagttgggcctgcggccttggcgttcatgaggcctcagagagctccggaggagctacaa

SEQ ID NO: 17451 - DNA, 2300 bp, Homo sapien
ccttgtactcctcatctcccagttcctgctccatcttgatcaacacagactccacactggacttgtaagaaccaacactaattaacactttaggaattgggcattcttctagagaactggaaggcggcctgtcttgactgggcttagagggtatgctttcttgtttctccaccatcctgtcatcgacctccacaaagtcttcaaagagaaagtttgttatatgctgttgttttagaagtgctctatcaatctgactggtcaggaggtaacacaggtctcctctgaacatgtgttcaatgtggctgagctgagccagggtctgggtgaaatattcagtgtcacagagctcctccaaggtcttcaacttcttgtcaaaacacttggtggactttgctttgataagttttggggtgtaggctggtctgcaggtgtaaaggtctgtgtcggcagactcatcagggttagaggtagtggatgcctggctggcctgatcctggatgtgctccatctcaccaggacacaaatcatgccccttcaacttccgatgagggtatgagcggatctgcttcagcaggtcttgatgttcaatgatggacttctccacactggccagttcattggctttctcaattgcctgagatgagtaaaagcctttgtcgttggctttcttctggatctccgtttctgtgtgtagcactgtcctggtgtaatccaagtctttcagctttttttcaagttccccagcaaatgccttcctgttgccagtcttcaagcactcagaagctctggaaaattcggctgaaagctcctggaactgctgcatgattttatgctggtctgcagagatataagccatgcaaaacggcctcacgaagccacgggcctccaggtcgtatagggtaaggtggtgcacgtatgcaaaggcgccctccttagaatctcccagcaccaccttggagtcctccacgaagttcagcttggggtaggcagatccaggaggatggcccacgaaggaagcctggtaatccacagacatgatacgcagggagaagtaattgagatcaaaagtgccaaaaactttggtgtcattggggatggtcagtaagggttggggtcccacctgctcagagaactcggaaataagaatgaagtccctcgaaaacttggccccggacagttttgaccaggggttagcaccctgactggcgaaggggaagagcggcaccgagtactcctcaggcagggccggctcattgtaaggctcttcttcatactcttcctctttggtgaaggccactacgtcaggggcgctgatcatatttccagatatatgaagaaaacattgagaggaagtgggaaagaatgcggtgttaatcgacgcgcagaaggcaggcctccggagaaggaagtgaagcccttacggccttctttgcgactccccgaacccggggtcctaggctgcttctcacacacccgaggagaagaactctagcagccccctcacagttgtagctcctccggagctctctgaggcctcatgaacgccaaggccgcaggcccaactgcccttctcttcttcgtccggcgagcgcggccagcacaagaaacctgctgcgaaatcacctgcactctccggaacccactgcgacagcaaaagcccccgctctgaacaaggcttaacgcgaggctacgggacgccgcaggggtcagccaagcgctgctgcccctcactgcccgagggcagaaaccgtcgcggctcctaggacgccacaacccggatcctgctaccgcggcgccgccatcttgacatcacatgactcctggtgtccgcgccgcgtgacccggaagcgtcctcgtagacttccgagcaggagattaaaaagtcatgagaaagaggccttggatgggagtgtctggcggctccccgcaagaaggagtccgattaaccaaccactgccgggaaggaggggaaagaggggcggagtgagacgggggcggcgggaaggtggcagaggggaacgtgcttggacgaggggcgcgggacagtctgggagttgtagttccaggtcgctgtggggcgcgcgcctggcggaagtagctggagaaggcgggcggaagttccacgccaagatactggattcggtgctgaggcggcggctgcggcacgggaaaggctcagtgactgaagctccaaaggccagcaggctggtggggacgtgaccgaagcgaggctctggttccctttcggtgggcgccatttgagcctcatctctggcttccccaggatgcgccggcagccg

SEQ ID NO: 17452 - DNA, 2300 bp, Homo sapien
ctgcctcagccgcccaagtagctgggactacaggcacctgccaccacacccggctaattttttgtatttttagtagagacagggtttcaccgtgttagccaggatggtctcgatctcctgacctcacgatgcgcctgcctcggcctcccaaagtgctgggattacaggtgtgagccattgcacctggcctgaacaaagaggtttgtaattctaaggccccactgaaagcttgccatggctccaaaaaagagtccattcagcaggaatcggaccacaaagggctttgtgggccacccagcgtgtttttgaccttggtcataagagtggtgaggagccctttgaagattacaatgatcagatttgtcttccaggaagagccagtgcatgctggctaggtggatgctggcctggggacaggaggcctcacctcccaagcttctgcctccactttcccggcccttgcccttcctcctgaccttggcctgtctgtttcagagtggcctcccctgccggtgccggtaccctccatgccctgagccgctacagccgctacacgagcatcctggaccttgacaacaaaaccctgcgctgccccctttacagaggcaccctggtgccccgcctggcagaccaccgcacacagatcaagcggggcagcacctactacctgcatgtccagagcatgctcacccagctctgctccaaggccttcctctacaccttctgccaccacctgcacctgcctacccacgacaaggagacagaggagctggtagccagccgccagatgagcttcctaaagctgaccctgggtctggtgaatgaggatgttagggtggtccagtacctggctgagctgctgaagctgcactacatgcaggaatctccagggaccagccaccccatgctcaggtttgactatgtccccagctttttgtataaaatctgaggtcggtcccagacactgtgaccaagacctgtgactcagggtatggggaggggaggggttggcatgaccaaacagttgcctgagctggactgtttaagtttctggtgtctggcagcatggttcccacgtggctcctagtagtttttaagttggacatgggcagaagtggagcctggctccctctaaaggcgtctggagggatggtgacagctacatttggctccctggtgaagagtggcccctggatatggagggggccttggttttctgaggactggcagccagggcagaagggaagccaccagtcccttggtggggcagggtgagggcaggaaggccaaagcctgatgggaggagcacactggctgtattcagcattgccggacacttgagtggcaaaatgaacgagggtgacagccaggtaactgttgtggtttggtggaaaacaggagggcagaacacccatcgcctccttcagacccagatgcagccctttatttgcttcctggagcccactgtcctaggggaggccctggaccagccagtgggggtgagaaaggctgccaccctctgggtcgtgggaaacatgcgaccttggcctcagggccacagagcgtgagcagcaccctgtccgctgtcctcgccacctttacctgggagagaagtgcctgtgagcgggccttgggactcactccccatactctttcaccaggaacgagcagagtgttcactagtcctagtgtgaagcgggcacaagtgaccaaagccaatggtgaggaccaccttgggggctggagagcacagcaggcagagcagggctgaggcgccatgaggccatcaccaccatgcaagggaggagcagccagcagctctcctgggtggcccactggctcctgccggccagagcgcatgagcactgaccttcctcgtggggaaggtctgcagacccgtgtgaacatggcagaggccacactccagctcccacccacataaacctttgcaaccacttcactacctctcactgggtctcgtgggcttgggacagcaacggttctgtttagtcagctggtgcaggtggttggcccagccgatgagaactcaaatagcacggatttcctggatgagctaccacgtggcgctcttcaggttctgcctctgggaggctgtgtgcacctcagtcaccacagctcacggccgtccccagttgagtcccccttctgaggacaagtttgaaactgggaaggagacaccccctggttccgccagcacctatcccactgatagtgatcccctggcctccccgagcctccttaggcaatggccactggtttgtagacagagagtttcttgc

SEQ ID NO: 17453 - DNA, 2300 bp, Homo sapien
atttaaaatcaaaggcaatatttgaaaacaataggcaaggcgtggtggttcacacctgtaatcccagcacttcgggaggctgaggcaggtggatcacctgaggtcaggagtttgagaccagcctggccaacatgtcgaaaccctgtctctactaaaaatacaaaaattagctgggtgtggaggtgcgtgcctgtaatcccagctactctggaggctgaggtaggagaatcgcttgaacttgggaggcggaggttgcagtgagccgagatcgcaccactgcactccagcctgggagacagagcaagactccatctcagaaaaaaaaaaaagaaaacagtgttgacctaacgttaatgactttgcttgatacaaacctaaaaacaaagttctgggtttaaaacaaaatgttatgtatgtgtgaataaatgaatgacaaggtctcgttgtcttgcccaggctggagtgcagtggtgcaatctcgtctcattgcagcctcaaactcttgggctcaagcaatcctcctgcctcagcctctctgtagctaggaccacaggtgcgtgccaccacaccaggctaatttttaatagacatgaggtcttgctgtgttgcccaggctggtttcaaactcctggcctcaagcagtcttcccacctgagccttccatattactaggattacaggtgtgaacaaccacatctggcctatttattttttatttatttatttatttattttgagacggagtctcactctgtcgcccaggctggagcgcagtggcacgatctcggctcactacaagctccacctcccgggttcacgccattctcctgcctcagcctcccgagtagctgggactacaggcgcccgccaccacacccggctaattttttatatattttttagtagagacggggtttcaccatgttagccaggatggtctccatctcctgacctcgtgatccgcccgcctcggcctccgaaagtgctgggattacaggcgtgagccaccgtgcccggcctattttttatctatttttatttttttgagacagagttttgctcttgttgcccagggtggagtgcaatggtacaatctcggctcaccgcaacctccgcctcccaggttcaagcaattctcctacctcagcctcctcaatagctgggaatacaggcgtgcaccaccacgcctggctaattttgtatttttaggagagatggggtttctccatgttggtcaggctggtctcgaactcctgacgtcaggtgatccgcccacttcggcctcccaaagtgctgagattacaaatgtgagccactacgccgggcccggcctatttattttttttagagttagggtctcactgtgttgctccagctgtagtgcagtggtacaatcaaagctcactgcaatctccaactcctgggttcaagtgatcctcccacctcagccttccaagtaactaggactataggtgcaagccactatacttagctcatttgtaaaattttttgtagagctgagatctcactatgttgcctagctggtcttgaactcctggcctcaagcagttctcccacctcagccttccaaatctctgagattacagacatgagccactgcatgtagttactttaaatttttttttgagactgagtcttgctgggatgcccaggctggagtgcagtggggcgatctcggctcactgcaacctccacctcctgggttcaagagattctcctgcctcagcctcccgagcagctgggattacagtcacccgccaccactcccggctaatttttgtatttttagtagagacggggtttcaccatattggccaggctggtctggaactcctgacctcaggtgatctgcccacctcggcctcccaaagtgctgggattacaggcgtgagccaccatgcccagcctaagcttgactactttagggacctcataaaagttgaatcatacagtgcttgtcttgtggtgactggtttgtttcacttagcataatgttctcaggctcatccctgttgtattaatagcatgtgataggatttctttccttttttttttctttttcttttcttttttttttttgagacagggtccaggctggagtccagtggcgtgatcacagctcactgcagcctttacctcctgggccaaagtgaatcttcccttctcagcctcccaagtagctgggactatgggcacacaccacaacacctggctaattttttgaaattttttgtagagatggggatattgctgtattgcccaggctggtctcgaactcc

SEQ ID NO: 17454 - DNA, 2300 bp, Homo sapien
agaggtcaggagatcaagaccatcctggctaacacagtgaaaccctgtctctactaaaaatataaaaaattagccggacatggtggcgggcgcctgtagtcccagctactcgggaggctgaggcaggagaacggcgtgaacctgggaggtggagattgcagtgagcgaagatcgagccactgcactcatgcctgggcgacagagcgagactccgtctcaaacaaacaaacaaaaagaacaattagctgggcatggtggtgcacgcctgtagtcccagctactcgggaagccgatgcaggagaattgcttgaaccagagaggcagaggttgcagggagccaagatcgcatcactgcactccagcctgggtgacagagcgagactccatctcaaataaataaataaataaaacaaaaacaaaaaacaaaaacactcactatgttggccaggcgcagtggctcttgcctgttatcccagcactttgggaggccgaggaggatggatcacttgagatcaggagttcaagaccagcctagccaatatggtgaaaccctatctctactaaacatacaaaaattagccgggtgtggtggctcacgcctgtaatcctagcactttggcaggctgaggcaggtggatcacaaggtcaggagatcaagaccatcctggctaacatggtgaaaccctgtctctactgaaaatacaaaaaattagccaggcgtggtggtgggctcctgtagtcccagctactcgggaggctgaggcaggagaatggcatgaacccaggaggcagagctcgcagtgggcctagatcgcgccacagcactccagcctgggcaagagagggagactccgtctcaaaaataaaaaaaaattagccaggcgtggtggcggaggcctgtagtcccagctactcaggaggctgaagcaggagaatgacgtgaacccgggaggtggagcttgcagtgagccgagatcgcgccactgcactccagcctgggcgacagagcaagactctgtctcaaaaaaaaaaaaaagttttttttgtattttttgtttgtttgtttttcgagatgatgagggtctcactctgttgcccaggctggagtacagaggcaagatcattgcttactgcaacctctgcctcccaggctcaagtgatcctcccattcagccccccaagtagctgggactacaggcgactgccaccacacccagctaattttaaaattatttgtagagacaaggtttcaccattttgcccaggctggtcttgaactcctaggctcaagccatctgcctcggcctcccaaagtgctggaattacaggggtgagccactgcgcccggtttttatcattcttataataattattgttatcatttgacaaataaaaaaatttatgacgcagcctcaggtggtcctgacatgtggccccggtttttatcattcttaacaataggtaatgttcattgagtccttattgtgtgtcagtattttatttatcttattttattcttcttgagacgttgtctcgctccgtcccccaggctggagtgcagtggcgcgatctcgactcactgcaacctccgcctcctgggaggcaacatagttagacccccatctctacttcaacctgggggacagagtgagaccctgtctcaaaaaaataaaaataaaaaataacaaaaataataataataaagtgtctgctcttggattatacacctacagagtaataatgttgcagtttggacgcacatttgtcctactttaaatgaccaccctgcaaactaaaagtagtaccatgaacaaaattcactcataatcccacggcccaagcgacaggcttaagtgaggaaggccctgtgtagtcttcctggaaatcttggtccacacaccagccctgcagccaaagcgggtcagttctgcaggtccctgccccaggtgcgcagctgcactacgcggcctccggcccgccccggagaaacaggccctgcccgccgctgcgccgcagccaatagcgcgggtgcgtttggtggcggcccatgcttggctgcgctctctgattgggcgcctccgggggcggggccaagcccaagcctggcgcgcagagtgcaccttcctgagctcgagcggtccagcgccaagttcggggtttggggttggagcggctggtcacgtggctggcccgcggcggtgcgcggggcgttgggtcagcgggtctgggactggtggcaccggcggcggcgtaggacggaggcgtcgctaggtacgtgcgcgggccgtgttccggtaggt

SEQ ID NO: 17455 - DNA, 2300 bp, Homo sapien
tcccagggaggggccaagctcaaaggtgaagcagccgggctcggtggctgacgcctgtaatcccagctctttgggaggctgaggtgggcgaatctcctgaggtcaggagttcgagaccagcctggccaacatgctgaaaccccatctatactaaaaatacaaaaattaactgggtgtggtggtgtgcacctgtagtcccagctactcaggaggctgagacaggagaattgcttgaacctgggaggcaggggttacagtgagctgagttggtgccactgcactccagcctgggagacagagcgagactctgtctcaaaaaaaaaaaaaaaaaagaaaagaaaaggtgagtcagggaggccaggggtgaggctggcgttggcccccatagtcattcacacaaacggctcctttctgaagacagttgattgcaggcgtacaatgagtggttagaagacaagtgtcaccaggaataaagtgggagcaggctggggcagaggctgagtggccagtcatctctattggcatctcactcaagacatgggccgggagctgaggacactggagaccactttgtttcctcattgctgtcaggggcctctgctgccctccccacccccactgcccctgtcagctcctccacctctaggaatgggggtttactgcatcccctctccatggccgagttcaggagcttcccatgagattcacccaaaaagggcacaggccttttctatcccatgggggcctgaggccagtatcaggtgtcggtccctggtctcccccatctgctgggacctttctctcctgccaggctgttttgtcctcagcgaggcctgccaggatgaccaggtgatgtcacccagtccgcctgttccatcccctggctccccctcaagccctccttccactaaaaccacggggatttcaggaatgacctggaaagcgacgccacctctgcagaaggggcctgttacgctgggccagtaaaatgagcgcctggaaaggggggtcccatcgcccctttcttgaagacgctgagggtcaccacagaaggaaaaggcagcagccctggtccccagtgtgaggaaaagaccaataagctggcatcactctctgccactcaatctgacttcataaaagccaccaggggccatttctgggtgggggaagaggcaggtaggaaaagccaagtgcatcgggctcccgggcctcagccagagcccaggcttagtggcacctgaagccagccctggtgctgctgcactgtgcacactttataaaatggggccgggcatggtggctcatgcctgtaatcccagcactttgggaggccaaggcgggtggatcacttgaggtcaggagttccagaccagcctggccaacatggtgaatccccttctctgctaaaaatacaaaaattttctgggcgtggtgacggacacctgtaatcccagctacttgggaggctgaggcaggagaatcgcttgaacccggcaggcagaggttgcagtgagccgagatcgtgcctttgcactccagcctgggtgacagagcaagactttgtctcttaaaaaaaaaaaaaatggaccttgtgccagttgtctggagtgaacgtcccctggctgccccatcatgtcagtggagaacacagagccaggccctgggctggcaggacaccccctcctctcctgggggattgagagctgtgggtgggggccagcctggcagcagggcctctgagctggctggagatgtttattaatcctgagctccagagctggggcctctccgctgagcctgcgcctgcatgtgcacgtctgtctccagacccatctgtcctggcccagctccttccctatctgggtgtaatcgccaccgcgctcccctgggcatgtgggtgtaacaagtccaaaccttctgtgggagtcgggcaggctcggccccaccctcaaggctgtgccctttcctcccagactggttatgcaagagcaggcatgagtgtggtttttgtgggtgcatgcgcggcaggcctggggcctggccgcctgctgcctcacctgcaaggaggggcctcccagaaactcccttccccaatgcccagccgccccaccttgccagacttagctgaccagccagcaaggacgcccgctgcctcccacctgccctcctgccctccttcaccagccaagcccagcctgagccagcacctgcctttatgaccatgttcaagggactgagcaaaggctcccaggggaaggggtcccccaaggactccccagccaaggggtcccccaaaggct

SEQ ID NO: 17456 - DNA, 2300 bp, Homo sapien
gcttggtaaagctgggttaagacatctgggcaagcagacagtagagtggaccccaggaagggtgggtggagggcgctggcctttgggcttccctggaccagggtgggaaggaggaagtttaccaggaaatagagctctcaggactatgtttaggaggaggtggtaatgctggtggggggatgtccattcatccatccattcatccattttctccccccaccccccatctcagactgtccccatgacagtcctagcaagaagagacaagaaacaagacaagttcacgttgtccaattttgaggtcttggaagaagctgcaccagtatgagaatagtgggtcagttttctccaggatccagaaagtatatcaggcagccttggagtgaggaaaggagcccggcttctccagcagccacacaggcctgcagtaggatgaggctggggctggtttggggtggaggataagtgatagccaaggtttgtcagcatgcagaggggtggctgactcatggactaggggctgcggagcccagtggttgcccttagttcttggatcctgggagacttctggagcctggatttggacagcctaggggtggaggtggtgaggggcaggggtggggcgggaggagaggccttgcatgacagggtgcagggcaggaagccagccagggactgctttgcagtggctgttcccatccccattcccacccccaaacccacccctccccccaccctggtgcggggtcggttgtgggcaggtgtcctctgctttggcctcagcagatcccaagagggaagctggcagccacgtgggcatgtcacttgtgtcagctttgtcctgcagtttctgcttcctggagcgtggggcgcccacccaggagaacacgggcacaccccacacctctcattttgagggtgctgggaggtgggggacctaggtcctgcagccctgtgcttgtgccgtgaaacttagcctaggagtcccgtgtccgcccatccacgtggagccccaggagcctgaacagtggcatgcagtgagatgaggagggagagagaactggaaaaggagacagaaagagatgtggagcagggaatgagagagaggaagagacagaataagaaatacttggggagaagtatttcatccctctggggtgccatgactcctccctgctatggatggaggaaagtgattgatctgccggagacatgaaaccacatgatacttccttccacaataaactggagggtcaaaacaggcaagagtaggtccaggtcttctaaaagccatacctgaaatgtttccaataacagttgatttggtggtggtaactcaatcacacaaacaaccacaacaaaagacacaactatcagagattttcagatagcctcaaaaacaccatctaacattagagagttcaaaaaggcatgaagtttcaaaaaattgagctttatttacatatcatttgcataaactggtaatttaacagtatgaataaattctagggcagaagacagtttggagaccccagggcacaagtgctgagtttggaagatttggtactgtaccctttgaagccctcacctggtccccgcaccccttgcctgcctgttaagaagagcccgtaccagggagcaaatcaggggcaaatagcccagaagcccagtagtggacagacctccatgcctggaggaggaggccacctctgagagcaggaggagctgcccgaacccttcctcacagcctccttttcctgctctcaacacctccagcttgcagatagacagccccagcaccggcagaatgaaaaggtcctgaggcagcagggctgtggctctggtaaataaaagaggcctctctttagtaaggtagaggagctcagactgcacaccctggtctctgacaccaaggctcgctccatgcccaggactaggggcagcgtgggagctgctggctggggccatgctcgcaacctcttctctgccacgtctatctccagcgatgctctcagctccagggctgagcccagtggctacagcaggtggcatgaggtctggcagcttgtcgctttgctggtctttggctgtatcggtgcagggcccggaggactctggagctacctctagctgcagcactgcctctggatggggacttccccatgctgtgggctgtggctccatagcgggcactggaagttcctctctctctgcacgtgcggcaagagctgaaaaaggagaaagggtcactgagcaggttttctgtgtctgagccccagagttcaatctctgctgaccag

SEQ ID NO: 17457 - DNA, 2300 bp, Homo sapien
cctgcgtgcacaacatgtccagtatacacacactgagcgcctgccctgaggactggtgggcctcctgtactttcttagagtccaggaggaagagaaggaagaaaaggtgaagaggaaggcccaggtagtagggttgctggtccggggcactcgcccactattgactgccccagagggtgacatgggaggggacatggcactggagcccacttgggggtggcaggtccccttgcttccttgttagtttcttcgtagaggccctaagatgcttgagcacagtgtcatcgtccgtggcccaggtatggaagaactggttccgaaaacatgccaaaaggccagacctggatgtcttcatgaggcgctctagggacagggtggatatcaggccaggacagttacctgggaatggtcacagctcataccccgtggccacttcagtctcccactgggccgtgccggatccttttgtggccaccccaggcgtccagatgtacacaggagactgtggctggggggtgatctggacagggaagtgctcaccacactcctgaccttcatctgggtcatgtgagggatgggctcggcatcacagtgcccttcccagcccacctggccagacctccctctgggccagaacagaggatcatgaggacagtgtgaggaagctgcccttgggccagtcgggtctgaccgcagggctccccaggccccactgggtacacatagacttactcttctgaaccttaaaagcaatgcttctgatcggcatcaacacctgtccttccagcaaatacatgtcccacaagcgcagggtgagcccgagagagatctgtggggacagcaggtgtgagacaacctggcccttccaggctggggctggtggctcaagctgcacacattggggcttcagtctccagagtcagtgaccttccccatgagggtcgcctgagccatctagaatggtgggtcagacaaggtcttgcagctcctcatagggggcactcatttgagtggggatgtggctcctggacagaggggcttgcccagggcttgaggcttccctgagccctctcaagttgggtcctggcccagtctgcccatgaggctgggcctgagccccagccattgccctgggatgacccctcttgggcagagggttttgcttgtgtgtccttcggggacccgcctgagcctcctgtgggctgggagtgagccagacccccggactggggaagcagggcactgcagggcaaggagggtccctgagccagggtctccctatgcctccttaccccttgaatcaacatccggagaaggcagcctaatgaggaacactgtccgcatagaccttccttgtcctgatgggaggaacagaggtgctcagggccccctgggctgccctaaaaacctccatcttccagggcctctgaagacccttcccctagtgcagaacactgggcggtgtccagagctccccacaacactgtccccttcccacactctcagtggacacactgacctttgacttgctctgcgggagctgggcccccatccctgtgcctctgtctcctccagggcaggaaaggaaacaaactcccagcccatggagaacccgacgtctcaggtcaggccctggctgggactccgccagtcaccagtcccacgagggtctccagtccccctgctcctatagccccacgggaggcaaggcctctgagaagagccaaggggacaataaactcacctgatgccacatggtcttgggttgtgacttgggtaccacatgctcctgttggtcttggagcccctggactgtcccgccatttgggctgtggaatcctgagaagcccccagcccatcatgaaatcagagccttcccccaagatgtggagccatcagctgcaagagctgggcagctgcagaggcccccaaacctgaaggcctcccaccctcccatctggtgaccccaccatgcggcctttgccctggggaggtaggacaagaacatcccctggagcctggctggaggttcccctggaggcctcctgggctagggtgcaaaaagggcaagcctgactttgaggtcacaacagagcggccagaacacggtgggtgctgggcttcctggtcatcttgtggaagtggggttgggccaggggacacgggatggggagatgctgccacctgggcttggttagcccattcgtgggcaccaagggcagcaggagcctgggcagctggagggcaggaggactctcagggaggggagagtcagctgcacagagtcagagccggagggt

SEQ ID NO: 17458 - DNA, 2300 bp, Homo sapien
aaaggctgcctatgcctgatggtgtgtcaaatacccaaagcttgcatggagggacctaacaatggaccttttcacaactgtgtttccagaatctttattgactttacttcatagtacaataagatgaaaacaaaacgcaaaccgcctgatttccaagagcttatttaaaaccaaaaccaccatgtgagacttagttagcatagtacacattagatatggatgacatttctgcagtaagtcattgttttaagtctagtaaatatccagatgataacatctatttaagaacagcactgataattatatacgaggaggtcatgttaagtattccacaacaaattaaagagatgatgtccatgaagttatctatgctactctatataacagatggaaaaagcttgggtaatattcagtgcggatactgacttgtgttcctgactcataggcggtgctcagacacatttaacccactgtctgacagaataaatgaacgtgtcctgtaagtgaacccgttctgggcatgaggttaattattttctatatgagtacattaaatcattttcttttccaagggtaaatgaagccttcaatttgattgaataaaatacaagatgtgcaccaccatgcccggctaatttgtttatttttgtacaggcagggtttcaccatgttgcccgggctggtatgggactcctgagttcaagccacccacctgccttgggctcccaaagtgctaggattccaggtgcgacccactgcacctgtcctgaaagacagattttgcttaatttctacacttgatgttctggtacagacatttgcttggaaatacagtatagttagcggaagccttttcatggggaaataagatatcagtaagtattccaggattttaaactagaatacaaaagaagaaaatatttaaaataaactatagggtaatataaaatgtatttacatccttacatttaactgcttattttacaagcaataagttatcattcaccaattaatttatgtcaagttcacttgtattaatacacataaacttctatgaagttccataatgccaaataaaaaagcaacatttaggtttaacatgtattttatataggcataacgcaacaccagcattacaggattgcatttacaaattctcttgactctaagcatgaagttatgttaaaagactaaggcaatttaactgtttttgggtttttttatattaaggaaacctaaatttgtatgagtgaattaaattgaattacattttcttataggcatatcagtttaccctttgttaaaataacacgcactgccctacaaaatgaatgccgtagtcacaatcatgtttctgccacaatcttaaagatttggggaaacaactacaatctaaaatcagagactccatgtccaatgccaaaggtacacacctctatttttccccagtaagcctcttggaaaagtctttgaattacacgttaaagtgcacttcaaggaaatgtgatgttttcgtttatagctggtgaacagcatgcaatttgacagcactgtcactaacaatcagagactgctctggatctaagtactaaaaatgacccacactgcaatcacaagatatttggaagtggggatttattgaacaaagttaggccgggagtctaaagcagcacttgcttcttttgctccaagacgacgacgtttaacattagcatcactattgtttctttttccctcaactcttctcccacactgccttcttctccccccccaccttctcccatcgtctttccccgcttcccttctccctccctccgctcccccttcttctcccagcactcttctcagcccgtctttctgcctttctcttcccctccccacctcgttccctgcctcatcctcttctctcccaccaatctttttcccctctccatctctttccccaaggtcgtcttcgccgctttccactcccttcttcttccccccaaccctcttccctcctccctccccatccttttcttcccttcaccccttttccagtcttcttccccaccttctgctctttccctcccctctccttcccgacccttctcctttcccaacgtcttcccacctttttctcccctctccgtcttctcccctccttcttccccactgcggtcttcccgcatcctcttctgccgtctccctactgtcttcttcccgcaccttcttctcccccgcagtttttttttccccttccccaccgttttcttcccctcagtctctcccattcctcgcagcacgggttcctgtggcgg

SEQ ID NO: 17459 - DNA, 2300 bp, Homo sapien
caatttgattgaataaaatacaagatgtgcaccaccatgcccggctaatttgtttatttttgtacaggcagggtttcaccatgttgcccgggctggtatgggactcctgagttcaagccacccacctgccttgggctcccaaagtgctaggattccaggtgcgacccactgcacctgtcctgaaagacagattttgcttaatttctacacttgatgttctggtacagacatttgcttggaaatacagtatagttagcggaagccttttcatggggaaataagatatcagtaagtattccaggattttaaactagaatacaaaagaagaaaatatttaaaataaactatagggtaatataaaatgtatttacatccttacatttaactgcttattttacaagcaataagttatcattcaccaattaatttatgtcaagttcacttgtattaatacacataaacttctatgaagttccataatgccaaataaaaaagcaacatttaggtttaacatgtattttatataggcataacgcaacaccagcattacaggattgcatttacaaattctcttgactctaagcatgaagttatgttaaaagactaaggcaatttaactgtttttgggtttttttatattaaggaaacctaaatttgtatgagtgaattaaattgaattacattttcttataggcatatcagtttaccctttgttaaaataacacgcactgccctacaaaatgaatgccgtagtcacaatcatgtttctgccacaatcttaaagatttggggaaacaactacaatctaaaatcagagactccatgtccaatgccaaaggtacacacctctatttttccccagtaagcctcttggaaaagtctttgaattacacgttaaagtgcacttcaaggaaatgtgatgttttcgtttatagctggtgaacagcatgcaatttgacagcactgtcactaacaatcagagactgctctggatctaagtactaaaaatgacccacactgcaatcacaagatatttggaagtggggatttattgaacaaagttaggccgggagtctaaagcagcacttgcttcttttgctccaagacgacgacgtttaacattagcatcactattgtttctttttccctcaactcttctcccacactgccttcttctccccccccaccttctcccatcgtctttccccgcttcccttctccctccctccgctcccccttcttctcccagcactcttctcagcccgtctttctgcctttctcttcccctccccacctcgttccctgcctcatcctcttctctcccaccaatctttttcccctctccatctctttccccaaggtcgtcttcgccgctttccactcccttcttcttccccccaaccctcttccctcctccctccccatccttttcttcccttcaccccttttccagtcttcttccccaccttctgctctttccctcccctctccttcccgacccttctcctttcccaacgtcttcccacctttttctcccctctccgtcttctcccctccttcttccccactgcggtcttcccgcatcctcttctgccgtctccctactgtcttcttcccgcaccttcttctcccccgcagtttttttttccccttccccaccgttttcttcccctcagtctctcccattcctcgcagcacgggttcctgtggcggcagcttttccttccatctccttctctccacccgctggcttccagtctccaccttcccgcctattcccccagcagcgtcttcccgccgctccctcttctcccctccccctcctcaccgtcttctcccggcctattaccgccaaccgttttcttcctcatcccgcacccttttcttcccatgtctgccttagtcttcttcccaccctcttctcctctccccatcgccttcttcccaccctcttctcctctccccatcgccttcttcccaccctcttctcctctcccaatcgtcttctttcccagcctcttctccattttcttgccgcctccatatccccaccttcttctcgcagcagcgtcttcctgccgcgcttttctctcccctcaccatcttctcttcctcttccccaccgtcctctccccacgccctcttctcctcactgtcttctccccgcgccttccccacaaccgttttctcccccgttttcttcccctcacaccgttttcttcccatgtcctcccaccgtctcgcagcagcgtctgtcagtcgcaatcttcttcccactttcttctctccccctcccatcg

SEQ ID NO: 17460 - DNA, 2300 bp, Homo sapien
cactgtgatacacatgaagccatatacctttttcagctcattatccccagaatgtatttgtacattattaacacagaatagacacctaataaatatttctaaatttttattgttcttccttgccacaaaaagcaatcacttttttttagcatgatgtacatgcccttctatcatgttgccctgaactatttatcaaatcttatttcttcccactcccccatttgtttcccatgctgtggctgtacaaaactacttagagctctgtcaactctccatgctattttataataatcaacactaatgaaaagaaagggggctttataacagaggcagaactcattatgttctaaaaaatacacgcatgtttcccatgttgaatagtgtcccgcagaaagtcatgtccagctggaacccaggaatgttaaactatttggaaacagggtctctgcagataacacttggttaagacaaggtcacaatgcattagggtgggctgtaaagccaatggctgtgtcctttcaggaaggtcatgggaacatacagagacctacagggaagacggccatgggacaagggaggcagagtctggagttacgctgcctacagtcacggaatgccaaggacagctggaaaccaccagaagctaagaaggagattttacctgaaagcctctcaaagaaatcaatcatactcacacctcctttttgaatttctggcctcgtgaatggtgaaaaaataaatttctgtcgtcttaagccccacggtttgtagtcatttgttctgttcctagccttaggaaactaacacagcatgctaagggaaaagaagaaaattctgcataaaatgtcattttactttttaaaacaactactgttgacagtaaatgagtattcttccaagattcatatgcagaacatatatgcagcccggaacattttttgggacccatggcataagtgattatgatcgataaaatccaaatattaacctgccaaaagagttattttatcttttgcagtcatttaaaggtaataagcagaggtcatgagccctataaaaattaatctattcatttgttgtcacttgatacttacgatccgttgacatatttaggttttaattctttgtacagattatggttcgtcttgcactgtaattttattgcacaacaaattttttatttatatatctaagttgtttcttaaatgtgaataacattgcacttgaaaatagaagacttctgtcgacgttctcgtaacagcttcttctagttaataaaaacctaatcccattttccttttatgtatagattacaagtaaaatcggcatttaaaaagtaaaatctgttcaacaatttctattgctattgtaggtagtataacataaaatgtgtcttatttttccctcactcattgacaatttaagtaaattttttaaaccaagaagctcttttcacataccaggcccagtgattggaattgagtattcagtattgaacagagcaaacaagtttcttatcattaagctcatattctatgttataaacatttttccagtgaaattactggaatgttttcaagcaatattgaattgtgttcttataatcacctatctccatttattgttgagaatgaagaaaattttggagcattcaattcaatgcaatgatttttttttttttttttttttttgagacagagtttcgttcttgctgcccaggctggagtgtagtgtcacgatcttggctcattgcaatctccacttcctgggttcaaacaattctcctgcctgagcctcctgagtagctgagattatagacttgtgccaccatacccagctaattttttgtttagtagagacggattttcaccaggctatccaggctcgtctcgaaatcctgacctcagatgatccacccgcctcagcctcccaaagtgccagcattacaggcatgagccactgtgcccggcccagtgcaatgatttgatagttattatggtggttttaaaatgacctgagtgaaatatagtgcttacatcaattccttatctgtcatgcatttcatctagtaatctgctctaactacattatttctttttattaaatgtcttgagatttaaaaagatgttttgtagttatactcaagcttggaaccatagtgaccaactgttacggacagactggattgtatccccttccaattaagttacggtgctgctacagaaagaaaagaggtgaactattttttaaaagcatttctccattggctttgaaaatgcctatatcatcatgaatagaat

SEQ ID NO: 17461 - DNA, 2300 bp, Homo sapien
attcttttgctttcatgggacctatctcattcccctcccctaaacggccacacatttcacagtgctggctgaaagtttcatgtagaaattttattttatgattaatacacttgtgccatttcttggaaccacttgcttgtttaattctagtctatcaagtgataattttcttgatatttagaggctcctcagttaatttctgtgggatttttcgttatatttaataaggaaaataataggaaatagctaagaaaaaaagaaacaaagccaattattcctgagcgtgtttaaaattattgaagtacacttgttaatttttagtatagaacctacatttcataatagaaaaccttggacttgccagtgttagctgctggaataaggtgtttgtccagtacattcagaatgtcgccacagattaactttagctcagtctcaacctgaaaaaataaaaatgaattttaaaaaattcagattgttgaagtctagaaattctgtaagttattacacattctatgtacctctgattttgaggaagagagcttagtattgaacagaattagtttccctctccaaactccattcctcccttttgacacaaaagcagagaaaagctgcctctgggtcatcaaaagtatcttttcctttccgcgtgcaattaagtgctacacacacacaccacccccaccccaacaccccatcacagtccaactgcagaatcaccaatgactgaaactgaacactgatgctacttggtaaacactggtcaattacatgaatctttcacaaggtagcaactattgtgtccatttacttgggaaaacagaagctaagacatttgctcaaagatcatcaccttaaaagaacttaataagcagagctaggatttgaacccaggcagggtgcaagggacagaacaaaattcaaacccaggcagtttgccttcagtatttacattcctaacaacgttcaacaggcaatccctttagtggaagagatccaaaactagttaagataccaaaaatctgtggaccaaagtaactattgccacatacccagtttacttccttttcttttttttttttttttttttgagagggagtctcactctgtcacccaggctggagtgcagtggtgtgatctcagctcactgcaatctccacctcctgggttcgtgccattctcccgcctcagcctcccgaggagccgggaccacaggcgcccaccaccacgcccagctaattttttgtatttttagtagagacgggtttcaccgtgttagccaggatggtctcgatctcctgacctcgtgatccgcccgccttggcctcccaaagtgctgggattacaggcgtaagccaccattgcccggccgctaaactctttaattttcaattactccaattgcttgaaactcaaatagccatatggggctagtggccaccatttggacagagtgactccaacattccatgtggtgtaattttatttgctagcctttagcatcatgtaatgtgatcttcttcacttgttttctgtctctgtgaccagagcatcagctccttgaggtgggaattggtttgtcttatccactgctgtatgctggggctagaagttggcctggcatatagtagatgctcaatatgtaattgccgaatgaatgcatgagtaaatgaatgactcctggggaccatgaactctgaatttctccaaaaggaatgctagttctgccagggcttgctgctctgtgacctcaagtcaggatcttgccctctctgggctcagcatcctgaccaaggggcactggggcccctctggtcctaaggctcgagacttactgctgcttactctgtcctgttgggagaaaagctgagtgttgggagagaagctgaggcagggcttgcatgtctgctagacttgctgactccttgcttctagcactcccattatctcaagtagccacatgtttcaaagaaaatgctacaccatcgcagctgtagctcactcacttgatacattgattcctttaaacccccacagcctcaccacctgtttctttgtttgagcacaaataaatagcctgggctccctgtgtacccattgttctcacttaatacatgagaacatgcaatatttggctgtttctgcgttaattcacgtaggataatgaccttcagctgcatctgtgttgctgcaaaggacatgattttgttcttttttatgactgcctagtactttgtggtgtatatgcaccacattttctttatttaatgaaccgttggtggatacttaccttggtt

SEQ ID NO: 17462 - DNA, 2300 bp, Homo sapien
cacctgtgggaccaccacccagaaccagatccagaacatttccagcctctcgaagactccttcgtgcccctcccagtcagtgactcccaagggtaacgccactctagcctgttgttcaacttgactcgaatggaattctcacagcatgtgtctgtttggatctggcttcttccgctcagttgcaaggctcattgacgtttcctgtggcctagctcctttttattgctgagggccactctgtagtgtgaaaaccacaattcatttctcccttcttctgttggtgactatttgcattgttaccagcctggggctatgacgagtaaagcttttaaaaacagacaaatatgttttcctttctcttgggtaatttttcagaagtagaaaagccagcaactttgaagtagatatttgactatattacaactcaccaagcagtttttctttctctttattttttttattttttgagacagagtcttgctctgttacctaggctggagtgcagtggcgtgatgagggttcactgcagcctcggcctcctgggctcaagtgagcctcccacctcagcctcccacatagctgggaccacaggtgtgcaccaccacacctggctaatttgccttttaaattatatgtagagacagggtcttcctatcttgaccaggctggtctcaacttcttggactcaagtgatcctcccacttcagcctcccaaagggctgggattacaggcatgagccaccacgccctgcccatttttctaagttggattattttacactcaagtctgctatgaatgatagttccagttgttccatatcccaatcaattggtgattgctacaaatgacgtgacgtgatgaaaatattcctggtattcgagaggattgcaaagaatttcccttcttttctctcctttctgctccccttgtactgtctactccttaacttggtcaaattctacttgatccagaacataatgggatggtgagtgcagacgacacacacggcctcagtctatgggaacatctcaaaggagttcgtctgcaaattctagtgcatctaggcagaacacaggaaggaagagaggtgcagacttacgtatggccctggggcacctgccatcccctcgagcctgtatggtccttacccgcccatccccagcttgagttctgggccttctcgccagcacatcgttgggacctggtcaacttcaggtaagtttatttcatggctccctctcccctctgcagcctatcctgttattctctgtttcagccaattatttcccctaactaggtgctgaagccaattaaaggcagttcatgccatatgttccttcccactcccatgtcacttgaaatgttctattatgtccaatacttctctccccatcctaaagctcacaaaataaggatggagaagagaagaaagagagattcactgagggggaggatcagaagctcctgggcaccccatactctagaataaaaatcttcattatagtgtttttcatgcaaaatattcccttctacataattatgttttaacatgaagaatagaaatttaaagaggagaaatacttcttgaagattctgagaatcttcatatagctcaggctgccacgaattagctgtgtgacctggggcatgtccctcagactctgagcctcagcttctctatatgtaaaatgagttgaagccacccttccccacaagcaccctgtgcacaggcaatacccagccccattattttctggaaccagtggccaagcatgcttaggacacacagccacatacttctgggcagtgtcatctggcaactcactgtcatgtcagtgtggtcaagcattgtagacctctatgaaccaaatatgcttcaggcttgggttgagcacaggagagggaggagggaaaggtcactggggctgggagtgcctacttccctctatgagtgtcaccccagttcacccaacaccctacctttctctctctggacccacttcctcttgctgccggctcctccccattgaataacagccaagttgctttggtttctattactttgttaagtcattccttctgcaaaggactgcctggcaggtgtcaaaggcagtggtggccacagaggcggtggagagatggccttcagcggttgccaggctccctatctgagcccagtgagttccggggccgtgggcacagggctgcctcagccagggggacacagttctggggctctgaggaagcaactcctgggtggcaggagataggggtgggggcatcccaaagagaacacaag

SEQ ID NO: 17463 - DNA, 2300 bp, Homo sapien
tcaggcattagattctcataaggagggcacaacctagattgctagcatgcgcagttcacaatagggttcgttctcctgcgagaatggcatgccgctgctgatctaacaggaggcagagctcaggcggtaatgggagcaagggggagcggctataaatacagctcaccgctcacctgctgctgtgcagcccggttcctaacaggccatggacagtgctggtctgtagcccaggagttggggaatcctgctctacagagtttccaacctcagagatgaagcatcccctctgtaagtcagaaagaaattattcaagtaggagaattaaaacaggatcacagagagggaggctgaagaatttgactttctgtgtttacttgtatgaggaaaaacagcacatagaggcatccacagtatttaatttgtttggataacagttacagataaacaggtacaccccatatacaattaccaatactttttatacagttcatatttcagtacatcaacactattttatttacactctatttatatacattaacatctttttaaattgggattattgtccatatgctttatattttttattccagtgatttcccttttaggaatttatctgaggggagaatactctgtaattactccataatttgcaggcaaatatcatcatagcattttttaggagagtaaaaagttattaacaacttatatttgtctcacattagaggaatggttaaataaagcatggtgtattcattggataaactataatgcagttgttgaaaatgattaccaggagtttttgctaacatttatgggaacatgcttatgatatgtgaacatttttttaaaaacaagacataaagttgcatatactggaaataataccttcaatattgaaaaaaatactatttaggaaaaaggacagaagaaaatctgccaaaattttgacagtggttgcctttgtattaagaatataaaaggattccatgcctttttacatttttctctgctttccaaattttccacatgaatattatacatagtaatcagaaaaaaatacagggacactcactcttatcctttacatttctctcctgtttggacctcagattcctcagtagaaaattaaactagatgccagcctgggcaatatgatgtcaccctgtctttacaaaaaatgcacaaattagccaggtgtggtgttgtgcacctatagtcccagctgcttgggaggctgaggttggaggattgcttgagcccaagagatcaaggcggcagtgagctgtgatctcgccactgcactccagcctgggtaacaaagcaagaccctgtctcaaaacaaaaaaaagaaaaaaaaagaaaaaaagaaaattaaactagacaaattcttaggcctctctctttttttttttaatagtcttatatgaagactattacttcatttcctgtgttttgtgttaagatgagctttaaagcaactctgaaaaagaagagggtgcctataagtaattcatagactgtttaaacaatagtagaggatctaagcatagatcccaagaggtaaagggaatctttatcactttgggaacttttactgataaatagaaattactgtcagtacagtccacaaatatgttgtttatcagccatctttcctccctgtcttcatctagcactgtagcctgtgttccacagaaaatatagtcaataaaattcaacattctttactagcttactctaatttgtggttggccataaagtattcctggtagagataatagagataatatttaactggccatgagaaaggaaacactatcgtatatgatacacccctttttctactcattccaacaacgatgatacagcacgtttccttttgaagcacgtgttttttccttgagtgaccagttcaaaagatgatgacagttaatatcttgttactacagaatttgtactcaaaaaagaagtctataacccaagtccttttctaaaaaaagaattttcctctaagttcccctttttaaatgagctctttagcctgggtaattatgcagtgctagaaccgtaactgcatgatcaaacccaaccttgcttgtttataacagcatttgacagcctcgtgactctcacatagggaaaaagtctcgcctgaaaacccatgctaagctgcgtgtcttgagctgtgccaatttgtattccaggcagcctaaggttcccatcgtgagtttcaggaagggaaattcatggaggaagttcacctctggaagggtgaggagcaataaatagggtgggtg

SEQ ID NO: 17464 - DNA, 2300 bp, Homo sapien
ttgccgtaaagaagctctttagtttaattaggtcccatttgccaatttttgtttttcttgcaattacttttggcatctttgtcatgaagatcatttccaggtcctatgtccgcaatggtatttcctaggttatcgtccaaggttttaatatgttttcattttagatttaagtttttaatcctgcctttgcctcccaaagtgctgggattacaagcgtgagctaccacacccagcgaggaagccaagtttaacgtgtgtgctccactcctccaacctggccaaagggcagtcatcatcactggccactgctgaccacagcctttagaaactccccttgaacgtgctgggctgaccttcctctgatcacaggcaaggtaaccatacactcaaggccaatgatcccatctgctgtgggctgggtcatgctcccaatgcttacagaacctgggaggcagaggaaaactctgcccatcccatgggacgttacctgtaagctttgaacaccagaatcttgaggcctatctctttctggaaggctttgtcttcctctaaaccaggaagctggagcaattccaccagattctgtacaacagatgcaacaagaaaattcatgaagagtagatcttaggttgaatttttcacagaagaccttgtaagaacagacaatggtgagaaaaaaaaagcccgaggtcaatacaatggggaaaagcctgtgaagtgacctggcagcagccacacctgctgtcgcctccattcccctctcatcttggaaacagatttgccctttacaactcaactcatagctcacccgccttcagagacttcttggcccatcttagctggaagggatctgttccagcgctgagcttttattttgcttagcatctactcagatgccttgactgtgtgtgtctcacagtcctactgactgacaaactccctgggggccgagatggcatggattcaggtctcagatgctctatggcacctgggagcatcttacacaggtgaagtgctcagtgatgatctgaggtcactattctctgcagatcagcatgtctgagaggtaggggctcacagactgtggaactggtgtaagacctttgtcttttcccagctactaacaggtcctgcttgtcacagcccttccatgatacaaagttaagtcattttgtgtctgacacaggcaaaggaaaacgacaggcccttgccttcccggtcctcaagggtcagctgtaagatgatgtcataaagccagatcaggtcctggggccgggggaagcacttgctgtcatcctctggctgctgctgcagcagagccctctgcagacctttggccatgctctcattacgcttgattgccattgacagcttgatgtaagtcaggtaactggaatgcaccacacgtcagctcaagttatactcagagaagcagaggaactgggaggactggactacgagttggggctgacccagagaaagtgggggggtgcgttggggcaaggccacagcagggccatttggcctgggcttcaagggaccctgtaatcccaactacttggcaggctgaggcaggagaatcacttgaatccgggaggtggaggtttcagtgagccgagatagtgccacttcactgcagcctgggcgacgagtgaaactccgtctcaaagaaaactaaaataggctgggtgcagtgactcaagcctgtaatcccagcactttgggaggccgagatgggtggatcacctgaggctgggagttcaagaccagcctgaccaacatggagaaaccccatctctactaaaaatacaaaattagctgggcgtggtggctcatgcctgtaatcccagctactcaggaggctgaggcaggagaattgcttgaacctgagaggcggaggttgtagtgagctgggattgctccattgcactccagcctgggcaacaagagcgaacctccgtctcaaaaaataaataaataaataaaataaatacataaaataaataaatacataaataaaatagatatgtatttatgcaaaccatagaaaaatgtttggcaaccatcgcaagatacctgacaatgtgaaatagttttattacaactggcctgaccttcaaaggccttcacagctcctgccttcatgttaccgtctactatgttcctcgtgcaccttccactcagcacaaacaggctgcactgcctccgaaacacatcacttgaatcctacctctgctcctttgtccatctgaatcaccctctccacatttctgaccgtgtaatcctgatctcacttcatg

SEQ ID NO: 17465 - DNA, 2300 bp, Homo sapien
cttacccataacaaagttgattaatatatatgctgtatattctatgtattatacactatattcttataaaagtaagctagaattgccttagctattccagctgttttggggtttgatataaattttaaaatagtttatcctaattctgtgaagaatgtcattggtagtttggtagctgacttcaaactatactacaaacctgcagtaacagaaatagcatggtactgttacaacagcagacacatataccaatggaacagaatagagagctaagaaataatgcagcacacctacaaccatccaaccttcaacaactccacttaaaaaaagcaatggggaaagcaatgggactgctgggtcaaatggcaattctaagttctttgagaaatcgccaaactgctttccgcaatgactaaacaagtttaaattcccaccagaagtgcataaacatccccttttctccacaaccttgccagcttctgttagtttttgaccttttaataatagtcattctgactggtgtgagatggtgtctcactgtggttttgatttgcatttctctaatgattagtgagtttgagcatttttttcatagccttgttggccacatgttatgtcttcttttgaaaagtatctgttcatgtcctttgcccacttttgatggggttgtttgtttttttttcttgtaaatttaagttccttgcagatgctggatattagacgtttgtcagatggctaggttgcaaatattttctccctttctgtgagctgttcactctgttgatagtttcttttgccgtaaagaagctctttagtttaattaggtcccatttgccaatttttgtttttcttgcaattacttttggcatctttgtcatgaagatcatttccaggtcctatgtccgcaatggtatttcctaggttatcgtccaaggttttaatatgttttcattttagatttaagtttttaatcctgcctttgcctcccaaagtgctgggattacaagcgtgagctaccacacccagcgaggaagccaagtttaacgtgtgtgctccactcctccaacctggccaaagggcagtcatcatcactggccactgctgaccacagcctttagaaactccccttgaacgtgctgggctgaccttcctctgatcacaggcaaggtaaccatacactcaaggccaatgatcccatctgctgtgggctgggtcatgctcccaatgcttacagaacctgggaggcagaggaaaactctgcccatcccatgggacgttacctgtaagctttgaacaccagaatcttgaggcctatctctttctggaaggctttgtcttcctctaaaccaggaagctggagcaattccaccagattctgtacaacagatgcaacaagaaaattcatgaagagtagatcttaggttgaatttttcacagaagaccttgtaagaacagacaatggtgagaaaaaaaaagcccgaggtcaatacaatggggaaaagcctgtgaagtgacctggcagcagccacacctgctgtcgcctccattcccctctcatcttggaaacagatttgccctttacaactcaactcatagctcacccgccttcagagacttcttggcccatcttagctggaagggatctgttccagcgctgagcttttattttgcttagcatctactcagatgccttgactgtgtgtgtctcacagtcctactgactgacaaactccctgggggccgagatggcatggattcaggtctcagatgctctatggcacctgggagcatcttacacaggtgaagtgctcagtgatgatctgaggtcactattctctgcagatcagcatgtctgagaggtaggggctcacagactgtggaactggtgtaagacctttgtcttttcccagctactaacaggtcctgcttgtcacagcccttccatgatacaaagttaagtcattttgtgtctgacacaggcaaaggaaaacgacaggcccttgccttcccggtcctcaagggtcagctgtaagatgatgtcataaagccagatcaggtcctggggccgggggaagcacttgctgtcatcctctggctgctgctgcagcagagccctctgcagacctttggccatgctctcattacgcttgattgccattgacagcttgatgtaagtcaggtaactggaatgcaccacacgtcagctcaagttatactcagagaagcagaggaactgggaggactggactacgagttggggctgacccagagaaagtgggggggtgcgttggggcaaggcc

SEQ ID NO: 17466 - DNA, 2300 bp, Homo sapien
gacttgaattgtgtaacctctgtactaataagggaaaacatcacacttttgaaatgacatagatccaacagaccaatattaattgtacttttgtgagattaatctaaacagcataacacatatatgttctccattatctaaacttaaaattggtaggaatttatatgatatttttaatttaagcaatcttcaaattaggtctagtctgtaaaagtattatttaaaggccgcattttgtaattaatgctccttaccatgataatgtctcttcttaaacgttataaataatatttgacttatttcagatgcagcagaagttgcaaaatgatctaactgcagaagtagcaggtatgttaccaaaatttatgaattaaattgattaagtaatatatatctgaaataaactgcaaacgacatccctttccgttcttgggctagtagatactacattaaatattctttcatatacatctaatgaaagatgtgaaaacttgaacatgtataatgaagagcatacttatgcctcatgaattcatcacgttccatagcttgaaaaaaatagctcaagaagtctggctctactcttcacttctgccatccctatggaattgtcagccagcacacagaaacggttctcagaaaacagaggcatcatcaatttctcagggttatggtagtgatttttaaggccaaaacatcccagtctcatctagtaacctattcaagcagttacagtttataagcagtcgcttgagaggtaacactttaaatctccagtcatttacagtgtcattggtttacttttgccctcagaaaaagttccaaattccttaacatgtaatataaacacccacgttcatttggttcttgtcaagttactcaggcttatctctcaccacttactttactctgcccctttgctctaggatccagccaaactggactgcacagaattccacagtgctcgtccttctccagctctttgcacttgcttctttgctctatctgccaacctttttttctcatccttcaggtatccactaaccatgcctccaccgaaaagcctacagtatcgagacaaaactgggataggtatccctcttgcattccaatagtgccctgttttatacctgtcagggtatctatgacttggtatggaaattgcctatttgtctgctttttcaggttatagcatatgattgctgaggggtggactgtatcatcttcatcttgtaactccagggcatagtctagtaccttagcatgcggttgttgaataaatgaatgaagaatgagaaaaccagaagctgtgatacacaaccacagtgatcattaatttagtgtgcaactatgggcagattcttatctaataataagttagcattgtagtcatacatacgtttcattcttgttaacactgaaaaagctctcaactcttttttactgatttgcacttagttaactatgaaatatgtagaatataattctttggccaggcatgttggctcacgtttgtagtcccagcactttgggagcctgagacaggcagatcactggagcccaggagtttgagagcagcctgtgccaacatgacgaaaccctgcccctataaaaaatacaaaagcttgccaggcacagtggctcatgcctgcagttccaagtacttggggctgaggcaggagaattgcttaagcctgggaggacgagactgcagtgacctgtgatcacaccacggcactccagcataggtgaaagagtgagaccctatcttaaaataataacaataacaataataataataataataatataattcttgcttttttttttcagctgctactaaatatgaacctggatcctatatagcttctcctctaggatttacacacaaggaaaatctgaatcaagatccagttttggaagtaacaaaagagtatgcacagattttaagaagaaaatacatactctgaaagataaggcaattttatttgggctattcacatgatattttgtttcccattaaatatatgatgtgaacatttttactaaagggaaatattctatattatacatgtctgatgaaaatttatgtagtattttaaataatgtttcttggcctcttcagctaacttttaagtggattttgcaaatgaaaaccagtattactgagttttacatactcgaactgcccaaatgtttgctgtttaaacagccaaataatcaagttgccattagtaatttagtggagccaattgatggcttgtttgtattttataattttatctttatacatagtgata

SEQ ID NO: 17467 - DNA, 2300 bp, Homo sapien
gactgtgtcaaatgctgctgatacataaattaagacaaaggctggggaattatgctttaattaataatttaacaatgtgaacatggtttgtgctttgataagagcaattttgttggagtgagtaggtgagaaaccattttggagtggtggctcaaaggaatgtcagatctctgtattctttttttttttttgagatggagttttgctcttattgcccaggctggagtacagtggcacgatctcagcacactgcaacctccgccttctggtttcaagagattctcctgcctcagcctcccgagtagccgggattactggcacacgccaccacacccagctaattttttgtagttttttagtagagacggggtttcaccctgttgaccaggctggtctcgaactcctgacctcaggtgatacactcgcctctgcctcccaaagggctgggattacaggcatgagccaccgcgcccggccctttatccagtctactattgatggacacctaggttgatttcatgtctttgctattgtgactagcactgtgatgaacataagtgtgcatgtgtttttggtagaacgatttcttttcttctggatatatacccagtaatggtattgctgagtcaaatggtagttctgttttaagttctttgagaaatctccagattgctttccacagtagctgaactaatttacatttccaccaaaagtgtattcccttttctccacagccttgtcagcatctgttattttttgactttttatcaatagccgttctgactgatgtgagatgatgaaatctttaaaagtgaagctctatagtcttccccagttattagaaagtgttcttcctcagccaccgtgtaaggagagcatcttagccagcccaattgcaggcgcgagtgactccccagaaaaggaattaggtgaaggatgatatgtgacatcgctgtcataaaaatggccataacatgtgtccctagggctgctgtgtctttataaggccatgtagtctgtgaggggtgttgctcactgagtgccagcgtgcccaccaggacagccgctgcgggactgggtgctgcatgtccctgtggagggaggtcaccacacagcaattcctgaggcatggctgggcctactctgcaagtgtaaacttgatgagctgtgcttaaatagctaatttgtgcttgattatgtgaatgcaatttttttcatatttactgtatgtatttactgtttaccattctgggcatttttcatgtatggacttgttggaccctcacagaggtcctgtgaggtggatgcactctgcaggaggaaactgagacacatggcttatgagcaggaaaggcaagaggcaaggccaggcaggcagctccagagcccatgccctcaaccaccctgacagctctaccttctgcacatatctggttagatttagaccttagtcggttttttttcgggtttttttttttgttttttgtttggtgctgtcgcaattggtattgtttttcttattaccaaatccaattgttcaatcggtatatgggacagcaattgacgtttgtatgctgactttgtatcctgagacttagctaaacctgcatgtaaacaaacactttgggattttctaagcaatcatgtcatctgcaaataaaggcagttttatgtcttcctttccaatctgcatgccatttatttctttaacgtgcctttttgcactagctagaacttccaacaccgttttttgttgttgttgtttttggttttgtttttgagatagagtctgtgaaacagcactcatgacaggcaggctaggcgccgccaccccgaaacctccgagggaggaccagccagcccaggttggcgctggagctgcagcaccacctgcaggccaaggagtctttttctgggaggctggagctacagcgccacctgcaggccaaggagtctttttctgggaggctggagctgcagcgccacctgcaggccaaggagtctttttctgggaggctggagctgcagttgcagtgaagtcacaggttccgtgacgtcacaggtgggcaggcgcactggtctgtaacggattggcttggccttacccgcgaggctttgcggtggctgcttggcttggcggtggtcgcttggcttggcgtggcagtgatcgcttggcttggcatttctggcttggcggtcctcctttcgcagattggaaaccgcgggctatcctgctgggaggttgtggccgaggcagtagctcgctactgatggcctcctggggtggagaaaagcgggga

SEQ ID NO: 17468 - DNA, 2300 bp, Homo sapien
cgcacgttgacacttcaaggggtggagggtgctgactctggtcccggctgacccaggcaggggcccattgtgatgggtgtcatgacctcacaatgtcactggtgctgagcactcgcccacctgtccgcttgccgtctctatgtctggagctcttagagataagacatagaggtgtctggttctgagaaaaggaagttttgctaagtgagagacacaactgactcaactgactcaggtgagtgtgacctgctctgttccttccctgctgacctgggtacagtcattacctggtgggcagggctagcctctgggcaggtgccgaggagggtcatccctgagcactcaccaggtgcctgttctgcactgacctggtggactctgtggggtgggtgctgtccccgaatgtacccattccacaagtgagatgtctagggtcagagaggaggtgactggccaagagacccagatgtgatcctgggctgtgctctcagccctgccctgtgcatgccctggtctctatggccctagattccaaatctgcccagggttttctggcccctgatggggcagagtctggccctgaaagagctactgggatggaactcctatgggtgtggtggagggaggtggtgctcggtccaagtctgtgccctaagctgggtgtccgcaggaggaggtctcaccaactcagacttcacgtgcggtcactgagggtctccgtgggacccactggacacatggggtcccttgtctgggagtagggagccctctgcctgtgggcagttgtggtagaggaccttgaacactgctgctctggggcctgggcagggaggacttggacagtggggacctggtcaggaaggcctggtcactgggggactggtcagcgaggacatggtcagtggggaattggtcatcaggggcctggtcagcagaggcttggccactggggcttagtcagtgaaaaactggtcagtggggacatggtcagttggagcctggtcatcaggggcctgatcagtgaggacctagtcagaaggcctggtcactgggaaaacggtcagtgaaagcctggccggcaggggtctggttagtgggggcctggccagatggttgcttggtgacctcaggcacggggtttgtccttagagcctccttgcctccgtccatagcagaaatgagtcatggcaccctggaaggctactgggaggaggaggtgaaaaaatgtgtggaatccgaccttgccactcacacccagcattttacagtctagctgagttccccctaatgaggggccctgtcctgtgccctctaacccctagcccccatctgcatcttcaggactgccccgtgtggggagttctgaggttggggaggacccatggatgctctgatgcttgccacaggcctcaagggaaggtgacgctgattaagacttgatgagcacttgggtgcacatgtaagtgggacagccagccctggccagagacgctactcgtgcacacacatgttcacccacataaacatacatgctcacctgcacaaacacattttgacaccttaggggctggaggacaccgactctgggccctcttgacctgggcaatggcccattatgatgggtgccatgacctcaaaatgtcactggtgctgagtgaccgcccacctgcccacccactcacctctgtgttgtgcagcacttgcacataagacgcacacaggtgtctggttctgtggtgcatgaacgacttttctaagcgagagacacagcagcctgagcagactcaggtgagtgacctctgggcagatgccgacgagggtcacccctgagcactcaccgggtacatgttctgcactgacggcgtggaccatcctctcctttgtcctcacagagactctgtggcgatgggtgctgtccccaaatgtagccattccacaggtgagatgtgtagagtcagagaggcggtgactggcccagagacccagatgtgacccgggccgtgcactcagccctaccctttgccatgctggacttgagctttgaccgctgaggcctctctaccctagattccaaatcttccttgagttctggaattcaatgaggcagggtctggtcctggaagagccactgggacagagcccctgtgggtggggtggagggtgaaattcttggtccaagtctgtgccctaagcttggtccccacaggaggaggtcactgatggttgctgtgggacccactggacacatggggtccttcatctaggagtggggtggggagccctctgccctcaggcagttg

SEQ ID NO: 17469 - DNA, 2300 bp, Homo sapien
ctaacagaattggagagactgaataaccctcccttgaaagaaccaccttttatgctacgtttaaactaatgcttatgtctgcaaagaacctattgcttaaatttgttacaacaggttcaatcttttcaactcgttttaaatacatgaattttaggattacaagtagtctgtggatacaggaacatctgactgagtgtacaaagagggacctgctcttcctaaaaacatccttcgtatgttttgaaagcaaaaggatgagttctgggcgcacaaaatatggataaaagctatgtattttaacgtatcttacaccggagtaatttgggttgaactcagcagccctaagcactgtgccacaggaacttgtgcagacaaagcgcggggacggaccctgactccggtccgcgtctccgctgctccctccctcccttgccctgaggattagacacaggagatgctgcctcatactctcgcgagacggacggagctcttcgatcggccgattctcccaacctcaccatgggtgctcccacctgcggagaaccggagtctggcgatgccaaggcgcttctgggaattgtagttccgggcggaatgagagcagcacgcctggctccgctccttcttactcatgcgcgactccgagctggccaaagaagttcgtcccctttgtgaggcccgggatgggaggtgagttgcttgtggtgatgtctctcgtctcggctcggcctcggcggtagttccccgggtcgttctgtgccgagtcggggctagagtgcgcgtttgttaaaggggcctcgagggcagaccatgagccctgtcccttctcactctggcctgatcctctcctcgggggacgcggttgtgccacgggcggggtggtcgcggggtcctgggccagtgccccgagcgcggcagaatttgtccaaactcctgatgccccagcgtcacctcttccaggcgcccggttcccccagggacagcttcaagcggtagggacagacatctgaggacccagcctcagggatgctgtccccgggcttccaggctccagcgccgtaggactgaggcagactccacggtgagaaagagacccgatctaacccaggcctttcatcagagcccaggagggaaggcaggaagtgggaccacgaggcccggggggcttctaactcgtctggccagggagatctgaattggggtgaagagcagaatctccagaacaaggaggaggtggtgatcatggagacagatttggctgaaatgcctgagaaaggaggtgagaattgcggacgtgttgaacttgtagcgtggaaggacgaaattcctgctcctgaagggaaaacggttggctcaggggaggtggctcttggctggctgtctccattgtcttggggatggatgggctttttaagtgagactgaagagcttggtatgggagcaccgccctttccatggcagctgggcacacagtggacccttcaaagctacccccaaaatgtgagtgaaatgttaacttctatggcaagaattcacctctttggttgtcaaaaatgttttgttttacataggagaaaacaggcgtagtagttaatgactgacttccattctacctgaccagtttcgtgaaggttgtgctgtgacctcctacaccagaattccccctggggtggttgttagatttctggattgtaccccaggctcaactaatgcttattactttgaggtggggtccagcaatctacattataaataagctttcagagtgagaaccaacgagtatagattaagctgggaaatttactgacatattctaatttctagatcagaggatgccatcttacagaatgtgttatgattatagcaactgaattcgagcccagagtagcaatattcccgcatatcccgggaagagggtcctgggaggaggtcggttgttttgggggtaccttcagtctcagtgtttgtaggcagcacatatagtatgttgaagcggtttttagactttaaatctgagtggcacattaagcctaggtctcatcattactgctttcttgtcgttagttctgtcttcccaggattctccccatttccaagagaagagcacagaagagggagaagtggctgctctgcgcctcacggccagatcccaggtgagtgagtctgctgattattggaattacaccttgtttcttagagtacagatgcactcccttctttgtgatgtggagtttctttatccactaaagcccatctgcagagctgagttctaaatctaagagactagtcaggagactaat

SEQ ID NO: 17470 - DNA, 2300 bp, Homo sapien
ccaaaccccaagttggctgacccaccatgtacacaaatgagcccctgacttgagaaacagccctgtgcaaaagccacatgaccgccatcaccacctcttagcctaggccactgagacattcacaaatgtcactagcatttttttttttttgagaccgagtcttttctctgttacccaggctagagtgcagtggcatgatctcggctcactgcaacctccgtctcctggattctagtgattctcctgcctcagcctcccgagtagctgggattacaggtgcctgccactgctcctggctaatttttgtatttttaatagagatggggtttcaccatcttggccaggctgctctcgaacttctgacctcatgatccacctgcctcagcctcccaaaggattgggattacaggagtgaaccactgcgcccagcccgtcactagcatgtattacagctgaagaaacttacatagggaatacactaccgcatccacctagaacgaaagccaacacactccattgaaacaataccccaagacccatatgaataaatctttccctacagaacctactccatgaaattggaagaggtgattgtttcatcatatgtgtataaatcaatgtagagctgggtgcagtggctcacgcctgtaatcccagcactttgggaggctgagatgggcagatcacttgagttcattcaggagttccagaccagcctggccaaaatggtgaaaccctgtctctactaaagatacaaaagttagcctggcatagcagcacatgcctgtaatctcagctattctggaggctgtgggaggagaatcccttgaacgcaggaggcagaggttgccatgagccaagatctcaccactgcactccagccgacagagcaagactcttgtcaaaaaaaaagaaagaaaagaaagaaaaagaaagacagacataaagaaaaatgtagaaacacatgaaacatgaaaaagcaaggagcacaacacctccagaagaacacaataatttccagtaacagatgccaatcataagaaaaaatacaaagttctggctgggcgcggtggctcacgcctgtaatcccggcactttgggaggctgaggcgagcggatcatgaggtcaggagatcaagaccatcctggctaacacggtgaaatgctgtctctactaaaaatacaaaaaaaaaaaaaaaaaaaaaaattagctgggtgtggtggtgggcgcctgtagtcccagctactcaggaagctgaggcaggagaatggcgtgaacccgggaggcagaacttgcagtgagcctagatgatcgcgccactgcactccagcctgggcgacagaacgagactctgtctcaaaaaaaaagaaaaaaagaaaatatacaaagttccagaaaaagaatttaaaataataatcttaaggaaacagtggaattcaagagcatacagttacacaattcaatgaaatcaagaaaattcataatttgaatgagaaatttaacagagatataaaaaagaaccacacagaaaacttggaactgaagaatccaatgaattacatgaaaaatacaatcaagactctaacaacagactagatcaagcataagaaacaatttttgggccaggcgtggtggctgacgcctgtaatcccagcactttgggaggccaaggtgagtggatcacctgaggtcaggagttcgaggtcagcctatccaatatggtgaaaccctgatctctactaaaattataaaaaaattagttgggcatggtggcgggcgccagtaatcccagctactcgggagtctgaggaggagaatcgcttgaacccgggaggcggaggttgcagtgagccgagatcgcgccactgcactcgtctgacgacagagcgagactgcgtctcaaagaaaaaaaatttctgctctataacttcacttttaacattgtttagtttttttgttttgtttttgtttcgagagagaatctcgctctgtcgcccgggccgctccggactacatttcccaggagcctcggcgcgcacttccgcttctggcccctttctctggaggagctccgcgcgtggcgagtctgtgtcctccctgtcccccagagcagagaaccctctctgtgtctggacgggggaggagcagacgctggacagggtgtgtgtgttcagcagtggattgtcagacttggggtcccggctgctcccttttgggtctctccccgggcccgctgatctgactgtaattccttctgctggagctagggttcggccaccttgacgcgccccctctgccc

SEQ ID NO: 17471 - DNA, 2300 bp, Homo sapien
ccgggaggtggaggttgtagtgagccaagattgcaccattgcactccagcctggacgacagtgtgagactccatctcaaaaaacaaacaaagaagaagaacaacaacaacaacaaaaacttagatttggtctctgcccccatttcctggcacccgacagctcttagaacccccagactctctgaagtggtaagtgtctgaatgccagtgagatgactgggtggctgaggggggtcccgagagcctcaggatgggggctagttgccaaaggagccaaccctatgatgaaagggtttgactttcagccccatctccctgatctcctccagggagggaagtgaggctgaaggttgagaggatcaccaatggccagtgatgtaatcaatcatgcctacatcatgaagcctccacataaacccaaaaggcatcaggcgcggtgattcacacctataatcccagcattttgggaggccgaggtggaggcagatcatttgaggtcaggagttcaagaccagcctgaccaacatggtaaaaccctgtctctactaaaaatacaaaaaaattagccaggtgtggtggcacatacctgtagtcccagctcctcgggaggctgaagcaggagaattgcttgaacccaggagacagaggttgcagtgagtcgagatcgcgccactgcactccagcctgggagacagagcgagactccatctcaaaataaacaaagacacaaacccaaaaggctgggcttccgggagcttctggattgctgaaggggtggaagtccgtggagggtgtgcaccctgcactggagagggaagagaggtgtcacttccctcccacatcccttgccccgtgcatctcttccatctccaagtagggagtgtcagaattgagttacatcttaggacacccagctgttgttggagaatggcttcatgtggaaaaaaacccacacgttttagttatgaaagtgttctgtgttgtgtgactataagacaaagaaagtttgtttttcctattcataagtaaatttggccaaagtctcaactgctaagtaaaaaaaatgtagacttcccacttggccatctggctccaaccctacactccctgtttggctcttgtggggtcagcctaggctcaactccattgatgaacttggaagcatgattttatcacctgtacatttgaaataataatcatgtttacctatgttgacaaaaggagtcaaactctgtaacatatttgaagatattcatcctgagccaaatatgagtgaccaatggtctgtgacacagctctcaggagaccctgagaacatgtgcccaaggtggttggggtacagcctagtatacattttagggagacatgagacatcaatcaaatacatgtaagatgtaatttggtttggtctggaaaggtgggacaactggaaaccagggcttccaggtcataggtagattcaaagattttctgattggcagttggttgaaagagtcaagttattgtctaaagacttaggaatgtctgggttaagataagaggtggtggaaaccaaggttttatcatgtgggtaaagcctccagggaggaggttttggagagaacagattgtaaatgtttctaatcagactgaaagagtctgctgtatcagtaattccaaaagggaggaagttataatgagccatgtctgacctcccttcccatcatggcctgaactggtttttcaggttaactttggaatgccctttgctgagaggagggatccattcagattgttggggggcttaggattttatttctggtttacagctagtatgggtatggcaaggatggtgtggggtaatccacaaaatgcttgaaatggtgagcagcacggcatccgtgctcactgtattttcgctgactcatgctgactgcagccccaggagggcacgggctcaccgccaacccttcgtgcctcccggctggtttctgagatcagccacagaagttaaacttctttccagggaagaagggcggggatgtcagggctggagagtgcccgtgtccttctgtgtgcattgggctccttcctccttaattctctgctttccacttttaggctgaactccagtgcacccagttagacttggagcggaaactcaagttgaatgaaaatgccatctccaggctccaggctaaccaaaagtctgttctggtaagaccagcctgggtcagccaggcctgtgagggtgtgggacgtggtactgcatgcctagcctccattcctgtaggttccttggggtttctccacaaatgagaa

SEQ ID NO: 17472 - DNA, 2300 bp, Homo sapien
aagcaggagaattgcttgaacccaggagacagaggttgcagtgagtcgagatcgcgccactgcactccagcctgggagacagagcgagactccatctcaaaataaacaaagacacaaacccaaaaggctgggcttccgggagcttctggattgctgaaggggtggaagtccgtggagggtgtgcaccctgcactggagagggaagagaggtgtcacttccctcccacatcccttgccccgtgcatctcttccatctccaagtagggagtgtcagaattgagttacatcttaggacacccagctgttgttggagaatggcttcatgtggaaaaaaacccacacgttttagttatgaaagtgttctgtgttgtgtgactataagacaaagaaagtttgtttttcctattcataagtaaatttggccaaagtctcaactgctaagtaaaaaaaatgtagacttcccacttggccatctggctccaaccctacactccctgtttggctcttgtggggtcagcctaggctcaactccattgatgaacttggaagcatgattttatcacctgtacatttgaaataataatcatgtttacctatgttgacaaaaggagtcaaactctgtaacatatttgaagatattcatcctgagccaaatatgagtgaccaatggtctgtgacacagctctcaggagaccctgagaacatgtgcccaaggtggttggggtacagcctagtatacattttagggagacatgagacatcaatcaaatacatgtaagatgtaatttggtttggtctggaaaggtgggacaactggaaaccagggcttccaggtcataggtagattcaaagattttctgattggcagttggttgaaagagtcaagttattgtctaaagacttaggaatgtctgggttaagataagaggtggtggaaaccaaggttttatcatgtgggtaaagcctccagggaggaggttttggagagaacagattgtaaatgtttctaatcagactgaaagagtctgctgtatcagtaattccaaaagggaggaagttataatgagccatgtctgacctcccttcccatcatggcctgaactggtttttcaggttaactttggaatgccctttgctgagaggagggatccattcagattgttggggggcttaggattttatttctggtttacagctagtatgggtatggcaaggatggtgtggggtaatccacaaaatgcttgaaatggtgagcagcacggcatccgtgctcactgtattttcgctgactcatgctgactgcagccccaggagggcacgggctcaccgccaacccttcgtgcctcccggctggtttctgagatcagccacagaagttaaacttctttccagggaagaagggcggggatgtcagggctggagagtgcccgtgtccttctgtgtgcattgggctccttcctccttaattctctgctttccacttttaggctgaactccagtgcacccagttagacttggagcggaaactcaagttgaatgaaaatgccatctccaggctccaggctaaccaaaagtctgttctggtaagaccagcctgggtcagccaggcctgtgagggtgtgggacgtggtactgcatgcctagcctccattcctgtaggttccttggggtttctccacaaatgagaattgtaggtacagttgactacaccgtggggtagcctcaccttgatgtcaggatttgttatgaaattagtttaagttttaaacctggcaagtgatttgctttttaataatataaattagaaccaagactaatcctgtaataacaacattcttatttctacatttgcttatgctgtcttgacagggtgtatgtgtgtggggggctgggagtttagtcagaggtccaaaaactatacgtaatcttggcttcttccattataagagggcgttctgcatgtgagtctcaccagtcctatgacctggcagctggaaaaaaggagttgagaactcaggattagtgatggtatttgagaaggccatggtgtgccaggctaagtaggcagtaaatggtctccaagtggattctgaggagttctacaaatgcctctcgtcagtggcaagccagtaaccaccactcagaagagaatgcaaaacaggccgggcacagtggctcacacctgtaatcccaacactttgagaggctgaagtgggtggatcacttgaggtcaggagtttgagaccagtctggccaacacggtgaaaccccgactctactaaaaaatacaaaaattagcc

SEQ ID NO: 17473 - DNA, 2300 bp, Homo sapien
ggagtgcagtggcacatctccgctcactgcaagctccgcctcctgggttcacgcaattctcctgcctcagcctcccgagtagctggaactacaggcgcctgccaccacacccggctaattttttgtatttttttttttagtagagatggggtttcaccgtgttagccaggatggtctcgatctcctgacctcgtgatccgcctgcctcagcctcccaaagtgctgggattacaggcatgagccactgcgcctggcctaaggccacatttttaactgtaacatcagatcccaaatggcttcaacttccccccaaagtcaggtgtatggcccaacctctgaaaggtgcaggccagcaggaggcagggaggaagggagtgaggcgctgtcctctcgcactcacttgctctagagcaccccttgtccctctattctcaggaggcagcccgttgtcatcttctcaaagaagctgtttagaaaaggaggtgccgaggggcaacaacatactatggtccacaggtgtttgaggagaaccgtgtgtgtgcagtgttgagggagaggggataagactcatgtctgaaatctagtctctctgactcccaagtttgtggccctgaaatgtgaaataaagactgagttgggtgattaaaactgcttccttggcctggggtggtggctcacgctgtaatcccagcactttgggaggctgaggcgggcggatcacttgaggtcaggagtttaagaccagcctggccaacgtggcaaaacctcgtctctactaaaaatataaaactcagctgggcatggtggcccatgcctgtaatcccagctactcgggaggctgaggcaggagaatcactttaacccgggaagcagaggttgcagtgagccgagatgccaccactgccctccagcctgggggatagagcgagactctgcctccaaaaaaaaaaaatgcttccttgaagaatgtcagcctcatagattaaaatcctaatttatttaaatctttaaaaacaagctatttataatctgtcaattataaataaacaagttaattacgaaaaaaaaaaaagagctacttttagcttgcagcacttcttagggtaacgtgctcgccttacagatccaaagagtctgcttcgggcctcccttctctttgccaccctcctttgtctggccttcccgattaattaaatattaatctactcatgccttttctccagattcctcttcagacagaagaggttgagctgtgagaactgatctcattcttaacctgattcttattccccattctgaccctagtatgtgactgccattgccaacaaaaccccagcgatggactccattacctttctctggttgtgcctggtctttcaacatgggcattagaaaggcacacaatattgcaaaccttttgattttatctagggtaataatacttagtaacagtaacaatagcagcaacaactgatctcatatatttaatgcaatcctagaaggtagttatcatttttattacccacctttatcttctccatcctcataactaggatggagacactgaggctcagagaggacaggttgcctgctcgagaccatatagctcctaagtaccagagtcaatgtttgaaccgagtcttacctgcagtaggagaattatctcagcatgactttgaaactctttctgtgagctgcccaatatgttttgcctgggccctttgactacagtgagatttctggttagtattgtgaagcagttaaataacttaaatttacattaaacatttctggttttactttgatgatgacttaagaaaatgaatataaacatatttagcatcattgggatagccagtttgtaactgaacagatataaacataagaagtttgcatcttattttatattcatgaatattcagaagccatatataacaacaataattaaagtgcaataccagtaatagtccacatattacttaaatttgactaacagtattcttgttgttctagaaatgagatgaccagctctttcagaatatacagcaactgcctccacataaagcagtgccaggtttaggagatttacggtaaagccatgtttccaaggaggtctgtacaaaaagccagacttctgctggcagttactgagagagataggctttccatccatggcagccatttacttttgctctgggagacgtttgtaatagaaaaggcacaactggggtatttattcattccccccgttcctctagtgtttggtggcgttgccgttgcaagtgcgcagggctaaaatg

SEQ ID NO: 17474 - DNA, 2300 bp, Homo sapien
ctggcagcttaaagggtggagaccaagtgaccagttcaattgaaagggctgtgtgcagtacgggtcccctgaccagtatgcaggtcattaaaccaaaccgcatgctagctccacaagtgggcacagccaccctgtctcttaagaaagaacggcctcgcatctatacagcccttgatccttttagagtgaacactgagttcgtgctgttgaccgtgaaggaggagaaggagcaccaggaagccaagatgaaggaatatcaggccagggagtccactggagtggttgatccaggaaaagtcagcaaagctgcatggatcaggaagatcaaaggcctgcctattgataatttcacgaagcaagggaaaacagcggcccctgaacttggacaaaatgtatttatctaaaccagccttgggaaattacaatgttttacaataaacagaaagccaagcggatgttgctatttggcctttttttttttttttttgactgtttcttcctggtaattaatgtgggaactcccagttatcttcctctgagccaaatatttgatatcatcaaaataagaaaacagaaggaggttgggcgagattagcatctgtagtcccactgaaaacaatttagtgagcattaggaaagcccagtttcgttgatgggggatggggagatgatcactggaaattagataccattcatcactaccaatttagtgctattagttcttctggcaaatgaagttatgggattatatcagggtcatgcattggtgttttctggtatttttgcacagaagcctgataaaacccattaagaatttaaaaggggaagccctcagtggggtggacctgttgcatttgacaacattgagcttttccttctcagggctaactcctaaggaagagaattagcatatttatcctctgtacaaagagggccagtaacatcaagtgcattgaggtttctgcttaaacctttggactatggtgcagggaccaggtaatttagaagagtgcagcccactacaagagctatggcccattagaaagttcaagccttgaccaggtgcggtggctcacgcctgtagtcccagcactttgggagactgaggcgggtggctcacctgagatcaggagtttgataccagcctgaccatcgtggtgaaacctcgtttctactaaaaatacaaaattagctttaaaaattagctattaaaaattaaaagacgataatgaattcaaacacaatgtcttaaaaaaccaaaaactacgaaaaacaacacaaaactccacagcactgagtggaccactgaaaacctgccatgggcaggctggacgtacaggccccaaatttgttagcttttcatctccaagggcacgaatgcaattgtgctgccgaaatgtcttgcctttagaaacgcgtgtgtgtgttttccccctttcattattagaatatcaggttttaaatggcactggcaatcagccacgtaaaatttgtgattttaatagaatcccttcaattaaggacacgtgcaaataccactatgccaacagcagtctgactcggccagacagataggatattgtcatcatcaccgcttcaaagatgacttaacgccccttaatttcacatcctttgttcaggcaagatcacagcatgagcggctggacttaaaactgtagtaagtataacgtctcccatttactagatacttacactgtaaggaaaccattatcacccccactttacaactgatgaaagaagtacataaaggttggtgatatgattggcaatagagttcccaggcgcctaagctccagggcgcaaggtctcaactcctggcgtctaagtttatacctcccataataataccgtccattagttactctagagtcctcctgccttgtttttcttaacgttttacttctctgcaagaacatattttaaaaagttgcttctacaatttaaagtacaaaagtaatactgtacaggagtaagtctttgtaaaatatttaaagaaaattatattatacaataaaaccccgcccccctgcattcggggcagcgacactgggggaacgactttagaatttgcattgggtggacagcaaatacttccgtaaaacagaccatgaagctttccacttagagcccactgtggccccaatacctttccctttcgctcctgctccaggctccgcctccgccgtgtccgggccgctcgccccgcccccgctcgccccgcccctggatttgctccctcaaagcggaagtgaggccggactgaggctcttacagtggtc

SEQ ID NO: 17475 - DNA, 2300 bp, Homo sapien
gaagatcaaaggcctgcctattgataatttcacgaagcaagggaaaacagcggcccctgaacttggacaaaatgtatttatctaaaccagccttgggaaattacaatgttttacaataaacagaaagccaagcggatgttgctatttggcctttttttttttttttttgactgtttcttcctggtaattaatgtgggaactcccagttatcttcctctgagccaaatatttgatatcatcaaaataagaaaacagaaggaggttgggcgagattagcatctgtagtcccactgaaaacaatttagtgagcattaggaaagcccagtttcgttgatgggggatggggagatgatcactggaaattagataccattcatcactaccaatttagtgctattagttcttctggcaaatgaagttatgggattatatcagggtcatgcattggtgttttctggtatttttgcacagaagcctgataaaacccattaagaatttaaaaggggaagccctcagtggggtggacctgttgcatttgacaacattgagcttttccttctcagggctaactcctaaggaagagaattagcatatttatcctctgtacaaagagggccagtaacatcaagtgcattgaggtttctgcttaaacctttggactatggtgcagggaccaggtaatttagaagagtgcagcccactacaagagctatggcccattagaaagttcaagccttgaccaggtgcggtggctcacgcctgtagtcccagcactttgggagactgaggcgggtggctcacctgagatcaggagtttgataccagcctgaccatcgtggtgaaacctcgtttctactaaaaatacaaaattagctttaaaaattagctattaaaaattaaaagacgataatgaattcaaacacaatgtcttaaaaaaccaaaaactacgaaaaacaacacaaaactccacagcactgagtggaccactgaaaacctgccatgggcaggctggacgtacaggccccaaatttgttagcttttcatctccaagggcacgaatgcaattgtgctgccgaaatgtcttgcctttagaaacgcgtgtgtgtgttttccccctttcattattagaatatcaggttttaaatggcactggcaatcagccacgtaaaatttgtgattttaatagaatcccttcaattaaggacacgtgcaaataccactatgccaacagcagtctgactcggccagacagataggatattgtcatcatcaccgcttcaaagatgacttaacgccccttaatttcacatcctttgttcaggcaagatcacagcatgagcggctggacttaaaactgtagtaagtataacgtctcccatttactagatacttacactgtaaggaaaccattatcacccccactttacaactgatgaaagaagtacataaaggttggtgatatgattggcaatagagttcccaggcgcctaagctccagggcgcaaggtctcaactcctggcgtctaagtttatacctcccataataataccgtccattagttactctagagtcctcctgccttgtttttcttaacgttttacttctctgcaagaacatattttaaaaagttgcttctacaatttaaagtacaaaagtaatactgtacaggagtaagtctttgtaaaatatttaaagaaaattatattatacaataaaaccccgcccccctgcattcggggcagcgacactgggggaacgactttagaatttgcattgggtggacagcaaatacttccgtaaaacagaccatgaagctttccacttagagcccactgtggccccaatacctttccctttcgctcctgctccaggctccgcctccgccgtgtccgggccgctcgccccgcccccgctcgccccgcccctggatttgctccctcaaagcggaagtgaggccggactgaggctcttacagtggtccctgctggcccttggtgacgggtcgcctcagttccgacccggacccgtacgctgctgcgctgacgtggctcccggaagtagggctggcgtagggccgccatgttgcagcaggtgaggggctgagggctcgctgggagggtggcggctcctgggactggctctgcaggttccgtgggactggagcccgcgtcccccgcgcccgctactcgaactcgaggaggagcggggcggccgggagtggagggctgtgggtagttgtctgaggagggctgctgggggttctgaggccgctgggggcggcgtgacccgtgcggcgcag

SEQ ID NO: 17476 - DNA, 2300 bp, Homo sapien
agcaagactccatctcaaaaaaaaaaaaaaaaataatggcaactattagtaaaatttaaaaccagtcgtgtatcttctgcaacattggagaagatggagcaagtaaaacagttcatagagcaaaagaaggaaaacaaagcaactgtcaaggaagcttaaatcagaaagtacatgtataaagtgatgtaagtaatagcaaattcattataataggaaatgtaatttgattaaactacccatttaaagacaagaatactaagattggtcagaaatcaaagtccaaacaaaagatctaacaacattaatgacattagaaaaaataaaagaaggcaaagataacatcagatcaactcaaacaaaaagaaacttggcattgtattattatcagatgagatatggatcagagtaagaaagcactaagaggaacagaaaaaggtgattttatgaatcacagtgaagatcattcacagagtaaaattatatcaaactatgtatagtaaaaaaattggaaatattagaaaatagaaaagcattatgatgagtttaacaaactactatctttaacaaaccaaagtgccaaaaaataaataagttctgaaggatctgaatgaaataattggcaacatcaatttgatagcagtatttgggactttgtatgacagaatactttcttgttaaatgcctgtggggcatttacaaaaattgactaaatatcactgtgaagaaaatcaaaataaaattgcccaaagcacctacattttctactccaatgaaacagaactagaaattaatagaaagtagttgtcgaaattggaattctttttaaaaagcgaactactacatatcttgggtttaaaaggaagcaaaaactgtaaatataggttatttataccttaatggtgatcatttacagttaaactttctgaatatgtcaaaaactgaattcagagggaaaataatagactaaagccttttattttagacaagaaagagggaaaataatggactacttgagtccagaaatttcaaaaacaagcaataagcgtgagaaatcaggaaaataaactaataaagataaaagcaggaaataaagagttagaaaatgggaacacagaagagtttgaaagtattctgagagcattctttgaaaatacctatagaagagacctctggtttaggtctcccttgccagctcttttttttttttttacttagcatctctcccataggaattttggtctcataagactcttccttttcttctcctgtattcccttcctaaggagtgccgtttatgcttctggttttaattgctgatctgtaagctgtgttgcctcccagatctgtatctccattcaggtttgtcctcacaactcaaggcctctccatgtgtcttcttgacgtttttatgtggctgtcttgaaggcatctcaaatctttttttttttttttttttttttttttgagacaaaatcttgctttgtcacccaagctggaatgcagtggtgtgatctcggctcactgcaacctctgcctcctggggttcaagccattctcctgcctcaccctcctagatagctgagactacaggcatgcaccaccatgcctagcgaatttttgtatttttagtagagtcagggtttcactatgttagccaggctggtcttgaacccaagtgagccaccatgcctggccaggcaacttatatcttaacatgtgtaaaatactacttgtcatcttccactccccaaaagctcttcttctttgagtgttccctttcgtggggcctggaatcactatttttttacttgagcaaaccagaaatgtatcagttgcctccttcctactccatatccaattaatgaccaagtcccataaatccatagattgtactttcttcattagggcatcagtgcctgctgctctatctggaatgctcttcttcctcccacatcaccttcatacagggattcctaatctttttatgccatgggtccctttcatagactcatgaataagttttcacatatataaagtacataagatttcaaaggaagtcacttatattgaaatataatttaaaaatattagaaaagtaaatttctgattgagttatatgtgtagtagttcccccattatctgaggtttcactttctgcggtttcagttactgctatacactacactaaacagtaagatactgtgtgaggagagagaactacattcacataacttttattagattatgttgttataattgttctatttttatttcttattaatctcttactgtgcattatt

SEQ ID NO: 17477 - DNA, 2300 bp, Homo sapien
tgatagccagacaggcgagagcagagaggcagctgcaaaagcttcctcggtgcctcatactcatggactccatctaaaagtaactcctcacccccaaccatcatatggctgctaatattagtgctcatttttccactgaggaaacagaaacttagagaggtggatctgtccagggtcatttccacaatgaggacaggaggcaggaagcaggctccatcctagtgatggacacctaagtccctgttttttcatttgcacaaccatttgaaggagaatcctgtgttttttgttacaccatactgctcaaaaatttctatcaaactatagcaaagattcctttccttcctttaaaaaatgttgaagggaaatgtcttagacttgagtatcttgatttatagtcgatatacagcagtttagcccttgaatatggccaatgacgtgttgcagcaagctgagcacttctattacatgcaaagactctgactgcaaacatccaagtgggcaagggattatcaagtttagcaatggactaaccaaaaactgcattcgtgtggaactgaccacaagctttacattatgcttttgctcctttcttgctcattacccattgtataacaaaatatgcccagacttgggctttaataaaaaatttcttagctctcaattttttgtggtttgattggtcttagctaggtggctcttgcttagggtctttcataaagttgcagtcaggtggtggctggggctgcagtcacctggtgggtcagcttggctgaacacctaccatggcacactcctatggcctaaaccccaaggataaagagaatgagagttttgacatcagcctacaagggatttcaatagtccttggagaatggatggcggatggaagagtggtattgctataacagaacaaatgaaactacaaactaagtgcctgcagtgcgggaaactattgaggagcaagccaccccactgcagaaccctggacgcggtgatacactggagctagctcattctggttaatgagagtggattttttaaaaaattcaaggccaggtgtggtggctcatgactgcaatcccagcgttttggaggtcgaggcgggaggatcacttgagcccagttcgaggcggcagtgagctatgattgcaccactgcactccagcctgggcaacagagcaagactctgtctcttagaaaagtttttttttttccagtaatattattcttgtatggtgcaaacactatataatgctgcgctactgcccattttctttccagaaaggataaggcactcaattttccagacatttcttgagtaccatacttgtgccaggccctgggaaacagtgatcagcaggagggacgaagagcccaccctcatggggcttacagtgtacaggggctgaggtggtgatatttgtcaaataaccacccaaacacttaattagaaatcgtgataagcccaatgaaagaaaaatacatgaaacagttttatttgggaagggagtggtttagggaagactcgaaagtgacaatggagctatcaagttcaagaaggagttagtaggggaggaggctgcaggaagaagtgcacgcctggaggcaggaacagcatgtgtcccggtagttcagggtggcgggcccaggcgggtgagaaagggcaatggagaaggaaggagaggagaccgtgcagacactgcaagtgccagaaacccgatccacactggcttcagagggtggaggggaggttcttcttggcttccataatagaaatgtccagggacctaccgacttcagattcagcgcaaactcatctgggcccggtctgtatccctccctctcttttctctcagcactttcctcaggcggttcccctcctggcatcccagcagctgcagcatcagcaggagagagtaagcctctccagtcccggcgcagggatggagacggtgtttcgtgggctccgattggctcagtagcctatctttggagcgaatcagcgagcggagagggatgaacttctctgactggccagatccagtcacatgccaacatgtgacgcgtggaatctacgccagccacagcagagaggtgggggttgtgaccggagttagatgccagcgcagaagggacgtgagcccagccgaggtaccgctgaagaggaatcaattttggtatgcagataatcactgggctcatgggtcttgctctttacaaagaggtatgtccctgtaaagttgtcaggcaaaggaaatgtttcaaacgactccatttcacgaagtctcacctaattt

SEQ ID NO: 17478 - DNA, 2300 bp, Homo sapien
gtctgtatccctccctctcttttctctcagcactttcctcaggcggttcccctcctggcatcccagcagctgcagcatcagcaggagagagtaagcctctccagtcccggcgcagggatggagacggtgtttcgtgggctccgattggctcagtagcctatctttggagcgaatcagcgagcggagagggatgaacttctctgactggccagatccagtcacatgccaacatgtgacgcgtggaatctacgccagccacagcagagaggtgggggttgtgaccggagttagatgccagcgcagaagggacgtgagcccagccgaggtaccgctgaagaggaatcaattttggtatgcagataatcactgggctcatgggtcttgctctttacaaagaggtatgtccctgtaaagttgtcaggcaaaggaaatgtttcaaacgactccatttcacgaagtctcacctaatttacaattcgttagttgagatgcttgtattcttcgtttctaaaataagacgttgaaccataaagactctagctagctctgcaacctctgatgaatatttcatgcctcattattgtgaaaaatccaaagcagaattggagagaagatgtggtatagggattaggtaagtgaagactggtgcaaagcctcctgggtcgaaattctgtccactgctttgtcattggaaaagttatttaacgtcgtcgtctcagttcccacaactattaaaatggagaggataacaacacctaccttatgctcttgtgaggattaaataagttaccgttaatatatgtaaagcacttaaaagaggaccatgtgtttgctattattatgttatacatacaataaagagtaaacattacctaagttataaagaacttaggcaatggataccaaaagtactaattcctttataataaaagaaaaaaaggcgacaaggcaaataacgataataactgataatggctgggcgcgatggctcacgcctgtaaccccaggactttaggaggcggaggcgggcggatcacttgaggtcaggagtttgagaacagcctggccaacatggtgaaaccctgtctctactaaaaatacaaaaaattagtcgggcgtggtggcgcacacctgtaatcccagctactcgggaggctgagacaggagaatcgcttgaacccgggagacgaagtttgcagtgagctgagatcgcgccgatgcactctagcctggacaacagagcgaaactccgtctcaaaacaaaaaactaacaaacgaacaaaaaactgatcatttattatacacccagaactgtgcttttagcacagttttgttttgttttgttttgtttttgagatggactcttgctctgtcacccaggctggagagcagtggcgcgatctcggctcactgcaacctctgcctcccgggttcaagcgattctcctgcctcagcctcctgagtagctgggattacaggcgcgcaccaccacgcctggctaattttttttttttgtatttttagtagagatgggggtttcaccatgttggtcaggctggtctcgaactcctgacctcgtgatccgcccgcctcagcctcgcaaagtgctggaattacaggcgtgaaccaccgcgtctggccgtattgtctcatttaatcctcacaacagtcttatggaatgggtgctgctatctttgtttttcagatgaggaaacaagctcagagggttgaaatgacttgtccaaggttacaggccagtggaggcttgaacccaggtatttgtaattccaaatgtcatactctgtccacattcattccttgtaacctgcctgggctgtcacagttggtgtggggctagcagctccccagggaccaaaacaggcgcatccccgcccaccgccccgcccatcgtgccagcccgactccacccctgtggctacacccactgccccgcgccttacccactggtgggccacgcccacagcccccagctaggtgcctccgctgtccgggctctagtcccgccctcgcccctccccgcccaccggcctcgcagtcaccgcggacgccaatcttgtgcatggagtcgccattttgctcctagagaggccgccaggagacccggcgctttcttccttctgcagctgaggctgcggcggggccggggctggggtcggggccaggtaggcgggcgggagccagtggcgagcggcagcgagggctggctggctccggcattgcggggcgcaggtgcaaggggcggggagcccgcggcgccggcaggcggacgggtcggggtc

SEQ ID NO: 17479 - DNA, 2300 bp, Homo sapien
agtgctgggattacaggtgtgaaccaccgcacttggcctaatttttgtgtttttagtagagatagggtttcaccgtgttggccaggctggtcttgaacttctgaactccagtgatctgcctgcctcagcttcccaaagtcctggtattacaggcatgagctactacacctggcctgtattgcctttttatagtatacgtatcttgtctcttttgttttcgtgtgttagagcctcttaaagcaggggatagatattcatgtttcactgaatctaaggtgctgtcagtccaggcttacattattttacgtcaccaagaaagaagaaaacactgctaattatactgtggcactgtgccttcttgtcacttagtgatcctattctgcaggttttgatgctgacgctttctccatctcttgtgtttgtcactggaatttaagcaccttctgccagagtcagaaggaacattctggtactaggatgctcgttgccttgaaatttttgccatctatacttttttttttttttgagacggagtctcactctgtcgcccaggctggagtgcagtggcgcaatctcagcttactgcaagctccgcctcccgggttcacgccattctcctaggcctcagcctccccagtagctgggactacaggcacctaccaccacgcctggctaatttttttgtagttttagtagagatggggtttcaccgtgttaaccaggatggtctcaatctcctgacctaatgatctgcccgcctcagcctcccaaagtgctgggattacaggtgtgagccaccgcgcccagccaacttttgccatctcttctgagggcgtctgacagtgtctgttgccttccgctgcactgctggggatgtgtcaggcagtccttttcacagtttgacctactggtagggatcttcctttcttaagtttcataaagcatttgattgttgccttgcaagaaaatgtggaattgtatcatttttccagtgatgaatatttgattcatgaatatcaaattatactctgatggtctcttcctgtgtctttctgcatacatgataatttttcttttcttcttttttttttttttttttttttttgagacggagttttgctcttgttgcccaggctggagtgcagtggcgcaatctcagctcatcacaacctccgcctcccaggttcaagcgattctcctgcctcagcctcccgagtagctgggattacaggcatgggcccccatacctggctaattttgtatttttagtagaaagggggttttccatgttggtcaggctggtcttgaactcccaaactcaggttatccacccgcctcaacctcccagagtactgggattacaagcgtgaagccaccgtgcccggcttgataatttttcattttaatgaaaaattttaatgaaaagaatcatagtaattctttctggagacattttaaatgggttcaaacaattctcctgggttcaaacaattctccggcctcaacctcctgagtaactggattacaggtgtgcaccaccacgcctggctaattttgttttgcatttttagcagcgagggggtttcaccatgctggccaggctggtcttggctcagatgttctgcccaccttggcctcccaaagtgctgggattatgggcatgagccaccgtgcctggccatctttgggaattttttttaatctgttaagtatttcatcccttctatttcttttattattttcctttgggaactattaggtcctgaaaattttggatctagtctctataacttttaaaaacttattttactttttgcatacttatatatagcattctggggaaattccttgtcttgatcttccctggtttgttcttaaagttgtgtttattctgctgttaagccagccagctactgggtttctttagaccataataacttcttccccctagatttatttttggttctttttcataataacttgttctttcttttttttttttttaatttatttttttattgataattcttgggtgtttctcacagagggggatttggcagggtcatgggacaatagtggagggaaggtcagcagataaacaagtgaacaaaggtctctggttttcctaggcagaggaccctgcggccttccgcagtgtttgtgtccctgattacttgagattagggattggtgatgactcttaacgagcatgctgccttcaagtatctgtttaacaaagcacatcttgcaccgcccttaatccatttaaccctgagtggacacagcacatgtttcagaga

SEQ ID NO: 17480 - DNA, 2300 bp, Homo sapien
ggcaaagtctatagtaacaaggtgctgtggattcagtagcacctttccccccgttctagtgccactgcattatttatttatttatttatttatttatttatttctatttttttttttgagacaaagtctcgctctgtcacccaggctggagtgcagtggcgtgatctcagctcactgcaacctccacctcctgggttccagcaattctcctgcctcagcctcccaagtagctgggactacaggtgcacgccaccacgtccggctaatttttgtattttttttgtagagacggggtttcaccatattcaccaggctggtttcgaactcctgacctcgtgatctgcccgccttggcctcccaaagtgctgggattacaggcgcaagccactgcacccagccgccagtgcattttttaaaaaaacgtttttattttgaagtaattatagatccacaggaagtagggggcaatacacagggacatcctgtgtattcattacccagcatcctccatcttgcttaactatagtacaataacacagactgaaaattctcggtgccacagccacagaggtccttcagacagcaccagttgtgcatgtagtgagtgtgagtgtgtgtgtgtgtgtgtgtgtgtgtttgtgtttgtgaatgcagtcttaccatgggtagctttgtggaaccaccaccacagtcaggacacagaattgctccttcactgcaaggcaccctcatgcttcctttcatagctacactgacatccttcccacccaatctgcaaccccttgtgtctttgtccactttgtgctgctgtaacacctgagactaggttgtttataaagaatagaagaaatttattctctaacagctctagaggctgtaagtccaaatcatggcaccagcatttggtctggtgagggccttcttgctgtgtcctcacatggcataaggcagaaggacaaaaaggaatgaactttccttcagaaggccaggaaagaggttaacccactcccacaagcctttttatagcgacatgaattcattcctgatggtggatccctcacaacctaaacactttcccaaagaccccaccacccaacactgttgcactggggaataagtttccaacacatgaattttggagggacaaaaacattcaagccacagcactggcaaccactgatctgtcccctgtctttctaattattatttcaagaatgtcatataaatggaatctatggtatataaccttttgagttttgtttaacctaccatgattcccctgagatccatccaggttgttttgtatattaatatgttattcctttttattgctgggcagtatcccatggtatagaggtaccagagtttatttgttgaaggacatttggatgatttccaggttggggctattatacataaaactcgctatgtacattcatgtataggtttttgtgtgaacagagttttaatttctctgggataattgcacttacaaatgcagttgttggtttgcatggtagttgcagatatactcttataagagactgtcaaactgttttccaaagtggctgtaccattttactagtaggacttttaaagtagcgtgtgtgtgtgtgtatgtattttttttgaggtatggtctgggtctgctgcccaggttggagtgcagtggcttgatcacagatcactgcaacttctacctcctggctaaagcaatcctcctgcctcagcctcccaagtagctaggactacaggtgcgtacctccatgcatggctaatttttgcttttctgtttttgtagagactgggtttcgtcatgttgctcaggctggtcttgaacccctgagctcaagcaatcctcccacctcagcctcccaaagtgctgggactacaggcatgagccaccacgcctggcctttatatgtatatttttgatcatagtaacatcagtatgcaattaaagagtaataatatgtatgtaaaataaagacacgaatatttattcaactctagacaacgtttgatgccataatgggtttaaaataactctgggagcctgggaatctagtctctagattggaaaccactgaactgggtattttattattaaaaacaataatcattattattttttccattgtaataacatgtaaaaaaacatatttcccatatgctcagtggagaaaatttggaaataaggaaagtagcaagaagaagtggggggaaagaggcacccataattctattacccagagtcaaaaacatcttttaacactttttctgtgcattaaaaacaaaaa

SEQ ID NO: 17481 - DNA, 2300 bp, Homo sapien
tgatggagggtggactctcaaacctgaagccctcaaggggagtggtcaagagggtacctggatgagagaatgcagcgctcggccagcagagcagcggagtggagggaagtgaaggccgcctggaagggctgcggggaggtgaccaaccaatgcagatgcaggtacccagcacaggtgggcaggtgagcattcaggaaatggttgtctgggacccaccacccttcacaaagcacctggcaacactctccttgagcctctgtatcagtggaaggaaactgcttgacctggctggtgaggggagcccaggcagggtcgggggcacccctaggggccagcttgctggtctaaaccaaggccaaggccagaggtcttacaaaaaagcccagcccacaccaaagcataaaaagtgataacttgggccggacacagtggcttacgcctgtaatcccagcactttggaaggctgcttgagcccaggagtttgacaacagcctgggcaacatggtgagaccctgtcgctataaaaaaatacccacaaaactttgctggctatggtggtgcatgcctgtagtcccagctactcaggaggctgaggtaggaggatcccttgagcccaggaggctgagactgcagtgagctgtgattgtaccactgcactccagcctgggcaatagagccagacattgtctcaaaaaaataaaataaaataaagtgataattctcctttctcctctccttagcagtttggtgtgtgtccttcaaaacactgtggctgttcagccccttacattatatataatgagaggataaacatggatatgggtctatattctctagcttgcttttttcacttacaagtgtatcatccttccatgccattatataaagccacctcatctttttaatggtcatggtgttccatggtttggaggtctcataattcactcaccaccttctctgggtggttatgtaggaaatttctaaactttttggctgccctgagcacgcttgcccttgtagcttaggactcttggggagtttctccatcaggacagacaagcagacaatacttagcaggaataaatgatcagtcttgtgcttattgcaaaagcaggagcaacagataagctggaactagacttggcaggcaggcagagagaggccctggagggattcgctgcaagctgccgcagatgaccgtgggctcccttcatgggctcccttcactcatgtgcagtccgttccagtgctgcccagctcatcacatggttggtcatgccttggtcacaattctgaagcacttaagaaagaaactcataagctcatagatgccccacacacaagatacaaatggctccagtcgtcctgcttaggctctgctgacccctccacatcccgttcctggttctcatgagtctgagggacttcttccggggatggaagaggcttcaaggggtgtggtacggatgacttctcagctaggacggtcttcatgtttcttggggtgagtgaataggtgatcccgttgggtcaggtggggtgggaatgtgggtgtgactgggcttcgggtggcgtttcttctcccgcagacatggctgggcttgtttggtacttctccctccatgtcctccgctgccaccctcctcctgtccccgtccttcaggacagaaccagcaaatcagtctcagccccttaagagcacctttactggtgctttctttccctaggattttttttctcttttttcatttttttccatttaaactcagtggcaaaaatcccaaggacttttgatccaaaggcggcagttatcactaagtggtttatttccttctaagacctagccaacggtctcagagccaatgctgctggtacaactactctattaatgggatagttttggtaagtctggatcctcccagctgggtcctcctgatcagtgcaaagcagccttttgttttaaaacacattgcaagcaatggcttgggaagtaaacaccatctgaggctcgctggccagaggcaaggggagacggcaggcagttgagcctgcctgagggttctctcagcagtgacttcctttttcccttccttcttctgcctagtcctgtatgtgaggactattaattgttttttgttgttgttgttgtttgttttgtgagatggagtctccctctgttgcccaggctggactgcaatggcgcagtcttggctcactgcaatctctacctcctgagttcaagcaattctcctgcctcagcctcccaagtagctgggattacaggtgcgtaccaccatgtc

SEQ ID NO: 17482 - DNA, 2300 bp, Homo sapien
ttcatgtttcttggggtgagtgaataggtgatcccgttgggtcaggtggggtgggaatgtgggtgtgactgggcttcgggtggcgtttcttctcccgcagacatggctgggcttgtttggtacttctccctccatgtcctccgctgccaccctcctcctgtccccgtccttcaggacagaaccagcaaatcagtctcagccccttaagagcacctttactggtgctttctttccctaggattttttttctcttttttcatttttttccatttaaactcagtggcaaaaatcccaaggacttttgatccaaaggcggcagttatcactaagtggtttatttccttctaagacctagccaacggtctcagagccaatgctgctggtacaactactctattaatgggatagttttggtaagtctggatcctcccagctgggtcctcctgatcagtgcaaagcagccttttgttttaaaacacattgcaagcaatggcttgggaagtaaacaccatctgaggctcgctggccagaggcaaggggagacggcaggcagttgagcctgcctgagggttctctcagcagtgacttcctttttcccttccttcttctgcctagtcctgtatgtgaggactattaattgttttttgttgttgttgttgtttgttttgtgagatggagtctccctctgttgcccaggctggactgcaatggcgcagtcttggctcactgcaatctctacctcctgagttcaagcaattctcctgcctcagcctcccaagtagctgggattacaggtgcgtaccaccatgtctggctaatttttgtatttttagtagagacgaggttttgccatgttggccaggctggtctcaaactcctgatctcaggtgatccacccgccttggcctcccaaaggcatgagcctcccaagggcatgagccactgctcctggccgaggggattaatttttacccgcacctcagggttattgagtaacaggctggctgggtttgcaggccagcgtgttcctggtggcagccgctcactcattaacacttctggaagtgctgcatgtctggttaaactgcaaatgctttgcaaagtcacgagtcatgtcactgagcagaggcgtgagactgccggccagccctgctgtgtacactgatagaattagtgagcgagcgtcccactctgatggaatccagatggaactcgtcactgtcactgcggtggagacggtggggccacatctgcactgaatcctactctgcgccttcaatggctgcgtaatggcggatggccatttccttgactaggatgagacattgcctactctgcgtggctgctgtgagcgtgaaatgggatcatgtgcggaacagccacgcatggtccgtgaaatgggatcatgtgcagaacagccacgcatggtccttggtgtgtgacagatattgggtccctctgtggtcccaggcagacattgcccggggtgggggccgaatgcatggtcaagttgaggggcctgggactgtttcacgggtctagaaaaagaaagcagaaacgctggaagcaggactttattgtccgacatggggctgcctctgagcctgggctgtgttggctggacgtgagccataatgcaggtgtccccctcccaagccctgctcagtccactcacagcccgatggccaagggaggacatggctgcccgccacggcagtatcttcagaggtgaggcggttgtccctacgctctatgcttcttatacaaattagatataggtgaagccacccattaagcaacccagcctttctgggactatttgggctgcctccgggtccactaaatgcggttcattttccccaagccccctccgagttcaaggaggctccttcctttcctcctcccacttgcttctcccaggctccctgactcctgcgctctgggatctgcaccccaccatggggtgaggaagctgaactgcatggtgaggcagctgccctgcatgcagccacatcatgggctggagatgccactgtccgcttggtttaatgatcaatgagctccctgccaggaaaccctttctgacctggtttgcccctcagtccctcgggctcatacctagtgcctgcggcaggacagccatggccgccaactccaccagcgacctccacactcccgggacgcagctgagcgtggctgacatcatcgtcatcactgtgtattttgctctgaatgtggccgtgggcatatgggtaaggggacctgtggtggtgttggccaagtgggctctcagggttggt

SEQ ID NO: 17483 - DNA, 2300 bp, Homo sapien
ctatttgttatttatttatttatttatttatttatttatttatttatttatttttgagacagagtttcgctcttgttgcccaggatggagtgcaatggcacgatcttggctcaccgcaacctctgcctcccgggttcaagcgattctcctgcctcagcctccctagtagctgggattacaggcatgtgccaccatgcccggctaattttgtatttttagtagagatggggttcctccatgttggtcaggctggtcttggactcccgacctcaggtgatctgcccacctcggcctcccaaagtgctgggattacaggcatgagccaccgcgcccggcctatttatttttatttttaagacagggtctcattatgttgcccaggcaggtcttgaactcctgggctcacgtgatctccccatctcagcttcctgagtagcaggaaccacgtggacaccaccacacccagttcagaacttttgatgtggctcctgcctctctccagctccaactcccaccactttctctttgtgtgccgtgatcttgctgtactaaaggcagcatagtctgaaggctcacagtcttggccaggatggccatatccagatgtgtacgctgtgcactgcacaactccaaagcatctatgtttacagcccatgctttttcctaacccttctcatctttcaagcctatagtgggcattgccagttgccttcttatatctggggctctgggggctgctggcagttgctgggggccacatgtacccatttaaggttccccgaaggcccccatgccagagttggcttcaacttcttgatctgtgtggagttcttagtcctcgcaacagctctatgaagcaggtgccatgttaccaatgaggaaactgatggtctcagagatgaaaacacacccatctagcaagtggtgcagcctggatttcaactcaggctcaatcgcagggctggtcatttcacatcaggacacgaggggagctgggcttaggacagagctacacatggatggaggctgagagaaccaaagtgaggtgtagctgtatccttaataatgctgtgaatccctggatcatactgcacctgaagccctttctattgctggacacaattacatttcctgaattctttttttttttttttttttttttttgatacagtgtttcactcttttgcccatgctggagtgcagtggcgtgatctcagctcattgcgacctccgccttccggtttcaagcaattctcctgcctcagcctcctgagtagctgggattacaggcgcctggcaccacgcctggctaatttttgtattatcacaaaataatacaaaagtagagacgggctttcaccatgctggccaggctggtctcaaactcctgacctcgtgatccacccgcctaggcctcccaaagtgctgggattacaggcatgagccactgcgcccggcctacatttcctatattcttagagctcatttgaaagcagttttcagtcacttgttaacagatactttaatgaatgcaaaggctcagctcaaagtcccctcctccaggaacatctcttccttaaaggcctccccccggcccccgccagactctcccaggcccaccatctaaacatctttgcagggctgcacctgcctggcttgctctgtctgcttctccctgtgggatgcatctccagcatcctccctgtctggttctgatcttttctggatgtgctcactgctctcttgccagccgctcccagctgggccagcctagcctgctaggagggacagggcagaactcctacagccctacttccaggggcaccagcctgcaaacagcaagctgactcactaggagaggtgggtcatgggcaacaagggctggtggcccaagtcactgggctacaaagggtctggcctcaggtgcccagaacatctttcttagacgtgctagccaggacagccttgtctcccctcctctttccctcttcagatcttgcctggcccttacctcccctcatccagaaaccctccactgtctgttctgccccacgtgggcacctcctcctctgaattctagccaccaactgtcacaggaatatagcacgttacagtttgcaacagattttcacttccattggacccttgctccttggaacagccctgagatgtgggctgcacagaaacccgcattgcgtgtttgaggaaactgaagcccacagagattaagtgacttaagtacacagagcagagccgagacttgaactcggctttgccgatggccagcactgggctacttg

SEQ ID NO: 17484 - DNA, 2300 bp, Homo sapien
gcaggaggaggatgcaaatatgtgtgcctgttccccaggggccactatgttcagtagcataaagcccttggggggctatatggcagagtgtaggacttcatgcttgaggggtcagtgatggggaccacaaggatgctgggcctaggaggctagtcattgcccagggcagtggactcagaggcaaggagtcctgatgggccatgaatggtggagaaggccttggagggggggggtttgagggcacaaggcctagagatgtcaccagcctacggaagcagcatccttacgggacccaaaccagccccatccagatccagagcaagtatgggggatgggaggaagggctgggcctggtgccgggcagactggctgcggcacgcgatggggtgggggctgtttgttgggccagatttaatgggctttgctgtcccaccctcaaagcctgccttcagatgtggtctccacgctccccataaccagggtcccaaccccaggggacgctcagcagagagctgggcctgaccccagcccacagcggccctcttggcccctccctgccctagggttcaggtcgggtgctgcccgccacgcagaagcagtccggggacccctcccagaggggatcagggcttaggactgagaactgggtatctgctcaggaaagccctgagtttgggtcagtcagtgccctatccctgcctgggggctcccagcccagtaccctagacctgtttccacaactggacagctgggtatctatacagccgcacggacttcccgccacgccggcgaaactgggcacagccagggttgatccaggatcaccaacagaccctgggggcacaggggggtgccaaggctgttgacccgctgtgtgacctcagggagaacactgtccctctctgggatgggtgttccaggagctcttgggcttaggcctctgatattttcggaattcgggcaccaggggaccgtgggcagtgcgtccgccccaggtctgtctgtctgtcgaggggtgaatcagcttccggccccgccccgggcggcacgtgaccgcaggtggcggcggcggggtaagcggggcggccctgagtcaccggcgcgcccccgcccagcctcgcgccgccgccgcagccgccgcgtgtgcgccccgctccgccagcgcccgctcggtaagcaagtcccggccgcgccccccggatcccgggtctcgcggggcgtcgccgccccgcaaccgcgtttctgggtctcctggacccctcccagagccccagcctcctccgggcaggcctcctgggttgccggcacccggaaattttaagacccctcccttacccggaagccctcggtttgcggggcgcctctgtgccggggccgcctcccactctaagaagctactgggaagttccccggctgccctagtttccctcagaagttgcgaggacttcaggcagctccggaaatctgggatatgggttccctgcacgtagaggcacgctgagccctgggacgtggcccaccgctccctcaccgctgttccgatcccttactttcttcccatcccagtccagtgcccccacctcatcttcccagccccagccccagccccgtccttcccacgcccacctgagttcccggccccgcccccgccgcccctccccgcgcggcccgccctccccgccgagccgggctcatcaggtctttcccgcagattgctcatgggcagagaagcagaggccgcggagaggcccccgagcgcgcggtgccccagctgggccggagctaggagctggaccttgcccacccacccccggcagcagtgcccgggcaggcggcgccatggccttctctcaggtgcagtgtctggacgacaaccatgtgaactggcgctccagcgagtccaagcctgagttcttctacagcgaggagcagcggctggcgctggaggccctggtggcccgcggccgggacgccttctacgaggtgctcaagcgggagaacatccgagacttcctctcggagctggagctcaagcgcatcctggagaccatcgaggtgtacgacccgggctctgaggaccctcggggcacgggcccctctcaggggcccgaggacaatggggtcggcgacggcgaggaagccagcggggcggatggggtccccatcgaggccgagccgctgccctccctggagtactggccccagaagtcggaccgctccatcccgcagctggacctgggctggcccgacaccatcgcctaccgcggcgtgacccgggctagcgtctacatgcagccccc

SEQ ID NO: 17485 - DNA, 2300 bp, Homo sapien
cacataaaaataaacccggcatctgtcccaccgccccaggggacacccattcagcttcataaggggaagtcctcctcccctcatatggctagaagcacctcagaactgaggcgggggccgatcccaacccctccattgcatcattctgaggctttgaaacctcagctgcaacagagccggaaagaggggccttataacatcctgtcacccttggggtcgggggcagccagaaggcaggggtctttgagtagagggcagcgtggagaagccctggaatggagctgggtgaggccagggccagctccatcctgcctggttggctcagggactccagagtgggcggcgggcagctgtcatcttctcttcttccctctcaactatttttttttttttttttgagatggagtcttgatgtgtcacccaggctagagtgcaatggtgcgatctcggctcactgcaacttccatctcccaggttcaagcgattcttctattattggccagaaggtcagggtgtgttcatagaatgatgggtccatgtcaaaaggataaggagacagcttgaaggagaccccactggcctaatcaggggcattttaagcatcaaaataaatgtaatagtaatggattataatccactggctaaaatatgaaaccatgagcctatattaatataaatgaaggaagaaaaacttctttacagaaaaaaaacaatgtgacttcacactgattcatccagtgtccatgcaacaccacagggctctgcctggttttccttccacgtctgtgtctcccttctttcccagggagaaccctggttccaaacaatacagctgtgcttgtccatttgtgcgctatcctgcaacacttgcaaaacagtttcagaattgctacaccgataacactgctcataacaaacccactaaggaaaggtagagatttatttacaattctcttttttttttttttttttttgagaaggagactcgctctgtcacccaggctggagtgcaatggcgcaatctcaggcaggaggatcgcttgagtccaggaattcaagaccagccttggtaacatggtgaaaacccatctctactaaaaatacaaataattagccagacatggtggtgggcacctgtagtccgagctactctggaggctgaggtgggaggattgcttggagcctggatggatccttggctcactgcagcctctgcctcccgggttcaagcgattcttgtgcctcagccttcccagtagctgggattacaggcacatgccaccatgccaggctaattttttgtatttttattagagatgaggcttcaccatgttggccaggctgatctcgaactcctgacctccagtgatccgcccatcttggcctctcaaagtgctgggattataggcatgagccatcgcgcccgacctacaagtcttgttgaccttaggatttaagtcccacctaaggtgcccagtgtctaaaccagaagaggtaccttctgagctggtctttgatggatgaataggagtctcctgggagcagaaagaggagaacaccaggcagaggaaccacgtgtgcaaaagtctggggttgaaatgagagtttggtgtggccccttgctgtggctgaagccctgggtttgtttagagtgaaggggatgacaaaggatgagaatgggggctgtttgtaggggcaggtggaggtggtggattgcaagggccttgaatgccaggtgaggagcttgggattgaaggagcaggaggcagggcatcacaagaggcatcagggtttaggaaaagatggagagtcattggcagattggtgaagggaggccagcatctggtgccatgagactcagtgcctgagccagcaggacagctttggcacttctcctccaggcacctcacttttacggatgataaaacatgggcacaagggggccccactcccagagcttcagggagactccccaagggccattcctggcacctggggtctgaggtagggacagagctggctcacaagccctccctgctctgtgacatgtctgtttcctgtttctcccccatcaggagcagtttcagtctcaacttcaaaagaacaaacgcgcactcaaaacaaaggaagaccgtcctcgactgcagaggaagcaggaagctgtcggcccagctctgagcccagctgctggagccccgagcagcggcatggagtccgtggccctgtacagctttcaggctacagagagcgacgagctggccttcaacaagggagacacactcaaggtaggggggctggag

SEQ ID NO: 17486 - DNA, 2300 bp, Homo sapien
tggtgagagttagtgataaacagttctgcatcatcgcccaaggttccccagctgtccatagtgttatgtgctcattcccataccctttgttggctccttcccttccctgtatcattttcctgacaacctgaaggtgattcttgggatctcattcaagccaaaaaccttgcactggaatatttttccggactgggcttctgagggtagcaaatgaagacattcatttattcagtcttcaaacacgattgacctaacctgagcccgccccatgctgggctctgggggtgtgggcatgattcataggcattttctggcctccagagccccttgcttgacggaagaggcaggaacagcttctgatgattctaacccagtgtggttaatgacgtgaccacatctccagggagaatgaccccttctgcctgggaggtcaagcggcatctccaaagatgttcccttccagcttggctttgaaggatgaggaggtgttccccatcgggaccagggggctggggaaatggcattcttggcaaagagaacagcatgtgcagaccaggagcaggagcaaggaggggctgacagatggtggcactagggacgttggcagggtcagactgtgccagccttgaaggccaggggagaccctgggactgtggcgtggtcatgggaaaccaccactgacagttttggagcaagggcaggatttggttttaggaaacgcactttctctggaaagacctacaggtttaacggtccttccttcctcattgtaactcccagcaagtcaagggagtccaccctggtgcagctgaacagcagcatcgctatacgtggagctcttattaacacttcattcactgggtcttcacacccttgagtgaagcatcctttttagtaacctctttttataagtggggaaactgaggcacggtacaggactcaatcaaggtcccatagctaggaagcgggggcattgggattagaacccatgtttcttggccaggcatggtggctcacgcctgtaatctcagcactttgggaggccgaggtgagcggatcacctgaagtcaggagttcgagactggcctggccaagatggcaaaaccctaaacatacaaaaattagccaggcgtggtggcacacgcctgtaatccaagctactcgggaggctgaggcaggagaattgcttgaacccaggaggtggaggttgcagtgagccgagatcgtgccactgcatccagcctgggcaacggagcaagactccgtcttaaaaaaaaaaaaaaaaaaaaaagactgggcacggtggctcatgcctgtaatcccagcactttgggaggccgaggtgggtggatcatgaggtcaggagatcgagaccatcctggctaacatggtgaaaccctgtctctactaaaaatacaaaaaattagctgagcttggtggcaggtgcctgtagtctcagctactcgggaggctgaggcaggagaatggcgtgaacccaggaggcagagcttgcagagagccaggatcacaccactgcactctcgggacagagtgagactctgtctcaaaacaaaacaaaaacaaaaacccaaacaacaacaacaacaacaaaagaagctgtgtttctttggctttaagcccatcctctacgttgcgccactgccatgcttttcagaggctagagggctccaggaaccaccttctttccccggcacagccctgggggtgggtgggtgggcagagaagggacaagcagcccaagtcacagccagggatggagacagcatggcttctttcggagaaatgaagaagcaggagtgttattcttggccaggatgggaaacgggttggaatcttggctcctatgctcaccagccatgtggtctgtggcaagccacatcctctctctgtgtcttgacttacccatctgtaaaatggtggctcctcataacccccacctcatagggctgttgtgaagattgaacgtactgaagactcaaattcttagtacactgccaggcacgtaggaagagctcttagagtgttattttatagccctcatttgagagggtgtgggcaggagcacagcctctgggctccaatccacaaactgccatctactagtccatttgtgagctggctggtaaattcaccttcctgggcctcagtttcttcatcagtaaaatgggataatgatggtgccttcctagttgggttgtggtgaaggttaaatgagatgccatgtagaagtgcagaggagaagggctgctataaggggctccaggtgggtgctgctgtta

SEQ ID NO: 17487 - DNA, 2300 bp, Homo sapien
ggctgaggcaggagaatcccttgaacgtgggaggcagaggttgcagtgcaccgagatgacgccactgtactccagcctgggtgacagagcgagaatccacctcaaaaaacaaacaggccgggcgcggtggctcacgcctgtaatcccagaactttgggaggccgaggcaggtggatcacgaggtcagatcgagaccatcctggctaacacagtgaaaccccgtctctataaaaatacaaaaaatcagccgggtgtggtggcgggcgcctgtagtcccagctactcgggaggctaaggcaggagaatggcatgaacccgggaggcggagtttgcagtgagccaagatcgcgccactgcactccagcctgggcgatagagcgagactccgtctcaaaaacaaacaaacaaacaaacaaacaaaaaacttgcctgttaattctcatttctgagatcctgcagctaccttgggtggtggcctgtccaagcctggcctttgttttgttttgtttatttgttttgagacagtcttgttctgttacccaggctggagtgcagcggcgtgatcatggctcactgcagcctcaaactcctgggctcaagcgatcctcccacctcagcctcccaagtctttgggattataggcgtgagccaccgtgctggcttgcctttggttctctgaactactccagttctttccactaaatccacccccctcttttttcccctttggttaatcagaatccatatcttttgctccagatcaaagaaccctacccgatgatcccttctccattcacaaaatcaataacatactcaaaatcaataaacagctgaccgagcacagtggctcacgcctgtaatcccagcactttcggaggcagaggtgggcggatcacaaggtcaggagttcgagtccagactgaccaacatggtgaaaccccgtctctacttaaaaaatacaaaaattagctgggcgtggtggtgtgcacctgtaatcccagctacttgggaggctgaggcaggagaatggcttgaacccgggagcccgagattgcagtgagctgatatcatgccactgtactccagcctgggtgacagaacgagactccatctcaaaaaaaaaaaaaaaaaaaaaaaaaagaatgtggccgggcgcggtggctcacgcctgtaatcccagcactttgggaggccgaggcaggtggatcaccaggtcaggagttcgagaccagcctggccaatttggtgaaaccccgtctctactaaaaaatacaaaaattagccaggcatggtgatgggcgcctgtcccaggctgtttttatgttatgtggggatgaggcactgaccctgtgggccgggatctctctggggacgcttcccttgctttttgtctacactccttaaggcaaactacttgggaggctgaggcaggagaatcacttaaacccgggaggcggaggttgcagtgagctgagatcgcgccactgcactccagcctgggcgacagagcaagaatccatctcaaaaaaaaaaaaaaaaagtaacaagactcttaacagctgtggagatctgtgcctattctgagtgcttctccactacttcctgatactgatttagctctgtgtatatatttgttgaagtaatgcttagatcttagttgtattcatccagtgccctcccaatcatgttttgtgtggaatagcaaatcactttctgcttgtattccaaaaatgttgcagaaagacttgccaccctgctggggactgtccctgccccctgaccacttctggcctgccttacactcgattattttgggcaaaaagtgcaaatcaagactgagatgtcaggccaggtgcagtggctcatgcctgtaatcccaacactttgggagccgatggatcactcaagcccaggagttcaagaccagtctgagtaacatggcgaaaaaaacctgtctttacaaaaagtaaaataattagtgaggcgtgatggcatgcgcacacctgtagtctcagcttctcgggatagtcacagctacttgggaggctgaggtgggaggatcacctgaggccagggacacaggtacatcaaggctgcagtgggctgtgatcacaccactgcactccagcctgagtaacagagtaataccctgtttcaaaaaaaaaaaaaagaaagaaagaaagaacaaacaaagaaaaaaaacaaaaaggaaaaggaaaaagaaagagagagagagagagagagataatccaggactttttttgaagggagagggaaacaggactgtctgacacgcggga

SEQ ID NO: 17488 - DNA, 2300 bp, Homo sapien
aaccaatgggacattcctgagtcctctgagtgcagatgacaaagagacaaaacgaagcagggactgcatgagacgtattccacccagtgtccgcactgctgcatgcagggcaggccataaatgcacccattggacagacgagggaggacactgaggccaaggccacagagagagtcagaagcagacagaatgttctggagccccaggcttcagggcatcctcctggaatccatggctgtggtatgtggcctacaggccctcattttctccttaggttgggggagttgttttgtttttttgagacggagtctcactctgttgcccaggctggagtgcaatggcgcgatctcggctcactgcagcctccagctcccgggttcaagtgattctcctgcctcagcctcctgagaaagttggggattatgagagtatgccaccatacttggctaatttttttgtatttttagtagagacggggtttcgccatgttggccaggctagtcttgaactcctgacctcaggtggtccaccctcttcagcctcccaaagtgctgggattacaggcgtgaaccactgcgcccggcctgttttgttttgtgttgagcgaaagttttcctgagtcagccacctgcttccgttcacccctgggtctgctgacctggcccaggctgcaggggcaggaaggaagaggctcagccagcctggcctggtggacaaagcgggggtggagatgggggtgcagaggccacctgtgagggtggggcctcaggcctgggccctaggaggccaatcccagctactcttggcaaaatatcactgctggagttgatgcccctgtattggcccgccctgggcctttggtaccccgtgcccaattttttctctcaagtacccctgaaggattgagctgacattggaacctgctccaggactgacaggagagatgtcccctcacaggagagatgtcccctcaagctggagtccagtgacaaagaggactggaggcaaaaattggtgggccaggacccccttgaccagtgagccaaaaactccaggcctcagagtcctgactgaccaaacaggctctgcctctcccctgctgcgtggccttggccaagtcacttcccctgtgggcctcagttttgttatttgtaaaatagcatttggtgatgttgaccttgggggctatatgagaatcagggggacagacggaaggcgtgcccagggaatggaggcaggacccccggcctcatgctgtgcccctcccaggcccggccccgccccccgccttggtcgcttggttgctccccctcagggactcccaccccggctctggctatttcagttcctccgggcccacctgtggtgtgatgggggcctcacaggctcggaagaggagcccgtgtgaccgagcaggccatgccagggctgagaaccagtctgtctcagaccaaaggcccccttatctgctccccagagcctgacgtccccccactgaattgtcacccctgagctgtctaaatgcgagggaccctaggtgaccactggtggctgtgctcaggccgggtcccccgaccttcaccccaaggctcagtgcgtggcatgtaagtgctgtgggccccccaaactcgggggcacaacccaggaaggaactcaggtccccagttctgctcctgcaaaccccatggtccgcagggctcctggtgtcggagcctgagaatccagctccagccaccccaagcctcctacgagtccccgactgtgcctcccttggagtctgtgaatcacctgaggatgggctgtcctggggccaggggatgggcagcactgaggaacgagggcttctaattcagcccttgggaccatgggcaagtcctgtcccaggcccccagccctgctctgtgagtaggcacagaagctggtgcaggcgaggcccacctggggcctggcgtgcagtggggcctccgggggtgacagttgttccttctcggtgactgagtggctttgtgtctcctgcccacagatcctgaacatggaggatgaccagaactggtacaaggccgagctccggggtgtcgagggatttattcccaagaactacatccgcgtcaagccccatccgtgagtggacagccccatcccatccccgtggctctatctctcctggccatgggaccccctcactcctgggcctctgtccatctgtctggggcccccaggctccacagaggccaccagcctgggcaggcataggagactgagttctgaggacttccccagagtggggacagagtcagggc

SEQ ID NO: 17489 - DNA, 2300 bp, Homo sapien
actcagccccgagggctcatcaacatccgaaacaacaggaaaagccccgcctggcttccaccacctgtgccgagctcagtctgactcagggagaggagcatttatggaaggagtgaaggggaacattctgtcatggtgccaccacgagacctgtggctgctctgggcctcagtttccccatccgaacaataaaggggtcagagccaaagctgggctaaaacactggagttaggaaagccagtcagagaccacacagcccctccgatggtgggtgttctagtcctgcaggctgctgtcacggaatgccatccactgggtagcttatgaacaacagacatttgttgctcactgttctggagtctgaagttcaagatcaaggtgccggcaaattcacgtctgatgaggctacttcctggttcacagacggctgtgtcttttagctgtgtcctcacatggcagagagacaagtgagctctctggggtctctttcataagggcaccaatcccattcatggggactgctaatcacctcccaatgaccccaccttttactgctgtcacatgggggattaggtttcaatatttgaattttgggggacagaaagtcagcctatagcagtggcaaattcctgaagaggccgggggctaccaggagctaccaggagccacacagcaagataagcaggactggaaaaggagtttcactcccagaccctggggatcttgcaagagtctaagcatttaccaggcaacttctgcatacccagttctgtttggtcagcagcaaaaggaacttgtgcctgtgaaaaaaattcaggtggcctgagactgtggaatggatatttcctcaccatatcaaagctactattatttttgtcatgtttttatattttcgacttaagaagtttttttttttttgccgggtgcggtggctcacgcctgtaatcccagtactttgggaggctgcggtgggcggatcacgaggtcaggagatcaaaaccatcctggctaacatggtgaaaccctgtctctactaaaaatacaaaaaaatatgtatatatgtatattagccggggcggtggcacacacctgtagtcccagctactcgggaggctgagacaggagaatcacttgaacccaggaggcggaggttgcagtgagctgagatcatgccaccgcactccaacctggacggcagaacaagactctattttttaaaaaaagtgtttgtttgtttgtttttgagacggagtcttgctctgtcacccaggctggaggacagtggtgcgatctcggctcactgcaagcaccgcctcctgggttcatgccattctcctgcctcagcctccccagcagctgggactacaggtgcatgccgccacgctcggctaatttttttgtatttttagtagagatggggtttcaccgtgttagccaggatggtcttgatcttctgacctcgtgatcctcccgcctcggcctcctaaagtgctgggattacaggcgggagccaccgcacccggccagaagtatttttttaaggaatgggggtgggaggttctctattccccaggctggtctcaaagtcttggcctcaagtgatcctcccatctcagcctcccgagtagctgaactacggtcacgcaccaccgagcctgatttattttttgactttaaagaatctaccatctcaaagggaaagttagactgaggttggctggggtgtggctcactggagtgtgacttttctgtttccataagggtatgtgtttgctggcatggtaggagaggctggcctcaggagctaaaatgctgggattgtgttccagctcctgcctgcctctgctgtgtgattgtgggtgtattgcttcacctctctgtgcctcagttttcccatctgtaaaatgggtgcaatcacatctcccttgtctcagaccttgaacacctggcacggggtgggaggctggctgagagcctggtctcacactgccttcaccggctccctctctccgcaggtggtactcgggcaggatttcccggcagctggccgaagagattctgatgaagcggaaccatctgggagccttcctgatccgggagagtgagagctccccaggggagttctctgtgtctgtgaagtgagctctggcccttgggggtgtgtgcagaggagggtgggcggggttgggcagcatttgagctgagccttggggcccgggacgggctcacggagtgagggtggaggaatggcatccctgcagagggagcagtccgggcagaggccttccggacacaggcgg

SEQ ID NO: 17490 - DNA, 2300 bp, Homo sapien
gctgaggcaggagaatcccttgaacgtgggaggcagaggttgcagtgcaccgagatgacgccactgtactccagcctgggtgacagagcgagaatccacctcaaaaaacaaacaggccgggcgcggtggctcacgcctgtaatcccagaactttgggaggccgaggcaggtggatcacgaggtcagatcgagaccatcctggctaacacagtgaaaccccgtctctataaaaatacaaaaaatcagccgggtgtggtggcgggcgcctgtagtcccagctactcgggaggctaaggcaggagaatggcatgaacccgggaggcggagtttgcagtgagccaagatcgcgccactgcactccagcctgggcgatagagcgagactccgtctcaaaaacaaacaaacaaacaaacaaacaaaaaacttgcctgttaattctcatttctgagatcctgcagctaccttgggtggtggcctgtccaagcctggcctttgttttgttttgtttatttgttttgagacagtcttgttctgttacccaggctggagtgcagcggcgtgatcatggctcactgcagcctcaaactcctgggctcaagcgatcctcccacctcagcctcccaagtctttgggattataggcgtgagccaccgtgctggcttgcctttggttctctgaactactccagttctttccactaaatccacccccctcttttttcccctttggttaatcagaatccatatcttttgctccagatcaaagaaccctacccgatgatcccttctccattcacaaaatcaataacatactcaaaatcaataaacagctgaccgagcacagtggctcacgcctgtaatcccagcactttcggaggcagaggtgggcggatcacaaggtcaggagttcgagtccagactgaccaacatggtgaaaccccgtctctacttaaaaaatacaaaaattagctgggcgtggtggtgtgcacctgtaatcccagctacttgggaggctgaggcaggagaatggcttgaacccgggagcccgagattgcagtgagctgatatcatgccactgtactccagcctgggtgacagaacgagactccatctcaaaaaaaaaaaaaaaaaaaaaaaaaaagaatgtggccgggcgcggtggctcacgcctgtaatcccagcactttgggaggccgaggcaggtggatcaccaggtcaggagttcgagaccagcctggccaatttggtgaaaccccgtctctactaaaaaatacaaaaattagccaggcatggtgatgggcgcctgtcccaggctgtttttatgttatgtggggatgaggcactgaccctgtgggccgggatctctctggggacgcttcccttgctttttgtctacactccttaaggcaaactacttgggaggctgaggcaggagaatcacttaaacccgggaggcggaggttgcagtgagctgagatcgcgccactgcactccagcctgggcgacagagcaagaatccatctcaaaaaaaaaaaaaaaaagtaacaagactcttaacagctgtggagatctgtgcctattctgagtgcttctccactacttcctgatactgatttagctctgtgtatatatttgttgaagtaatgcttagatcttagttgtattcatccagtgccctcccaatcatgttttgtgtggaatagcaaatcactttctgcttgtattccaaaaatgttgcagaaagacttgccaccctgctggggactgtccctgccccctgaccacttctggcctgccttacactcgattattttgggcaaaaagtgcaaatcaagactgagatgtcaggccaggtgcagtggctcatgcctgtaatcccaacactttgggagccgatggatcactcaagcccaggagttcaagaccagtctgagtaacatggcgaaaaaaacctgtctttacaaaaagtaaaataattagtgaggcgtgatggcatgcgcacacctgtagtctcagcttctcgggatagtcacagctacttgggaggctgaggtgggaggatcacctgaggccagggacacaggtacatcaaggctgcagtgggctgtgatcacaccactgcactccagcctgagtaacagagtaataccctgtttcaaaaaaaaaaaaaaagaaagaaagaaagaacaaacaaagaaaaaaaacaaaaaggaaaaggaaaaagaaagagagagagagagagagagataatccaggactttttttgaagggagagggaaacaggactgtctgacacgcggg

SEQ ID NO: 17491 - DNA, 2300 bp, Homo sapien
tggtgagagttagtgataaacagttctgcatcatcgcccaaggttccccagctgtccatagtgttatgtgctcattcccataccctttgttggctccttcccttccctgtatcattttcctgacaacctgaaggtgattcttgggatctcattcaagccaaaaaccttgcactggaatatttttccggactgggcttctgagggtagcaaatgaagacattcatttattcagtcttcaaacacgattgacctaacctgagcccgccccatgctgggctctgggggtgtgggcatgattcataggcattttctggcctccagagccccttgcttgacggaagaggcaggaacagcttctgatgattctaacccagtgtggttaatgacgtgaccacatctccagggagaatgaccccttctgcctgggaggtcaagcggcatctccaaagatgttcccttccagcttggctttgaaggatgaggaggtgttccccatcgggaccagggggctggggaaatggcattcttggcaaagagaacagcatgtgcagaccaggagcaggagcaaggaggggctgacagatggtggcactagggacgttggcagggtcagactgtgccagccttgaaggccaggggagaccctgggactgtggcgtggtcatgggaaaccaccactgacagttttggagcaagggcaggatttggttttaggaaacgcactttctctggaaagacctacaggtttaacggtccttccttcctcattgtaactcccagcaagtcaagggagtccaccctggtgcagctgaacagcagcatcgctatacgtggagctcttattaacacttcattcactgggtcttcacacccttgagtgaagcatcctttttagtaacctctttttataagtggggaaactgaggcacggtacaggactcaatcaaggtcccatagctaggaagcgggggcattgggattagaacccatgtttcttggccaggcatggtggctcacgcctgtaatctcagcactttgggaggccgaggtgagcggatcacctgaagtcaggagttcgagactggcctggccaagatggcaaaaccctaaacatacaaaaattagccaggcgtggtggcacacgcctgtaatccaagctactcgggaggctgaggcaggagaattgcttgaacccaggaggtggaggttgcagtgagccgagatcgtgccactgcatccagcctgggcaacggagcaagactccgtcttaaaaaaaaaaaaaaaaaaaaaagactgggcacggtggctcatgcctgtaatcccagcactttgggaggccgaggtgggtggatcatgaggtcaggagatcgagaccatcctggctaacatggtgaaaccctgtctctactaaaaatacaaaaaattagctgagcttggtggcaggtgcctgtagtctcagctactcgggaggctgaggcaggagaatggcgtgaacccaggaggcagagcttgcagagagccaggatcacaccactgcactctcgggacagagtgagactctgtctcaaaacaaaacaaaaacaaaaacccaaacaacaacaacaacaacaaaagaagctgtgtttctttggctttaagcccatcctctacgttgcgccactgccatgcttttcagaggctagagggctccaggaaccaccttctttccccggcacagccctgggggtgggtgggtgggcagagaagggacaagcagcccaagtcacagccagggatggagacagcatggcttctttcggagaaatgaagaagcaggagtgttattcttggccaggatgggaaacgggttggaatcttggctcctatgctcaccagccatgtggtctgtggcaagccacatcctctctctgtgtcttgacttacccatctgtaaaatggtggctcctcataacccccacctcatagggctgttgtgaagattgaacgtactgaagactcaaattcttagtacactgccaggcacgtaggaagagctcttagagtgttattttatagccctcatttgagagggtgtgggcaggagcacagcctctgggctccaatccacaaactgccatctactagtccatttgtgagctggctggtaaattcaccttcctgggcctcagtttcttcatcagtaaaatgggataatgatggtgccttcctagttgggttgtggtgaaggttaaatgagatgccatgtggaagtgcagaggagaagggctgctataaggggctccaggtgggtgctgctgtta

SEQ ID NO: 17492 - DNA, 2300 bp, Homo sapien; identical to SEQ ID NO: 17491

SEQ ID NO: 17493 - DNA, 2300 bp, Homo sapien
ctgaggcaggagaatcccttgaacgtgggaggcagaggttgcagtgcaccgagatgacgccactgtactccagcctgggtgacagagcgagaatccacctcaaaaaacaaacaggccgggcgcggtggctcacgcctgtaatcccagaactttgggaggccgaggcaggtggatcacgaggtcagatcgagaccatcctggctaacacagtgaaaccccgtctctataaaaatacaaaaaatcagccgggtgtggtggcgggcgcctgtagtcccagctactcaggaggctaaggcaggagaatggcatgaacccgggaggcggagtttgcagtgagccaagatcgcgccactgcactccagcctgggcgatagagcgagactccgtctcaaaaacaaacaaacaaacaaacaaacaaaaaacttgcctgttaattctcatttctgagatcctgcagctaccttgggtggtggcctgtccaagcctggcctttgttttgttttgtttatttgttttgagacagtcttgttctgttacccaggctggagtgcagcggcgtgatcatggctcactgcagcctcaaactcctgggctcaagcgatcctcccacctcagcctcccaagtctttgggattataggcgtgagccaccgtgctggcttgcctttggttctctgaactactccagttctttccactaaatccacccccctcttttttcccctttggttaatcagaatccatatcttttgctccagatcaaagaaccctacccgatgatcccttctccattcacaaaatcaataacatactcaaaatcaataaacagctgaccgagcacagtggctcacgcctgtaatcccagcactttcggaggcagaggtgggcggatcacaaggtcaggagttcgagtccagactgaccaacatggtgaaaccccgtctctacttaaaaaatacaaaaattagctgggcgtggtggtgtgcacctgtaatcccagctacttgggaggctgaggcaggagaatggcttgaacccgggagcccgagattgcagtgagctgatatcatgccactgtactccagcctgggtgacagaacgagactccatctcaaaaaaaaaaaaaaaaaaaaaaaaaaaagaatgtggccgggcgcggtggctcacgcctgtaatcccagcactttgggaggccgaggcaggtggatcaccaggtcaggagttcgagaccagcctggccaatttggtgaaaccccgtctctactaaaaaatacaaaaattagccaggcatggtgatgggcgcctgtcccaggctgtttttatgttatgtggggatgaggcactgaccctgtgggccgggatctctctggggacgcttcccttgctttttgtctacactccttaaggcaaactacttgggaggctgaggcaggagaatcacttaaacccgggaggcggaggttgcagtgagctgagatcgcgccactgcactccagcctgggcgacagagcaagaatccatctcaaaaaaaaaaaaaaaaagtaacaagactcttaacagctgtggagatctgtgcctattctgagtgcttctccactacttcctgatactgatttagctctgtgtatatatttgttgaagtaatgcttagatcttagttgtattcatccagtgccctcccaatcatgttttgtgtggaatagcaaatcactttctgcttgtattccaaaaatgttgcagaaagacttgccaccctgctggggactgtccctgccccctgaccacttctggcctgccttacactcgattattttgggcaaaaagtgcaaatcaagactgagatgtcaggccaggtgcagtggctcatgcctgtaatcccaacactttgggagccgatggatcactcaagcccaggagttcaagaccagtctgagtaacatggcgaaaaaaacctgtctttacaaaaagtaaaataattagtgaggcgtgatggcatgcgcacacctgtagtctcagcttctcgggatagtcacagctacttgggaggctgaggtgggaggatcacctgaggccagggacacaggtacatcaaggctgcagtgggctgtgatcacaccactgcactccagcctgagtaacagagtaataccctgtttcaaaaaaaaaaaaaaagaaagaaagaaagaacaaacaaagaaaaaaaacaaaaaggaaaaggaaaaagaaagagagagagagagagagagataatccaggactttttttgaagggagagggaaacaggactgtctgacacgcggg

SEQ ID NO: 17494 - DNA, 2300 bp, Homo sapien
ggaggctgaggcaggagaatcacttgaacctgggagatggaggttgcagtgagctgagattgtgccattgcatttcagcctgggcaatagagtgagactccgtctcaaaacaaataaataaaaaaagaatgtgcacttgtggaattgtggtaaggttttagaccagcactggtcagcatggtagcatctagccacatatggctatttacatttaaattaataaaagtttaatgaagtttaaaaaattcagcccctcagtctcactagccacatttcaagtgctcgctggcctcctgtgactcgtagctatcctacggacagcacgcagaaagaacatttccatcgtggagggaaattctgctgaacagtgctgatttagaagcatcacgcccgtgctgtgcatcagctctgtgttataactcatctgacattgtaaactcagggcagaagcatgattgcagtgtaaagttctgctttccttggagatggggtaaagaggtgaggctcacaaggaatgttggactggttgagggcattctctgggatgagggtggaccaagttcaaaacggggagctccggcttctgctgcaaggcaggcacatagggcataattccctctgctggtggagaaggggcaccaagcagtgggaagggtggttaactggagagtgtttctagcatctagagctaccagtgtttgacttttcaaaggaaaagtggctatgtggttttgcaaacgtgttacaagctctctccatttttatcgtatttattgtatcactagctagactaataaagaaaaaagagaagatacaagtaaacataatcagaaagggcaaagaggacattaccaccgaccccatacaaacacaaaaaagccctcaaaaactattatgaacacgtctatgcacacacactaaaaaacttacaataaatagatgaattcctggaaagatacaaccttttttttttttgccagagaatggaattccagatcctgggttgttagaaccttaagggatactttcatcccctggttcctgtacagggaggaggaatctgaggctcagagaagtacagtgacttgtttaaggtccctcagtgagttagggcagaggaagacttctggccacagcttccctgaagccaaggctaggcagagtgttgatgtcacccaggcaacagggatggtgccctctgcccacctagcaagccctgactcatgctccgcgcccctgctgtgagaagtctctgctgactcccaccctgattggagcaggttagtcagctttgaggtgcagcctccagttctggcccctccagttccgggactctcattcgaggcatttggggctgtctcatttctgtgcccagcacagggcttggcacagaggaggtgctttgtgggtgcccgccagtcaagggtttccgttttcgtgccatgtaggtaaccccttgccattcgtgcccttaggtaaccccttgagcagcctaaagaagcctagagacttctccgtttttgagtatattttattgacgtgaaatacacgcacggaaaagcgcacaaatccaaagtgtacttccgcgcatcttcataaagtgaacacacttgtagcctaagaacccaaccctaccagcgcccggcaggccctggcccccttccagtctctcctactgaacaaggtttttgagtgaaaccggcaggccggagcgtgagtttctgcttgacggggcggggtctgcgcgtgctgcccggccgtgagtgtgggggggccgtgagtgtgtacggggtggagtggcctgaaggggattagagtgcgcgcgttcgggtattaatttgccagggtttgtgtggcgctcgggattgggggttttttgggggctcgggcgtcgactgtggggcgctgcggaagggtgggtcgtccgcgtggggtcctggagcgcaggaggcggaggggaagccgcgcaggggccactagggaggggctctggcggggtcgcaggggcgtggtctgcgggcgtgggggcgggacctcggggcctcgggggcggggcctgagggcgcgcgcacgcgtccggcgcgccccctcccggccgccatgttggctggtgtgtgggtgtcaaactgagccagacgcggcggtggcggcggctccgcgggctacggtcgctcccgcctctcgagcgctgccggtggccgcagcggcgcacccacgccggcccggaggagcagaggtgagccacagcccgtggggctccaaggccagagcgagtccccggggcgaggaccctccccctc

SEQ ID NO: 17495 - DNA, 2300 bp, Homo sapien
tcttcccagcagtgcaagtccacgcctctggaacttctgaccaaccagcttcaagttgagaccccttctttgggttcaattaattcggtagagtggctcacataactcagcgaaattgacttatatttacctatttattataaaggatattgcaaaggatacagatgaagagatgcataggccaggtgtgggagaaggagtgcagagcttccatgccatacctcagtgccaccgttcaggaacctttgtgtgttcagccatccagaagcttcctgagcctgtccttatgtctttttatggaggcttcattatggagacatgattgactaaatgattggccattggtgataaacctaatcttcagtccatctccccttaccgggactgatcctgccttggtctttctggtaaccagccccatcctgaagctgcctagggactgccagccctcagtcaatcattcacatgcaaaaagacatcactgtggagattccgaggattttaggtttggaatccctgccaagtgcccgggatgaagaccaaatacatatttcacaatagcaaacccttctttttgtgtgattgtttgtgatgagtagtcattgcatttcctgtggcttttccttgcttctgccaccttttgtttacttgcttgtttttttgatgtgcccattacccatctgaggctttagatgaggaaggtaggagctacctgttgtttctgtggcagaaacatcttgagagtaaagaccaccacaggaagaaagggaggcgcaggttctgggcctggagtgaccttagtcagctgaccgtgtgattccaggcttcggttcctcacttgtgtagtgggaaaaataatccttcctctgagggtttgagggtggggggtggacagccaagcaggtggtcagaatggtgggtggagccccttgcttcctatccgggccctagctgtcctaatctacctggggcaatccctggagacttctagggcctcagttttcccattttataggtaaggaaccttcatcccctgccagactgtggccttcttgagggcagggactctgtttttaatctgtaacattcatttatttaacagtgttcatttctgtgtcgggcacagtgctaagtgctgggtgctcactggtgatgaggcagatgaaggttaccaaacttgtggacaggagcctcatatcagagacgtggacctcactgtagcctggtaagtgagtgttatctggaggaagagaggggatagatgatgtgtttggttggagcgagttaatagatagccaggggtctcagttttctttgtgaaatgaggggctgggctataaccagattagttttaaggctgtattagcttgggccagatgctggaggcttctgaaagccaagtggaggtctttatcctttttctagaattgctgttaggaatctttataaattcttgaacagggaaggtcaggcgaaaagtggttgtcaaggagaattttctggacattcggaaacacagtggaccaaagcagttttgaaggtattgacaggcatttttgagttaagatagacctgaaattagtctctttcttgtcctcatgtgtatttttttttatttaaataaactttaaaaaaatagagatgggggtattgctgttttgaccaggctggcctcaagtaatcctcccatttcagcttcgcaaagtgctgggattacaggtgtgagccaccatatctggtctcacatgtaattttaaatctgccaagatcagcttcccccagtgtttccgattcttccacagctggcttttgccaggcagtgaaaagacaacccataaaatagccattccagtggaagtgttttgaaaatagagcaatagtcatgatgtttacttcttttctcctaaaggcttaaacttgagtgtaagttttattcattgttgactggtgatattgattttatcttgggttcgtcctaaggaggctgggtatgtccactcagctccccagttttacccagtacctgctgctggaccacagtctcccaccctcacagggggcttacgtcgcagtggaatgggttttctctttctctaggtcatggcttccagcttttcgaatctgaggctccaaaggaggaaatgaccattcagggatcttactccagcttgattacggagactgaaccttcatagggtgcgcacttaccaaggacaggaaggtttctctgtttgaagggctttaaacttataacaaagaaaataaaaatgacgacttcgtctatcagacggcagatgaaa

SEQ ID NO: 17496 - DNA, 2300 bp, Homo sapien
acagttcattcatgcctcattaatattacagcttgtttgacttgggtatttgtgtaataactatatttaactctaggatattttccttcatgtccctgttttcccctaacagtttatacaggattttggcttcttctaaactgacattagaaaacgtaaggaaggccagctctgcactgtaaagaatgtaaatgataaaagcattcgttaaagggtcacccagaggcattggagttacatgcccatttcacccccccagatagtcagaggctgctgttctcagcaggtcccgcggaactctccatggagttccctttttgtttttcccatgttctacccatttggtaactgacaaggtctgttttgagccttggtggccaattttgtgttaccctggccctctagctctcccgctggcaaactggctttcctgggacgtttgcatgttaaatacagcctggcaggcctgcaggctggccatcttcccccactgcggctgtctttggccctgcctctgcaccttcgcctgtgccattccgttctctctgcttggatatcgctcccaccacctgccccctgttcccccaacctggcaagttgcttaaggtatccaccccgtgtggatttatgttgtccttcagccctgataggagttgaagataaaaatgagtatttttttctttgaagatttctcatgccccagatgagttttgagcaaacaagtgttatatggattgcatttcatcctttaactgttgggtgtggcatcctctccacatctcactccctccccgtcagagggtagggggctgtcggagtccagggcaaagattctggccatgtttcttctctgttctttcttgatgcttcacaaagggttgagtataaggtaagtgcttaatctatgcacaccagtggatttgtttggagcacaccttcttggaaatcagcagtgggaaggtcagaatgatgccggccattcagaaaactgtcaggtgagatgcaggctgtgattcaggagagatgtttgtgaggggtgcatttgggactgcagaccccacagaggcagaggaggcagactgctcagaagccctcttcacatgagagcagccacagccgggaaggcctcttgtgtgactggcgataatcatgaggatgtctgaggagagctttctttcatgtgccatatgtcatctcatcctccctgtgcccctccctctctctcacctcccacatagatctgtagatctgaccttggaagtctcttgaattgtccatcttgttccatggcctcaattcagtgccagccttctgaccaatttcctgctgtcattatctcccagtctcacctaccctccatcttcataaaggatgccctggtcctgagtctcagcccctttagatgccaggccctgcagggccatcccagagcctttgacgttgcagacctcagttgcttccaccagctgtgtcccctgccctcagtctgggggtcctcctgttccggcggaagcattccagaccttcccaggcctgctgacgtctgcctgcaggcacagctctgggctttccttttgaagcctggtctacctgccctctgctctgtatttattgagttcccatggggcaccaggcactgagcacagaacagagccccttgccctcgtggagcttatatggtaatgggaaagaaaaacacaatataaattattcagcatgttatgtaatgagcgctctggaaaacagcaaaacaaaaacagtcttgcttgagtgtctttggggaggtaagagagggtggcttgcagtatgaatggatcaaggattgaaggagtgtgagggtgagccttgtggaggttggaaagagccttccaggcagaagggcagctgtgcaaaggccctgaggtgggagtgtgctcagggtgtttgagaaaaggcagccagtgaggtggcgatgagtgacggagcatggccagtatgtgggggtggagcgtggcagaggtgggcctggaggaggtgtggggcagggcctctcaactctgtctggttgggagcattccttgaattcctagtccatccagacgggtccttttgtgtccatgtttagatgttgtgccgatgtcattgctaggagcttttgaaacactttcactgtgcttaccttgcagaccatgcactcagtggcccggtgctgggccttctgggtttatgtcagaaatttctttgactttcactcacagtgagatgggggaagatgagggttaggaggatcccttggggtgtgtatgggcaaggtgggagca

SEQ ID NO: 17497 - DNA, 2300 bp, Homo sapien
cggcttatgcctgtaatcctagcactttgggaggctgagacgggcggatcacctgaggccaggagttctagacaagcctggccaaaatggtaaaacccggtctctactaaaaacacaaaaattagctgggtgtggtggcgggcgccagtaatcccaactacttgggaggctgaggcaggagaattgcttgaacacagaaggcagaggttgcagtgagccaagatcaagctactgcactccagcctgggcaaaagagcaagactgcatctcaaaaaataaataaatgttctaattgtgtattagtttacttccttctttcattacatctattttaggaaacctaactagcaggattcattcacctaggtgttgcttctgccttactttccaatctaaatttgcttcttagggttttcctctttgagagaaactaaaaggttaggaataattcctgacaaaggaggctttcagatagctgggccatggctatggtgaataaaacaggggaagaggcctaaatgcaattcaggccacagacgggatccacagaagaaccaggggaggtagaaagaggctgcttctgggcagagggctgaggtggggccgggcaggagactgggaacttctctaccatgtgaggttgccaagcagaggcatcaccctgtcatgaaattcttaaaaacacacaaaacatatagcaataaatttactttggaacgggccgggcacagtggctcacgcctgtaatcccagcacttcgggatgccgaggcaggcagatcacgaggtcaggagatcgagaccattctagctacgaggtcaggagattgagaccatcctagctaacatgatgaaacctcatctctactaaaaatacaaaataaattagccgggcatggtggtgggcacccataatcccagctactcaggaggctgaggtaggaaaatggcatgaacccaagaggcagagcttgcagtgagctgagatcgcgccactgcactccagcctgggtgacagagcgagactccatctccaaaaaaaaaagaaagttgcagctataaaaacataaatgtatttttctaaataaaatcaagtcaaatcccatcctagtgttatcactcaattatatttcccaaagtatctcttcagaaataaagctagagggtaaagaaaagtcctcaatccaccttaacaacttgatttcttaataatacaccaaaacaaaaagtatatttttttgttcgttttgttcctaaacttcacctatgccaatcagaactctcaagtttgggctttcctatgttcaaaaagatgtcaccatccacatggaagagaataaaggaagccagacagttcctggggactcttctcaagtgaacagggcactcacacccaaatcattaaccactccagccacctgttcccagcctctttcctgataaggaatctctgaggcttggttcacaaaacccttgctataaagcaaatattgcacttacgacatccttcatttactaccaaatggaaaccacaaatgaatcaagtagaaggctcatatcccaccccaccccaaaaaaagtgctctggaaaacaagccccatcctggcagggaagctggtactgagttgcacagctacagtgcctgatacagccaggttggagggggagagtgggcacggggctctgaactggacctgctggagaagtgaggcctcctttgtcctctgagctttctagcacatctgcaaggccagaatagcttcaaatgcaaatgtacatgtttacgtctaccataactgacactgttagaataacgcacagctggcacatactggctcaccacatcatagctcgtcacatcaatgtagaaattaaagacaatgggtattcccctgaatgttgtggttttcataaacggatgtacagctttcagttctgcagatggcagaattcttggccaccaaccattgaacatcagctgagctacacacaacgggactgagcttcgagggaggattccagcagagatattcttgccttggtgacagcaactcagctccacaaagggcctcttgtgcccatgcacatgacagtgaacacagacgtcgttgtgagacaggcctgaatgggcccttctgaccacctgagcctggccttggctctgctctgaggatctgaaggttcagagctcacagggaccaagggaaaaagcaagtgctgggggatgtgccactctctcattgttgcaggttgctttcccagacactcactggaaggaagaacgggaattgttagtttaa

SEQ ID NO: 17498 - DNA, 2300 bp, Homo sapien
cctcagtctgtgcggcagcttccagcactgtggggcagtctcccattctctgctcctccaaatggagctggactgtgggtactgacccctgccctgctttgttgttattgttgggggaagggcacagatcataggtctttctagtttataggctgtgtctgccttgctggagaaggctctgtactccacagagcccaggacacaggaccttactgtctatgtttgagaagaagactgaaataactctctgggagccagacagtccgctgtgatagagactggcaatgttaaccaagcccatttccccacctcccaccctccaccactaaggaagcctgcacttgcccatccccacccaccccacatctggatgggggccgagggcctaattctggcactggtgtgagtggcagtgaggcaattccaggcctggctgtaagaaatctatgcttgacccttgtccatttttcccttcatagccaccttcagggctgtctgtcaaagatagcagtgtttcaagatgaaagcggcttgagtccctgagtcactgacttctgtgagaaacttccgcgggaagccgctgagacctggagatgtgttactgcagcgtaaccaagagcatcccacacacccttctttctctcctgtcccctgcactgaacgggcaccccctgccaccagtccctagcctcctagctctgagtcaagcttgtctgcttatccttgggtggacaccaggagccaggcacttgcacagagagcagagggctgcagggcagtcccagacctccctccaggctcgtctcaaggcctctccaacccttcccatcagggtctcccagccgcctctgcctcggccttgcctcttcccgtgaccagagcacctcttccacctctgctgcctggagatgcacgtgtcctcccgccgctgccctcgtctggttggtggctctgaggcacaggccctctgtcggtcagctgttgcacagcaagccacctaagaaccagtggctccaacaggcccttcctctcaggaacacgcagttggctgggcagctccacgcactccctccctctgttgcctcagctgacaggcagtggcttcccagagcagctcttctgcagcatggacacaagaggaggcagagcacaggaagcctctggggacccggcacactgtcacttccacctcatccaaagcagcctccaccagtgacaaggccgcattaagagggcggacacagaagggtaaagggcagtggctagcacttcccccagcacacccgtgcaggccaccagtctcagcacctcacaaaaggcacgcctcccaccccctttccctgaggttcaggggcaaccaaatgcccagctcacgcgggcactaggaccaggctggtggcctcaataactgcagaccaagctccacaagaatcggctccctcatctcccacctctccagtggcacaggactgatgaagatggggtgggagaaggacacagccagaaaccgcatcatggtacaaatgataaattatatttatacagtaaataagtatcaacagtcaacacaagttcaaaaccagccaccggcctctgggactgagaaacagctgggtgacttcctccaccacggtgcccatcaggagggagcacgatggcacaggtgcaacatgcgtggcagtggccggtggcttcatgatcagtgcagtgggcaacagggacatgcactcgggatggcctgtgccagaagatggggcagggggctgtcttcttgggtcccggtggcccagtggctgtcatgttggggcctcaaagtcacatcatgaaagactcgttacaaaagaatcactgaccccaagtagtcgagtctagtctactgacctgtaaggctggcccaggccctgcaccgtctgaaggaaagcacctttctgggcaagcatcctgcctcccatcccattgcacctccccacccttcccccggcagacgagaccagccaccggcttacccaaatggcagcgggagcctaagacccagccgcaggcctgcagttctggcagaaggtggctggtcaggaactctagacacggctcctgggactggagagggcggcctcaggaacagcatgagtgggtgcagtccccactcagagcctgcatgtcccagcagcccagagaccatttaagatctctcctgtgccggtgcgaagggtaatcttctggaaccagagaggggctggcaggtggtcagctgcccttagagctagaggtgagaaattcccatggtggaaaaagggccagaa

SEQ ID NO: 17499 - DNA, 2300 bp, Homo sapien
tgcgtgggagtgtaccagaggacagagctgtactaagagtgaggtgggagcgaggaatgtctaggagcccaggaaggcatctgggggtggagagacttggcacaggcacaggcagggaagctcagcaatatatgttaacaaccagcatggctggactggtgcagatcggctggatgtcagctgggctgagggtctgccccaccccattgcagatccctacatcccaccccaagagctgcagagtgtcctgctgagatcgctgtgtgtcagcatctgcagaaactaccttctcctccaacctgactgtcctgacctgaaggacagcctgcccaaggacttctagtacaccaggctctccactgggcccttgaactggtggtaaggattccagcaggccctatgcaagcccctatgcaagcccctgagacccctctcctaaagtcgcttctaatgccactagacttgttaaagttaggcctggtcaccctcccatcctatcctggagtcttccattccccaacacccaggggtcgggcttatttgtacccctgaaggccaccctagaacttcccaccccttggggagactcccccattatgtcctatttgaatgtggggccacctttggtatagccaggtcttaaactactgggagcccccagttattcgataactacaagcattttgctgaaaactaacttgtgtgcaacaccgagcctcaaaggccaaagggaggaaataattgggtgagactgatagaatgtgtgggagaaagcactttaactggaaagagatggacagagcgggggaagaagggagtatgaccccctctccaggaggggaaatgggccctgtcttgggctctgggtgcagcacttgggccaccagcccacccatcccctcccccagctgctcttgtcagatgtgtgaactggttacccgctgcctccctcccctgatcaaatatctttgctcactaggcagggggtggttcagtgggtgcaggctgggctgagactgctccttccctccctcgtgcagatggttgatgggactcccctagtctgctcccaagctagaagctgcagaatgtgatgacctggggtccctgctcggagcctggcctcccgggagtctacacacctgtgaatcccttcatttcctggatccaagataatgtctccaacgtctcctttgacacctctgccaacagatgctgttggggctggcccaggacaagacagaggcagtgagggttgttagcctctggagtcctgggtttgaatcctgacttagctacttacctgcctttgccatctgaatctgtttcctcctctgtaaaatggagatgtcttcaattattcatttatcaacaagttagtagttaccaagtgcttactctgtgacaggccactaagatacaagactgtatcttgacagattcgtggattttggctagcaactcccctgagcgctggctgattggggtgccaggcgccgcccgctgcgggcctcagtttccccagcttcgaactaaagagcgatggcttggatgtaaggattcttgaggtccctcccaagtttgtttaataaactttttcgagggcaagcgtctccaagccacaggggcgcatccttttcacctgcttggacgctgcttggccccagctggggaggctcctccgagcacccggcattccagagttagccccgacagctgtggtcacgtcgcccgtgctctgcagcgcctccctccgcgtcctcgcggtggggccacagcgacatctagtggctgaatgtattttaaacactcggcttgctgagggcgtgagtcggagcgctgctccccaggactcagctctcattcgcctctgcgcttcggcggggacggggagccgggccgagtcagagtgaacacacactccctgcgcgtgcaactgagtcgagcggtagggctggctttacccgacaggtcaacgctcccgccccagctctcggtcatacctgccctaaggaggggtggagcctcggcgtggatccccgccccttgtgccccgcccccttataacggcgcccgttcactgcgcctgcgcatgccacacgcgcactcgcgtggccttcgcgaaggtgtcgctgccaagaaacgtgtcctgcgcgctacgccgtctgtttctagggcaacgccggcgtctcttagcaaccgcgcgcggcctaggtgggtccccccggcacccccagacctgccatggcgaccgcgagtcctagcgtctttctactcatggtcaacgggcaggtggagag

SEQ ID NO: 17500 - DNA, 2300 bp, Homo sapien
aattgcttgaacctggggtgcagatgttgcagtgagccgagatcgtgccagtgcactccagcctgggcgatagagtgagactcagtatcagaaaaagaaaagaggtgttggtgaggatgtggagaaatcggaactcttaaatattgctggtgaatttgtaaaatggtgcaactgctggagaaaacagcttggcactttctcaagaagttaatagtttaccatgtgacccagcaatcccactcccaagagaaaggaaaacatgtccacaaaaaaacttgtaaacaaatgttctcagaagcattatcataatagccaaaaagttgaaacaacccaaatgttcataaactgatggataaacaaaatatggtatatctaaacaatgcaatatatttggccataaaaattagtgctaatatgacaacatgaactttatgctaagtgaaataagccaaacacaaaagactacacagtgtgtgattccattagtatagagcatccacaatacgcaagtccatagagacagaaagtagttcagtggttgcaagggctctggtgaaagaggaatgaggagtgaccgttaatgggtataaaccaaaaataaaattagaaggccctttgcaaccatctgaatggactccctccttggccagcacaccctaaaatttaacctgaaagactggttcaggccacgatgggaggtgagagttggacatgccttattatacccctccaacattaacatcaacactgaccttaagtctgataagaaatatttgtctattctctctatagcctgctactgggaggcttcaactgcataataaaacctaggtctcctggccaggtgcagtggctcacgcctgtaatcccagcactttgggaggccgggagcaggggggcgtggatgacttgaggtcaggagttcgagaccagccaggccaacagggtgaaaccccatctctactaaaatacaaaaaaaaaaaaaaaaaaaaaaaaaaagccgggcttgatggctcatgcctgtgatcccagctattcgggaggctgaggcaggagaccaggagggggaggttgcagtgagccgagatcgcaccactgcactccagcctgggcaacagagtgagactcactcttcaaataaaataaaataaaataaaataaaataaaataaaataaaataaaataaacaaccaaaaaaccctaggtctccacaaccccttatcataacccagatattcctttctatagataataactcttgtaaccaactgccaatcaggatatgtttaaatctacctgtgacttggaagcccctcccctttgagttgtcccgcccttccagaatagacattgaacagacatttccccaaaggagacaaatggccaataagcacatcaaatcaatgtcaatcttgcatgtattgacttatgtattatgtcttcctgaaatgtataaaggctgactatgccccgaccatcttgggcacatgttgtaggacctcctgaggctgtcaccaccatgtccttaacattggcaaaataaactttctaaattgacttgagacttgtctcagatacttggttcacataggtttcttttaggggcgatgaaaatgttccataaaccactctacctaaaattaggtagtgatgatggctgctcaactgtgaatataccaaaaaacactgaattgtacactataaaaggatgagttttatggtatgttattaaaagttgtttaaaagtgagggacccctccagttattgatatggaatgatcttcaggaaaagagcataatatgctacatttttgtacaccaaaggggaggtaggtacgaatatgcatacatattgcttttttctagaagccgcctaggagtgaaaccaaaattcttcacttcttttcggccctacctcgagctccctttagaaaacctttccttccagctcacagtatccaccatgtccaccttcgcctcccggcactgagccttagaggggcggtgctccataaacatttgctacatgaatgaacgaataaactatcggattttggggtgggtcgggacagctcggttccagcgagggctccgcccacccgcgggctccgcagaggagcagaggttgggcggccgcctcggttaactccgctgcagcccaaagcacgggaatcgcgggacagacaaacgagcggagggaagatacctagaagccaggaaaccgcgagctgcagtccaacttggccggaagctgcggagaggctcagccaccggaagtcagtggagggttcggccggacg

SEQ ID NO: 17501 - DNA, 2300 bp, Homo sapien
tcaacactgaccttaagtctgataagaaatatttgtctattctctctatagcctgctactgggaggcttcaactgcataataaaacctaggtctcctggccaggtgcagtggctcacgcctgtaatcccagcactttgggaggccgggagcaggggggcgtggatgacttgaggtcaggagttcgagaccagccaggccaacagggtgaaaccccatctctactaaaatacaaaaaaaaaaaaaaaaaaaaaaaaaaagccgggcttgatggctcatgcctgtgatcccagctattcgggaggctgaggcaggagaccaggagggggaggttgcagtgagccgagatcgcaccactgcactccagcctgggcaacagagtgagactcactcttcaaataaaataaaataaaataaaataaaataaaataaaataaaataaaataaacaaccaaaaaaccctaggtctccacaaccccttatcataacccagatattcctttctatagataataactcttgtaaccaactgccaatcaggatatgtttaaatctacctgtgacttggaagcccctcccctttgagttgtcccgcccttccagaatagacattgaacagacatttccccaaaggagacaaatggccaataagcacatcaaatcaatgtcaatcttgcatgtattgacttatgtattatgtcttcctgaaatgtataaaggctgactatgccccgaccatcttgggcacatgttgtaggacctcctgaggctgtcaccaccatgtccttaacattggcaaaataaactttctaaattgacttgagacttgtctcagatacttggttcacataggtttcttttaggggcgatgaaaatgttccataaaccactctacctaaaattaggtagtgatgatggctgctcaactgtgaatataccaaaaaacactgaattgtacactataaaaggatgagttttatggtatgttattaaaagttgtttaaaagtgagggacccctccagttattgatatggaatgatcttcaggaaaagagcataatatgctacatttttgtacaccaaaggggaggtaggtacgaatatgcatacatattgcttttttctagaagccgcctaggagtgaaaccaaaattcttcacttcttttcggccctacctcgagctccctttagaaaacctttccttccagctcacagtatccaccatgtccaccttcgcctcccggcactgagccttagaggggcggtgctccataaacatttgctacatgaatgaacgaataaactatcggattttggggtgggtcgggacagctcggttccagcgagggctccgcccacccgcgggctccgcagaggagcagaggttgggcggccgcctcggttaactccgctgcagcccaaagcacgggaatcgcgggacagacaaacgagcggagggaagatacctagaagccaggaaaccgcgagctgcagtccaacttggccggaagctgcggagaggctcagccaccggaagtcagtggagggttcggccggacgctctagaatcccggaggaccgggatctctgtggttggccgtgacgggcaccctctaccggggatgacacattcccagagctcctgggaccaagcaaatggcggacacaattccctgggcggaaggggacttcgggagccagtagccaaggtaacagtcccagacctgggcatctcaggccgggcagttccccgagctcacgggactagctgtgattggccggatgaggttgagagcttcatggggacgcgcgcgctacgtgcaggggcgttgccttccattcacttggcgcccgactgccagtgcgcatgcgtttgaaggcggtgcagggcggggagcacacccctgcgaagtgccgggcaccctttgggcggctcccgccggcgagctggacagcggcgcgcgccaggcgtggctttctcggccggtgggctaggattggacgcagtaggtagaaggggcaggaccctccgcagcagtagctcagcgattggccaggagctggagggagcgtggccttgggaggcggggcggagggggacggacagggcagctcaagacgctgaggtggtggctgcggcctttgaacaagtaagtgagccaccctcggagacccccgcgctggggacgggaggccggcgagcctcgggacctctgaaagccttgaggaggcgcgggggtgagtgcggccctgaggaaacccaggtgccccgcccctccctttcttcctggcccgcgcctc

SEQ ID NO: 17502 - DNA, 2300 bp, Homo sapien
ctgtaggaaagtgttctgtgattgattagtgaagtctgctatgggaataggagggtgtggtcatagtaggaatgtcctacatttgacatcctatatactaagattctataaaactgtaaaatcatctgtacacttcttgaggaataacagttgtccctggcaaaactctaaagaactggtcctagaactgcgggaattttcccagcctgcttcagattagattcagctgcctttccagaacttcggcaacatggttgcagccttcagaaaagtcccaagtctggctccctctcccatcccgcttcttacacagatttgaattcgccatagggcacggtgggcctcaggatgtccttgatggcgatgatgttgtcgtgtttaaagtgcttgaggatcttcagctccctgagggtccgcttggcattggtcaccacatcgaaagcattagggatcttcttgatggccacctgctggcctgaggagcagggaaaagggacataccagaggataccttggagaaactgcagagtcgactcagcccctatcaacacctcccttctaggatgcaaatgacaacagctaccaagtattgggtacctactatgtgccaagccctgtgctaagcatgttacctacattattaaatgttaccttcacaactcccctgcggggcaggtcccaataggtcaacgttaaagagaaggaaatatggcttagtaacttgttggaggttgcacggatgcccagtggtgtagctcagcctcttatgcctacaccctctccatctcagacctcacccatcccaccaccagttccttatgccagtgtctggctccagaacacatttctctcttagacacgaaggactggctctccattctggtctaactgggactatcattttcctaaggaggaagtaggcaggcaggatggcaaaaccaccaggccggagtttcagagaaccgagcctccccggagcctggcaggcagaaggccctggtcagtgtgtgttgactggagccagaactcgcaccccgctttccttcccggctgtctgggacaggccggtttcccactccctgcgacgctgccacatctgggaggcgacggctcaggaagctcaccggtgaggcggcggcgggcggaggacaccactccataggccccgttgcctatggtctcgatgatctcgtactcgtcgcccacgtcaaaggtcacatcgaaggagcgggctttaagcagggccaggttcttggccgctacagaggcagcggtgtgggcgggttcggccttcacgggcccggggggctccgcagagccgtcctcgccgtcttcctccttcagaggctcggccatggtgtctgtgtggagactcgggtgaggagaggaccacctaccgtgggcctcagtgtcccctctgcgggctggggagcaggaccagggaacttcccagtttcctaaaccgacaagggcagaagcgcgcggctggttcgtggcagactagctaccccaggggtccgggcccagagccgggggcccgccagggtcgggggaggggtaggcgaggcgcgggccaggaagaaagggaggggcggggcacctgggtttcctcagggccgcactcacccccgcgcctcctcaaggctttcagaggtcccgaggctcgccggcctcccgtccccagcgcgggggtctccgagggtggctcacttacttgttcaaaggccgcagccaccacctcagcgtcttgagctgccctgtccgtccccctccgccccgcctcccaaggccacgctccctccagctcctggccaatcgctgagctactgctgcggagggtcctgccccttctacctactgcgtccaatcctagcccaccggccgagaaagccacgcctggcgcgcgccgctgtccagctcgccggcgggagccgcccaaagggtgcccggcacttcgcaggggtgtgctccccgccctgcaccgccttcaaacgcatgcgcactggcagtcgggcgccaagtgaatggaaggcaacgcccctgcacgtagcgcgcgcgtccccatgaagctctcaacctcatccggccaatcacagctagtcccgtgagctcggggaactgcccggcctgagatgcccaggtctgggactgttaccttggctactggctcccgaagtccccttccgcccagggaattgtgtccgccatttgcttggtcccaggagctctgggaatgtgtcatccccggtagagggtgcccgtcacggccaaccacagagatcccggtcctccgggattct

SEQ ID NO: 17503 - DNA, 2300 bp, Homo sapien
atatgagaatcatgatgtttatgatgacgatgacgatagctaatatttactaaatagctgccatttgtaggcactgttttaggaacttgatatgtattacttaatccttaccacacccctatgaagtagatactatgactatcctcattttacagaggaggaaaccaaggcacagagagactaggtaatttttgcaaggtcacccagctaacaggcaacagaatctagatttgaactgaggtagcctgacacaagacacaactatgaatagaggcaatcacagaaccaagtcagggaggccaactggggctttgccaaggggcttatctattgactcaggagtggagagatgggacctaagccagagctgcctcatcactttgcctttgaatatttcatctgttcatccattcaacacaaatgtccttttgtaatacaccttacatttgcaattcactgtccaaaacctgtgcttgccactccttgtggggcagatactgtatcctcagcagccagcatagcctatagcacacagcgctcaaaagatatctgtgagccaggtgtgctggccctgtagtcccagcttcttgggagactaaggtgggaagaacatttgaggccagttcaagaccagcctgggcaacatagggagaccccccccatctctacaaaaaaattaaaaaattagctgggtgtggtggcacacctgtagtcctagctccttaggaggctgaggtgggaggatcacttgagcccaggagcttgaggctgcagtgagctatgattgcacttgggcaacagggcaaggccctgactctagtatcttatctatatatagatataaatacgtaagtgactgtgcatgtacatatcaagcctactctgtgccaggctctgtgatgggcactgagcatgcagaaatgagacacacaccctgctcactggcccttatggccaacaaaaggaggcagatgagcgggcaccacaaggagcagcacaaaagagtggggacctccatggtgaaaagtctggagtggctgcactgtagtttatgagtcacagcaataagggacaaggtcctcaaggtaggccagagacagacttgaaattcctttcatgtccaaggtgagaaacctagcctcagccctgaggcaatagggagccatgaggctttaagcagggtgacataatctgagaggccatctagaacaactctcctggtagtgtgccaaggataggaggagagagcccagaagtagggagattcagatgaatctgggaggtgtgggagccaaagtgaagggtttggaagaagaaaggaggggtggagtgaggagaaacaaaagaggtcccatacctattgcatgtgagccagatgggccagggaactgtgggaggggaaaagagtgggcctgaggtggccagagtgaggggggctggggagggggactggagaggggccctggcctgagctggggcagacagagcagttggacgccagcagccttgtgctcatggctcagaaatgtcccaggcctgccaagaaactgctgcctctgtccccccaccagccccagccaggctcccacatcaggagctctgaaactgtcccctcagccttctgctcccccagagcaggcctcccgtccccagaagccaggcatatgacacccccactctccctcagccctccccctcaatggctgatgaaacacaggccagggaaggaggggaaagaataaacagacatctgcaggggggcccatcaggaagtagggggcaggctgcggcgggctggggctgcctgggggcgccagggggcccacaggtctagcagggtgggtggcagatggcggatagcggatggagtgggatccagggaacagttggagccagcagggagttaacgtctgcagtactttgcccgacaggactaatgagacacaggtggtcccctggctccagccccacctcccagccccctgatagtgtaaactgatgctggttgtctggggtggggagaggggggttctgcagctacgggaaggggggcggggctggggcggctggcgggggcccagcgcataactctgggcggttgcagtctggggccgcagacacccagccactctgagcagaactgacagcatgaaggtacggggcccagggtcgggggactcatagcatgggggaactgagcccactccagaggcccctggccacagagggcactatgaaggcacaaggagttctcttgaaactcgtaagctatgagggtacacagcgtcccagagagtggg

SEQ ID NO: 17504 - DNA, 2300 bp, Homo sapien
atccctcctgagatactgactggtgaagtccctatcccctcctttggcccctgagggcctgcatgacccaggcctgctctgcccttcaccttggtgcacccatctttgcatcaaatattcctgccaggccagccggacctcctttgttccccagaatgggttctgtgtcccctctcctctgggccctgtacctgtggtttgccctgccttgacaacctttttctacctccttgcttatcaggacagcctgacacccctcctcaccctccccgcatccaggttctcacccagatcatagcaatgccttttaattgtccagttgggatcttggggaggatggagctttgtctctcttgtttccagctgtactgcagtgtgagacacagtacctggtgctcagtaagtatcattaagtgaagactgattgtcccatctgcttcctcacatctttgcctggtgatgagcaaatggaagctcagagagggcagtgactcaccagcatttcatgctgggatggaggcaggtttagagcttgaatctgagtccagcgcccacgctttctctcctgcaaggatgaaaggctacaggggttgagaaaaccctcccttctgccctgaaggcagagctgtggcacggctcaggcttgcttcctcatcccctgagtgtgaggctttgctgccaacacacaggggcttgtcccacctggggcaggaggaggcagagtctatggcactgcttctctgaatctgattgattcagccccacaatctcaggccctccagacaccaaaatgaacaagatccagccccagcttcaggggtgtctccacctgctgaaggtggtctctgctgaacttttctaggttctgaatcccacctcaccccaacccttctgcatcctagctcataggatgtacgaatgactcccgtgcctggactagtggctttacataggtaatggtggctcctcagagcacagagaggtgcagtggagtcccagagcccctgagccgagaatcaagcccagatctgcctggctctgaagcctgggctgcgccaagcctatcacatatcccagccctcaactgtccaagaacaagaccgcacccagttgggaggggtgaggaaaggaggctctagggaggccacagcacctgcactgggcctaagagggtgtcccaggagggatgagaaggagcagagcagccaagccagggtgcagaggcagggaagagtggggcgagagaagggtggaaggaaggttcagcccagtccgcaggccggagagtttggattttgatctgatggtagtagggagacacaaaaggtgtttgcgcagtgtgaggtcatctgtgcttggggagcctatgctggctgtgcactggggagtggaagggaggcaaggagcccagtcaagaggccattagaaggtccagaggtggctcatagttttgatagatttcatcctgctcaagtttgaggcagagtgaaagctattgggagggaaatacaccagaggacacggagggcccatgagtgctgaagaaggctgcagctgggttgggcgtcgatgacataaacctgagagagagcaggaggatgtgcagggccatgtgaagtagggtctgcatttgggggctctgtacatagtaggtactcagtaactgttcattggatgaatggatgaataactccttgtctctgggtcagctctggtcttaccctctcctgtttctcacacctcttctctttgcccaccctgtcctgtggccctggggagacctcagctggcccagtagaggcagtgctggcccatggttctgccggaggcgcctccatgtttgcgggtgcaccgcacgccttctccctctctgtccccctccccctccctgtccttatctttcccttctgtctccatggcgactcaccacctcggcttgcctgcatcccagcctctgccagggattctgagccgggctccatccctccctcctcggagccctgctacccgcagccgtgtctcctccccctggggtgagtccagcagcagcctcctctttcctgactgtcacatttcttttccagctctgaccgggagtcagctcctcggggataccatcccccgacctcaccttctacctaccgcagcctgctagcctttccgggagaaaaggcatccttacctctggttgaaggtctcggggcctccccctctgcatccggaccctctccccatcccagcctcccatgccaaggcccgccttgtcagtcacttccttttgtcatcggcttggcaaacgg

SEQ ID NO: 17505 - DNA, 2300 bp, Homo sapien
tgtgaaagatttcttttagtattttcatatatgttattaccaatataaaggactgatatgacttgttgaagaacttctatgtagcaactttattaaacccctttatcaattctattagcttttgttcatattttatttctttgggttgtgtggattttttttaagagatggggtctcactgtgttgcccaggctggtctcaaaactcctgggttccagtgatcctcccacctcggccttccaaagtgttgggattataggcatgagccactgtgcctggcccggtctgtcaatttctactgtgagtaatccctttgccttttctttcctaacattatacattacatttccatttcctgtcttattacatcagtcaggacttccagaaaattatcaaaaaacagcagtgatcagagatctagtgaatatcctcgggtatttgtctgttgacactctcagttcttttgggaaactgcgctactccatatgtacagtccttgtgggacgagaccagtcacagggcacctaaccctaaccctgtaggttcaaagctgggtgcatggtccagggccagccaaacatcagaccctattttcccacccagggcgattgttccagaggtgggcaagaaacctaagcagggccaaccagattttctcccagttttttgtttgttagtttggaaccagaagagaggaggggagggccttactttctggtttaacagacgggaaagataggaacgagggtatcagaggccaccactgtcacttgcacaggaagagaaaggctgccggcagaggaggaagagaaactacggaaagaatcccaaggggcgaggagaagggaggagagggacagagatgggaagagggacaacaagaatgatctggttttgttttttttttttttttgagtggagtctccctctgccaccaggctggagtgcagtggcgagatctcggctcactgcaacctctgcctcccgggttcaagcaattctcctgcctcagcctccctagtagctgggattatggcgcgcgccaccatgcacagctaattttcggtacagacggtgtttcaccatgttggccaggatggtctcgatctcttgaccttgtgatccgcccgcctaggcctcccaaagtgctgggattacaggcgtgagccaccgcgcctggcctaatgaccttgttttcaaatccctgaatccaaacttcctgattatgtgagccaaaaaatttgttttccattttctctacttacattggatcattacaacggaaggaattttgactattagagaaatcaatcttgtcctggtaactgacacttattaggtaacggctggtgccaggctgagggcaggtggcactgactccggtcctccgcccaggcaaccccagtcttcacagctggcgacgagtgttctttcacgtttgcagatgaggaagctgaggctctgggaggaaagcgcgctgctcctgcccttctgggccgcagcctctcgtactcccacagcaggcttgatggataaacttccaacacgaccagctggcacaaactgtgctacttggcaaatgggagcatgttgctctatcctggtagattctaagttctctaatggaacaactgatgagaggagaggagtatgcaacaccctaaccagcatcaaagggtgtacccaactcaatctgcacagcaaatgcgcccaaccccacacaccccgcggggtgctaaccgagtcacggctcgaggcctctgggtccttccacgccaggtcattcagaacctgaaacccccagcggaggtggagagccggggtgagtcctggcgtccgagacgtggaggacccagcccccggagcgcgttccgttagtttacagagctttttcaaactttgccttccaagtgcaggagttccttggtctttgcaagacccgcaggcgtccgcagtggtgcagagagaggtgcaaggggcgcgcccaaggtcgcaggctgcctggctgcgcgctcagtcgggcccccgggcgccaggcgcggggcgggctctgggcgggcggccggggcggggactgcagagcaggctgcactgcgcggtacccactgccggcctgcgcggtactcactgccggcctccgcggtacccactgccggcctccgcgctacccggccgcagcgcgcgagtcacatggaagctcctgaggagcccgcgccagtgcgcggaggcccggaggccacccttgaggtccgtgggtcgcgctgcttgcggctgtccgccttccgagaagagctgcgggc

SEQ ID NO: 17506 - DNA, 2300 bp, Homo sapien
ggagctggaggctgcagtgagccatgatcatggccactgcactccagcctgggtgacaagagtgacaccttgtctaaaaaaaaaaaaaaaaaaaaacccgaaagagtagaagcagggaaaccatcaggatgcccggcctgttttttctttttcatttttttcccctcagctgtggtaatttagccaattcaaagaccttgttctccataatttcaactttccttcagatttgaccaagtcaagtagagctggtcaaacccaatgggaaaaagaccaaaacaacaacagaaacaaacaaagaaacagttaagcaaaagaaatgatcgcacaatttgtattattgagcgctctaatggtaaggagaaattaagaccagctggttgttaatcttaactttagtcaccaaggagagtttccaagacaaaactccaattcaggtgcttacctaggaatagggtccaggctcaagactgctctttaccattttagaaggagaaaaaaaactcagactcaccttccctgctggaagccagatgaaattccagaaaggagttgcctcccctccatcgtcatggaggcaggaaaacgcaccttctttgttgggagtaagtaaaactgcagacaaagaggtgtacagcaaaataaactttagatctcaaccaaattttgggacatcagggattctctggagtggggtgctcccaggcctcagcaaattgtcctgtttgagcaataaaaatagcccaagctggtaccaagcactgatagatttgtcaaaggtcagggccacctccactgagtcacttcctttggctgccagcttgtaaaccaaaaccagctctcaatcaatttggaagtttattttgccaaggttaaggacatgcttgggagggaggtctgtgcctttatctaaagatgattttgagggcttcaatatttaaaagggaggagcgggctggaggggaaagagggagaacatggtcattactgaatccacacattgcacaaatagaaaaaggaacaggcaggggaatagtcaattatgtatttgcctcctgctgtgtaaatcagcacttcagtaagataaggtgaggacagagcagctacctgtggggacatttaaccttttatctgtagctatctgcttagggacatagagaaaggcagtttcttgcatgactcagctttttgcttaattttttccttttggcatagtgaattgagctcccacggtttttgttgttttgtacataagtggagagttcatttgggccagggccccgagttattttcttttcacaaatataccctttagagttcagaggaaaggctgggattagagccttctgtgagcactattcatgggattacatgagggagtggctgtgaaaagagggccccggactaagccctgggcacctgaacaagtgagaggtcaggaaggggagaaaaatccagcaaaggaaccccagaggacccggccagtgagctaaaaagaaaagtgcagaagagtgcagggaaatggtaaagaaaagaaagctttccacaagacaggaccgatcagctgagccaactgctgctgagtacagtgatgagagctgaagtctctcgcccgaaaggcaataaggcgggagggggaaacctgagggcagcgggttctctcttgggagcgggaacacggaaccatgggcagcgaggcaaatgcagcctggggagaagctctgagtaacggacgtgcgaggatgatgcttgtgcaagaaggaaatgaccgctgtcccggctccgcgggagacgaaccccggcttcccgccctcagggactagctctccagggaactgggacggtcagtgccggtcgaggcagctcctcgctgaaggaaggagcaggggacagggaagcggaatggggagcgctaggcctccaactacgtccatctggccatgtttgaagagccacaaaatggaggagggaacccctcagagcgtgccagagcggagactgctctccgtcgcagtcggggcgcttccggcagggcgcccactcccagccgagcgccctccgcctgctcctccaggattcctcttcgccctttctggggccgccccggggcgctctcagcaggatggccaacaccttccctccatccctacaccccgccgccccctggcccgtggccgcgctcggctcccgcactgctcactccaccccctacatcccagcccgctgccagagccggggagagggcgggggccgcgtgggcgaggccgtgaacagcggctgtcacgtgggccgcccaggcc

SEQ ID NO: 17507 - DNA, 2300 bp, Homo sapien
actttctttgggtttctttcttttctttttttttaagccaaatttagcagtgggagagttgcataccaacttgaataacagtaatattaataagttctgaataacccattaccatcagaccagcctctgggtctatttcttgtcttttagctttgtttatggtttctttgttagacagagttttgtttttaagttatagttgcagtcaaatttttcttcataactttgtgtattattaggtcagttctcctcaaattttaatgcactaacagtcacctggggatcttgttaaaatgcagattatggttcagtatgtcgggggtgggatctgagattccaagtttctaacaaggtccccagtgatatcatatgcctcttttggaagcacgctttgtgtagcaaagtttttattgttttgatttgtgtgtgtggtttttttgtttgtttgcttgttttgttttgcttttaagacggagtctcactgtgtctcccaggctggagtgcagtggtgcgatctcggctcactgcaacctccatctcttgggttcaagcgattctcttgcctcagcctcctcagtagctgggattacaggcgtgcgccaccacacccggctcatttttgtatttttagtagagatggagtttcaccatgttgaccaagctggtcctgaactcctggcctcaagtgatccgcctgcctgggcctcccaaagtgctgggattacaggtgtgagccacccccccggcctgtggtagcaaagttttaagtagtgttttagggtgtaagtatattcctgtatgtttgctgataatattgttactttttttttttttaaacggacagggtctccctttgttacccaggctgaagtgcagtgactcaatcataactcactgcagcctccaactcctaggctcaagcagtcctcctgccccaacctcccagatactaggactacaggcatgaggctatcatcttgtttttgtttttgtttttgttttttttcttgaggcggagtctcgctctttctcccaggccggactgcagtggtgctcttttggctcactgcaagctccacctcccgggttcacaccattctcctgcctcagcctcccaagtagctgggactacaggcgcccgccaccgtgcccggctaattttttgtatttttagtagagacggggtttcactgtgttagccaggatggtctccatctcctgaccttgtgatccgcccgcctcagcctcccaaagtgctgggattatagacgtgagccaccgtgcctggcctatcatcttgtttttactttttatctgcattacatgtgtagcaaggctttgctctgggtttgtgatttttcccttccccacaatcccctcaatcaaagattattttaataagtcgtaatagtggtagtactagtagcaactatgaaatttcttttagagtacttttggtggaaaggggctgtgatattaaataaacaagatggggtaattaagattccaaaaagtctgtgtcatttaatcatacttgaagaactaaatgtttgtgtgagtatgtgtgtatataggatgactcaagaaatacaataagttccctgtcctcaagagttttaaacttgactgggaaacagaacatacacagatgaaatgtgagtgatagttataaaccagtgtgttaaggatgaatattaagatgcaggtcaaaagcatgattgctgtaatatataaagtgtgttcagagcagacctttattgctcaaggaaatcttcctgaaagaggtaatatttaagcctggcttttaaagggtgtggattactaaagaaggatttactaatggtattcgactagtgttactactccctgaaataatctttgatttttttaaaagaaatatattagagaattagcaagcccttaccaggggcgtgaagggtgcaaaaggagtctgaatggcaaacagctagtctgataatgccagttgttgtcactacaggtgtacctggtgtgagtgttctgacattcagggccaagtgtatcatacttactctgcaagattaactgtgattctcttataacagagtgaattcaatgtgtacagtcaggaagtcattactgtccttggggaaattgattttatgcttgagaatcttcctgaatgggttactgctaaaccagttaagaagaacgtgctcaccatgctggatgaggcctatattcagccacagcctctgggagtggtgctgataatcggagcttggaattaccccttcgttctcaccattcagccactgata

SEQ ID NO: 17508 - DNA, 2300 bp, Homo sapien
tcgcccttgctcctccccagggtcaaacccactggggtctggggattgaaattctgagaggagtgtaggaggagagtgtcttcccgaagaaaatgtaggaatgcattggcttctatcacaaaaatcctgggaatgttcctgagaagggattttggagatgctcggcctaggactggccctcgggaagatgacccgacctttgtcctgtgcagctgagtgctgaacactggtcagctctggataaagcctgatgtcaccgagctgatggcggggcgtctgcactgaacaccttccagcttggtgggggcacgggaaccagctgtcctcattaaaagtgacctggagtgagatggattcttctgcctatacctccacgtgtgggctccctgaacacccccatcgccatgggctcccaagaagtattgcttctggctgcagggctcactgcaatgctgcgacaggaggtgacaggccaaggccagcaggtgactgctctccccagaggccctgtcagctggaagcagctggtttcacataacagagaccccaggcccaggtcccctggatgcaggaggatttgcggctgcccttttggaagaggtaggctgaccatgagaactggccaaaggtgagaaggacgtggagaaggtgttggaggagggaagtcagacatactagcaatagcctggcctgcagggctgtagctttcacctgtacttcctcctgtttggtgtcatcatcacaatcacgatggtgataaaatgtcttctttcctctaggcaggtggtaaaggtactatttggtgcacaggttggagagtgctgtgataagaaccatcagaacaagggcaggaatgtgacctcccaggtgatcctgggaggatccagtggagcgtttcagaattctgtgtcaaaaaagaaggctgcgtgttgactggggtggggctgtgcctgtgtttggggccgcccatgggtgtagcaaaccctttttttttttttgtatttgtcctgcctcctctccttcagggtctgctccttcctcctcgcggctctgggggctgcatctcggaatcctgccggccactcctccgctgcaggggtggacatgggaaccaagtggggcctttgggatgtcttcagccctcccacagccactggccagcctgcctgctgtcttcctgcccccctcgctcactcctccttctcctgggctgaaccacacccaaaagcttgatccaggactgggctaggtgaccggtgcaatccttagatgcctctcttggttcccactgccctgctggtcttgaggcaggttgaggggggagtcacaggccatccctgcaaggaaaagcagagagggcaatttgggaaggtgacagaggaccctgtgggacgtcgagtcacagccttgctgggcacagtgactggcgtgcatagtgagctgctttcccaagcactgccacccctggctctcagatatgctgctgaaaggggtgacgggcagtggggggcttgggactccgccgaggtgtcctagctcccatccctatccccaggcccaggcccaggcccctccagcatgaaaggctagggaccgcactgccatggggtttgccaggcccctgtctcttgggaagccacccctcccagggaaaagcagggctgagggctgttcaggctctgccaccacctgctctgtgacttcgggcaggccaccaattcttctgaaaaacgggagtcactgtgggcaccatcacgcccgggtacaggacgcccagtggctcagctgccccagccaggctgccctgtcctggcctcagcacacctcccacagccactgcaggcagccctggaccttctcctgctgaggccttactgccaatccctctgggagaccagacacaacaggcagcggtctgggtgactcccaggaacctgtcctccctagtggctgaggcagtaggcttggcagcagggactcagtgccctaggaggcagggctcatcccacaagttgccatggtagcccctcctcctgccccttactcatcagccaggctgtaccgacacgggctgcccaggcagggggtggctcgctggacaaagctggccgtgcaggcgctcaggcgtgcagggtagccagtgccccggccaggaatggacagcctccaggacacagtggccctggaccatgggggctgctgccctgccctcagcaggctggttcccagaggctttgggactgagatgtggactctctttgccctttctggacccctggtaaggaggaggagctgggggg

SEQ ID NO: 17509 - DNA, 2300 bp, Homo sapien
attcttgttcaggttggctcttgccccagtcttccaggaatttgcctctgggactgaaggtgtttgggctgagtcacctttccctgaatcaccctgagagtccagagtctcccttctcaaggctggcggctcagccctcttctgtatcacctggcaataatgatctcctctcccccttcctcccttcttccatctgctgacatgatcccagttcgtttctactgtttccatcagagaacgtggctgacacggcaactggcatcgggagaatgtcataggccatgtgccccaggaaataagggccttggaaacaagtgatcagctgagaagggaaagggtccagcatcgcccggacttgcttgtatattctaggggattggcagccctgttcctgagagtgagctgctgatccgtctgttgtgtgcagtatctgagaccacagaagatgcaggactgaagggtggcatgttgctcctgacagcattggaagctctggagagagggcagaggctgaagtctcggaggctccccccgccccagccacaggatggcgcacaggggccatgtgcagctccgctcaaagtatctcaggttccggggcagaatcctggaaaacccaactcggagctgagtctgcaggtggctgcagggcggtgctgctgagtctgcagttaccaccacaaaaggagggcctgaaggcattgccaggagactatggaggactcacggagctctgacacccctcacctggaggaggtggcttccccccaccccccactctgcctgcaccacctttgcctggggcggccaatgcatggcagtggagtcagtaatcgcccttgctcctccccagggtcaaacccactggggtctggggattgaaattctgagaggagtgtaggaggagagtgtcttcccgaagaaaatgtaggaatgcattggcttctatcacaaaaatcctgggaatgttcctgagaagggattttggagatgctcggcctaggactggccctcgggaagatgacccgacctttgtcctgtgcagctgagtgctgaacactggtcagctctggataaagcctgatgtcaccgagctgatggcggggcgtctgcactgaacaccttccagcttggtgggggcacgggaaccagctgtcctcattaaaagtgacctggagtgagatggattcttctgcctatacctccacgtgtgggctccctgaacacccccatcgccatgggctcccaagaagtattgcttctggctgcagggctcactgcaatgctgcgacaggaggtgacaggccaaggccagcaggtgactgctctccccagaggccctgtcagctggaagcagctggtttcacataacagagaccccaggcccaggtcccctggatgcaggaggatttgcggctgcccttttggaagaggtaggctgaccatgagaactggccaaaggtgagaaggacgtggagaaggtgttggaggagggaagtcagacatactagcaatagcctggcctgcagggctgtagctttcacctgtacttcctcctgtttggtgtcatcatcacaatcacgatggtgataaaatgtcttctttcctctaggcaggtggtaaaggtactatttggtgcacaggttggagagtgctgtgataagaaccatcagaacaagggcaggaatgtgacctcccaggtgatcctgggaggatccagtggagcgtttcagaattctgtgtcaaaaaagaaggctgcgtgttgactggggtggggctgtgcctgtgtttggggccgcccatgggtgtagcaaaccctttttttttttttgtatttgtcctgcctcctctccttcagggtctgctccttcctcctcgcggctctgggggctgcatctcggaatcctgccggccactcctccgctgcaggggtggacatgggaaccaagtggggcctttgggatgtcttcagccctcccacagccactggccagcctgcctgctgtcttcctgcccccctcgctcactcctccttctcctgggctgaaccacacccaaaagcttgatccaggactgggctaggtgaccggtgcaatccttagatgcctctcttggttcccactgccctgctggtcttgaggcaggttgaggggggagtcacaggccatccctgcaaggaaaagcagagagggcaatttgggaaggtgacagaggaccctgtgggacgtcgagtcacagccttgctgggcacagtgactggcgtgcatagtgagctgctttcccaagcactgccacccctg

SEQ ID NO: 17510 - DNA, 2300 bp, Homo sapien
gcggagaggggttagaggaaaggacattggtccacagcccttgtggtgcatgtctctgggagccaaagggcaaatgcaacacctttgggcccagtgaggtgtaaccaagtgagaaaaggttaacagaggccctggacccagactgtacttggcaggactccaggaaattagtcacgtgaaggcagggcccaaggacctggcccttgcccccagcaggctccgagcctgcaggagctgagccctcaagtgagggggacttcctggcatgcccacatgcctcttggctctgcctcagcgaggctgctggggctgggggagcagctccccctgggtcaagcttcctcttgctggctgggagcctccctaatcccagggtgtgtgctgggggcttgccaggactctccactcccttgcctctccccgtgcctcctgccattcctaggattttgtagctttgggtcctccttccccaaagaggtcctcgatatgcgtgagtcctctcatcactgacctcaggggtctttatctgcttgcccttgctcggggccaagtgtggacagcgggtggcacaagagagagcagaagagagaatggagagggaggaatagaaaggaggaagaggagagtgctggttaaaggcatggcctctcggccactcccacctagaagtggaggctgttccctctcctgtgaaatttgggcgagtccatgattagctgtggtcaacaggatgaggcagaggggcatggggacctcccaggctggctcttgacctgtatgcagcttccacttgcaccatcgaatgtcctgtcttctgttccagctccatgctgagatgcccgtggtgcacggggaggtcactccatgctgagatgcccgtggtgcgtggggaggtcactccatgctgagatgcccgtggtgcacggggaggtcgctccatgctgagatacccgtggtgcatggggaggtcactctatgctgagatgcccgtggtgcgtggggaggtcactctatactgagatgcctgtggtgcgcggggagatcgctccatgctgagatgcccatggtgcgtggggaggtcactctatgctgagatgtccatggtgcgttgggaggtcgctccatgctgagatgcctgtggtgcacggggaggtcactttatgctgagatgcccgtggtgcatgaggaggtcctatgaggggaggtggagatgctccgactgacagtctcagctgatagcaggcacccaccgcggcctggacatgagcctggaagactggccagcctgggccagtccccggtgactgcagacacagctagactaggggaggcagaaggaccacccaactcgccgcacagactcatgacacagatgataatggttttaagacaccaattttgggggggctggtaatagataaatgaggcagggtgtgtagccatgttttcactttcatagcatcccatcctctggggggccccctgccccacttcaggtagctcacagcttccctccttcccaccctttccacctccattcttgttcaggttggctcttgccccagtcttccaggaatttgcctctgggactgaaggtgtttgggctgagtcacctttccctgaatcaccctgagagtccagagtctcccttctcaaggctggcggctcagccctcttctgtatcacctggcaataatgatctcctctcccccttcctcccttcttccatctgctgacatgatcccagttcgtttctactgtttccatcagagaacgtggctgacacggcaactggcatcgggagaatgtcataggccatgtgccccaggaaataagggccttggaaacaagtgatcagctgagaagggaaagggtccagcatcgcccggacttgcttgtatattctaggggattggcagccctgttcctgagagtgagctgctgatccgtctgttgtgtgcagtatctgagaccacagaagatgcaggactgaagggtggcatgttgctcctgacagcattggaagctctggagagagggcagaggctgaagtctcggaggctccccccgccccagccacaggatggcgcacaggggccatgtgcagctccgctcaaagtatctcaggttccggggcagaatcctggaaaacccaactcggagctgagtctgcaggtggctgcagggcggtgctgctgagtctgcagttaccaccacaaaaggagggcctgaaggcattgccaggagactatggaggactcacggagctctgacacccctcacctggaggaggtggcttc

SEQ ID NO: 17511 - DNA, 2300 bp, Homo sapien
caaaaagtcaaacattgcataagaggaaaacagatcatcaataattccacccccatcagttgtctcatcgtgtcgggggctaccgttctagtcctttcttgcatgttagagcgtgcacgcccacacacacacgcacacgcgcgcacacacacgcacatgcacacacacgcacgcacacacacacgcacatgcacacacacgcacacacacacatgcacacacacgcacacgcacacacacacacgcacacacacacatgcacacgcctggtacatctgttgttctgtaacttgttttctgtttttctttctttctttctttctttttctttttttagatggagtctcgctgaaagtaattatattacttacccgaggccttcaaataccgcttccactgacagcctcttgacttctagcaaatctcactaaccttgccttacctcctaccactaatctaataggagaactctgtgattatggctccattctcccggtcaaagtgctggagtgcaatggcccaatctcggcccactgcaacctcctcctctcagcttggttcaagcaattctcctgcctcagcctcccaagtagctgggactacaggtgcctgccaccactcccagataatttttgtatttttagtagagacagggtttcaccatgttggccaggctggttttgaacttctgacctcaggtgacccgcccacctcagcctcccaaagtgtttgctaggattataggcgtgagccaccgcgcccggcctgtaacctgttttctttcttatccccagtgcctgagacacccctggtgcagagagagcccctacaaacatgctgaatagcctgctccacctaatccctaaatactgcacagtaaacccttacgtgggtgtgacaggagtcatttaaactgtctcctttctttcggatctttgggatgtttacaatacttccctgttatagaaaacagtgatgactttcttattcgtgaatgtttaggaaaggctgtaggaccttttcgtcacagagaagtatgtttgaaaaacttttgccacatattgccaaattgcccccagcagggccatcccgatttgccactatactttcgtgtattggtagcaggaatcgcctccacacctctttgtggaaatctgcagctctctgaatccttggcgggcatgggcgtgcgtctcccaggtgtggcacgcgtggtttacacaccaagcctggttcagctctgccaagaaaccagcgctttttagaacaatggcttagccaggagggtggtgctgggtttttctttatcggcttgggtgtggaatcgcggactgcgcccctccaatctgatctggagagtggctgactgcgtgtgcagagctctgggggtgttggtctgggattgtgccatcagctttgcaagcaagtaagggagcggaaaaggccgggaaaggccctgccgcgagcacgctgccaagagcccccagcagcagttcggcttaggactcgggttgcggcgggtgtcaccttctcaggggctagcaaggcagccagggcccaggcgtctgagtgaggggcgggagaggaggcgaggcagaaagtggaccttccagcggaaaggccattttccccaaggccgagcccagggaagtcccttcctatagaattcaggcagggtgggaggcagggcgcgctcgtgcccctcagccagctgcaggtgctctctgtccccaggcgccatgagcaagatcagcgaggccgtgaagcgcgcccgcgccgccttcagctcgggcaggacccgtccgctgcagttccggatccagcagctggaggcgctgcagcgcctgatccaggagcaggagcaggagctggtgggcgcgctggccgcagacctgcacaaggtgctcaggctgggcggccgccttctgccagtgtcggggccatgcgatggggcgtggggggaggggctggggagagtgcgacccagagaggttcaggaaggacttggggccacctggcccctcggtcgcggagactgggcgcaccgccctcccctccgccgcgccccgcgcgcccccgccgcctcttccgccctctggccttttcctcctggcccggcctccgcgtcccgcccgcagcgtcccccatttcaacttcctgctgccccgacaccctgaacttctggtcctccccattcctcagccccacgcaggaccacttggttctccacaccaggaaccagagcagcttggcaccccggagggcatggggggctctcccctccctcccagttctcacag

SEQ ID NO: 17512 - DNA, 2300 bp, Homo sapien
aaaaaagaaaaaagaaaatctgaaaagcaagtatctgcaagtttctagcacaacccacactcccacacttttgccactactgaaactataaccaaaacccaaacacgcaaacaaggattttgttcttcgtagatttgaactgcttttaggctccttgctctgacgcttccaccactactgctgccacttttgatgacacccacaccacctaacctttccaggatgccctcggcccgccaggcactgttctggtcacttcgtgtactcaatgctgtgttgctggcttttgctagttgcttccatggttctcccaggggagggccgctgccacaagaagtcagctccgaatggccttcggccttgcattctgccctctactcaagatccaaattcccaggagagtcagggaggcctcatggggagcccaccccaacccatggctggcctggagaaggcacctggttgatcatctcaccaagtaggaaggggttgcctgcaaagataatcagctgctgccaccagaaaaggggagaggctggcacaggctcggtcttctcccctctcaggaggcaccccactttgcacctaccacccagtccagcccctgcacaggtgcgaggtcctgcagatgcttctttctgctgtttctggaatgtttcccattctgttagtcttatttgggggtctcgtcatttcttgcctgcattgctggaagctgcagcctttgggctagacctttctcacactgtgccctgtccagggggttctctaaaacaaaaaatagcagacatttgtctgtctgataatctcctcagcgccctgcacccccacagccagcctggcccacaggcctccgtgagcccccgccccaggagagtcattcacctccacacctcctgctggcaacagtggacacatcgcactttttcgtgacataacgttcccagcctctgtgcctttgcttctgctcttccagcccccttgctgttccttgcccaaatgcttctcactcagctcagatgatgttccctcccacggactctcaccccagcccctctagcatcctctgcctacctggttactacagtgttcacattattttgaaatttcctgtttattttgtcagtcaataaatatttattgagcatctactataaatgctgtatggaggttacagcagtgaacaaatcaaattctagctgtcaggagttaagggacaggtagcaaacaagatataaacgctccagagaaaaaataatggaggaagacgacagcattgtgctattttccacagcacattggagcgtagccgtgtgggtggatgtaggggaagggggctccaggtggagagaagcaggagggccagagcacatcctcaggactcgtaggccaggaccggaaccttgtgttttcctcgaatgaaatgggaagcagggaccccatgctggtaagcagtctgcctgcaggcgggtgagggtggcgggaagcgcctggtgagaggggccgagagtctgttccacacctgcctcctccccacagcgtggtgcagagcaggagcccagcgaacattgatcagacagcgtgggaacggcttttccagactccttccttcccaagcatctctggttttcggtgaccacacagacccttggccctcttctcagctattcaacgagagagcagatttatggattggagacccccatcaaaagtccccagcctgtggctccccagggttaggatctctgactcaatggggccctgtgcacactgggggatgtgaagggcccggggcagcggtggctgggggtgcgtttcgggggagctgcatgctctcactgtggttcgtggctgagccctgccgatcttatgtaaccagagaactcagagaaccgcatctggcagcggcaagtctggaaagctggaagagctccatgccaggctgaatcaatcagcagcccccacgcccagggcaaacataggctcttttgaagattggagatgtgccctgcccaagccttcagaaacattctcgcatttcagaagtgaacaaaagcaaacagcccgggacctaatccccaaaacctgggctgtagggagcagaggtccagaggacgccacaccccacatttgaatatttttttttcttgtcacgcaaacttcctgggcaggaactccaagggctcaatggacgggaagcagggtccttaaatacgtcccctcttggctcttgccgttccaggagccccagttaccgggagaggctgtgtcaaaggtaatcctcttccctgcattcctta

SEQ ID NO: 17513 - DNA, 2300 bp, Homo sapien
gcgggagcgggtagcgcgcgcgagggcgttgggcgccgccgcgaggcggggaagcgcggggccgcggcggtgcgggttctagggcggcggccgtcgccgtcgcagcagcgccccgagcggggagggccgaggaggcccgacgagctggggatggagagtaccgggcccctcactgcctcagagcgcgtgtgcggctctgggcgcgcacagtgacggtgacggcacccctggcccggcagcgccgaggccgcttcgccagacagccagcggccggcggcaggccgggccatgagcggcaggggccgggccgggcctcgctgaccctggctccgcgcggcagcttccccagtttccgctccggtctctcggcatgagagtccgcccgggcccggggctgcggctgccccagacccgccgcacgctggcgcgctccgggcccgcggagccgcggtgctgatacctgcgccgcactgcgccgcccgcccgtccgctgtgtgccccgggggcgcggccatggaggtggtgggtgacttcgagtacagcaagagggatctcgtgggacacggggccttcgccgtggtcttccgggggcggcaccgccaggtgagcgccggccggggcgaggccgggccccgggcggcaggcacggggctaggtggttctgaaacttggcgcagccgcgagccgagacccccgactcggctagccgcccgggtatgctattgtgcgcgcagcccgtctcgccgtttgttttggtcctgtgagggttgttgtgaggcccaagcctctggcagcgctccgcctaccgaccggctgctgctgatcctcctgtgtgcccggggcccaccccgcggtccgcccgcaggagcgtttgcacccaggttaccctggacccaaaatagacggtactgcaccgtgcagactcgagggttgggcgtgaatggacctttggtttttttccccgtgcccagggctggtcacttttgaggttgataattacagacccagcggaaaatgggcggatgtcccattagcctcaggctttcgcagcctgggaggtgtcacctttcccagcactggtcccctgcaccccgaagagcccccgtaccgttttcccccccggagtcagatagacgagctccgggtgagaaaggtggttggacaattcattttcaatcaccttgaacatgaaatcacctttaagccttaaaaaaattgttttaagcctttgctgtttcgcaagtacagttacacgaggttttagaatctaaagaatttggaaaggcatatcgggagtggaaataatcttaaagggtgtggcagttctgattgttgcccaaggggcgtgttaaaagtgggctgactttgttgcttatcggatgaagtaatgctacttttcttatttatttatttatttatttttgagacagagtctcgctttgtcgccgaggctggagtgccgtggcgagatctccgctcactgcaaccgctgcctcccgggctcaagcgattctcctgcctcagcctcctgagtagctgggattacaggtgcccgccaccacgcccgcctaatttttttttttttgtatttttagtagagatggggtttcaccacgttggccagtgtggtcttgaactcctgacctcaggtgatccgatctgcccgcctcagcctcccaaagtgctgggattacaggtgtgagccacggctcccggcctacttttcatttattaggaaaataatttagaactcaagcacggtgtaatccttccaagctaacaaataacttttcaattaactgtatcaccttccaagtttatttctacatttgtccataactttgaagtggttgtgaactgttcttttttcatttaatgttagttaccatgtggacttcatatttgttatttttagaagttgtgttgtaggatcttggcatattgcactataatttatgaaatcactttccaattattgaaaataattccatttttccccaatgccgtacatttatttgccaaaaacaccttcgcgcttgtaaatttttttctgttatttatgtggaatggtatctaggagtaacactgtttttccttttcagaaaactgattgggaggtagctattaaaagtattaataaaaagaacttgtcaaaatcacaaatactgcttggaaaggaaattaaaatcttaaaggtatgttactttatgtagtagtattcatataaggttaaaacttaatttaaatgaatacatgctgccatccttttcaattttggtagttgggtccaagtttgagaa

SEQ ID NO: 17514 - DNA, 2300 bp, Homo sapien
acgaagggcctattggaggtttctgaaaaataccttcatgtggccgggcgcagtggctcacgcctgtaatcccagcactttggtaggccgaggtgggcggatcacgaggtcaggagatggagactgtcctggctaacacggtgaaaccccgtctctactaaaaacatacaaaaaattaaccgggcgtggtggcgggtgcctgtagtcccagttactccggaggctgaggcaggagaatggcgtgaacccgggaggcagagcttgcagtgagctgagatcgtgccactgcactccagtctgggcgacagagcaagactccgtctcaaaacaaacaaacaaacaaacaaaaaaccttcatgtggctaggtgaggtggctcacacctataatcccagcactttgggaggccgaagtgggcggatcgcttgaagttgggagttttgagaccagcctagccaacatggtgaaaccccacctctactaaaaaaaaaaaaattagccgggcatggtggtgcaggtctgcaatcccagatacttgggaggctgaggcaggagaatcacttgaacccaggaggcggaggctgcagtgggccgagatcatgccattgcactccagcctgggcaacagagcaagactctgtctcaaaacaaaaaacaggccgggcgtggtggctcacgcctgtaatcccagcactttgagaggccgagacaggctgatcccttgaagttgggagtttgagaccagcctggccaacatggtgaaaccccatctctactaagatacaaaaattagctgggcgtggtggtgcgtgcctgtaattctagctgcttgggaggctcaggcagcagaatcacttgcacttgggaggcagaggttgcagtgaaccaagattgtgctaccgcactccagcctgggtgacagagtaagattctgtctcaaaaaaaaaaaaaaaaaaaaaagtaaacaaaaaaatagactgtagagaatctttcagtgaggtaaggaatcatctccatccatttttgggtgtatgtgcaaacttgcttaagttgctgtcaacttttgaaggctccagattttcagtgtctaacacaaccacctgggccagatgtaagtaaggacaggataacgtaagcgtgcacagtagcagaagcagaaactcaaggccctacgttttgagcgtgtgaggaaggagcgttctctcagaatcctggagctgactctgtcatggttcagagatcagcttgcagggacaggcagtggcagtcgaggtggtgacagaccccaaaagcacataccctatacaaccgaacacacactcaagtgtggagcctgcgtattccatggtagtttcaagcatattgtttattaaatggtttcataagacacttctttgcgggaaacctgacaatctgttccttgtcacttggacagctttaacaatcaggtagaaaagaaagctcccttcggccatgtgaagtaagcccgaggtcaaactagcctgacactaggagctcccaggagaaccttgaaaacgtgtgcgattctgagtcggtgtgcagaaacgattctctgcgaagagggccctgagctgtcaccagcttctcgcagtcaagggacccccaaaaggtgcagaatcccgcctgtcaccgtccctctagggatcctaagcgagtaaaccccgagaggcgtccgaaggctggcagtttggcagcgtgaactctggttttccagagcgcgggcaaagcctggagtagcagttgctcctttgctctggcaggaatctgggggtctaccctgcgcagataatcccgtcctgcctgcagctggggttcaagacccgcttctctgaagtccgcctcccagcggcctggagcccggggcgtggtcggctcgaatctgctccccaggcccagaacggagcccgcagcccgtaacccgctgtggccgcagcgggtcgcgcccttcgtccccgcctcaggagcggccgaggatctgcccagctgcgggcgccaagccctggccgcactcctttccccggcggagggagccggctggcgctgcggccttcaaggcgcgcggacgtcgcggagggcagccagtcgcgcgggagcgggtagcgcgcgcgagggcgttgggcgccgccgcgaggcggggaagcgcggggccgcggcggtgcgggttctagggcggcggccgtcgccgtcgcagcagcgccccgagcggggagggccgaggaggcccgacgagctggggatggagagtaccgggcccctcactgcctcagagcgcgtgtgcgg

SEQ ID NO: 17515 - DNA, 2300 bp, Homo sapien
gttttccagataccaggactgactccaaggactattactcatctggagggtttagcacagtaccgtcgcatagtaaatttccatgtcagttttggttacctttcatgcacttgcaaacatgccatgctctgaaacgaaataggcacatcttttttttttttttttttaaggagtcttcctctcgcccaggctggagtgcagtggcgcgatcttggctcactgcaacctccacctcccgtgttcgagattctcctgcctcagcctcctgattagctgggactacaggcatgccacgacgcccagttaatttttgtatttttagtagagacggggtttcgccatcttggccaggctggtctaactcctgacctcaggtgatctgactgcctcagcctctcaaagtgttgggattacaggcataagccactgcatctggccagaaatgaaataagtaaatcttttaacctgctctaacaatatagtgaaaagaccatattattattagagcaggttaagggatttgcctatttcgggttctagttatagtcttaaacttggacattcttgtagaaagtaaaaagtttcctcttcaaagttccccttcttgttaaagaatacatcataagtgttagaagtaatagtttattttaaagactaactttcttcaagcctccttgctttgtgctaataactctttgttaagccctatcctatgtaactgttggacatgctcacaggcacgttccagttcacagcctatgccccttccttatttggaaatgttattgcttccttaaacctttcggtaagcaacttcctctccttcttcgttcttccttgcacttacctatttagaaagttttaggctattagcaaatcggctatcagtttaagagtgtgaggtcccgctccagccaatggatgcaggacatagcagtgaggacgacccaaatgcgtaagggataaatatgtttgcttttcctttgttcaggtgtgctctcgacatcgttccatctgcgattgagcaccctttctgcagaaagtaaagattgccttgctggagatcttttgtctccgtgctgacttttcttcgtggcaccgattatctatttctaacaattttggtatttctaacattctgaacaatcttgggctagttgtctcttctgggcctgtttccccatccgtcacatgataaacttcattggtttaaaaaccccagcgaacatttattgagttactattaccttcctgccctccccaaccccaaccccagggagcagttacaacctcagccgctgagcgcactcgccgggtgttaagaagcaccaaagacagggaggcttgattgattttgctttgggagtagagggtcagaagattcacaggaaaatggcatttgagcaaggatgattcactggagctagcttttaaatactggcgaggcttttatgttgcagtcccttacaaagttgagcattcgcagggactgcactccgaaataagcccgcttccccttttcattcgctaatgatccagggagctgctggttccgcatgcggcaggttgtgccttttcctaatcagggttctgcatcgcctcgaacccgcaggccgtggcgggttctcctgaggaagcagggactggggtgcagggtgaagctgctcgtgccggccagcgcctgtgagcaaaactcaaacggaggagcaggaggggtcgagctggagcgtggcagggttgaccctgccttttagaagggcacaatttgaagggtacccaggggccggaagccggggacctaaggcccgccccgttccagctgctgggagggctcccgccccagggagttagttttgcagagactgggtctgcagcgctccaccgggggccggcgacagacgccacaaaacagctgcaggaacggtggctcgctccaggcacccagggcccgggaaagaggcgcgggtagcacgcgcgggtcacgtgggcgatgcgggcgtgcgcccctgcacccgcgggagggggatggggaaaaggggcggggccggcgcttgacctcccgtgaagcctagcgcggggaaggaccggaactccgggcgggcggcttgttgataatatggcggctggagctgcctgggcatcccgaggaggcggtggggcccactcccggaagaagggtcccttttcgcgctagtgcagcggcccctctggacccggaagtccgggccggttgctgaatgaggggagccgggccctccccgcgccagtccccccgcaccctccgtcccgacccgggcccc

SEQ ID NO: 17516 - DNA, 2300 bp, Homo sapien
taacatggtactatttataaagcaggacttcagagaaataaggagaaataaaaacacaatagtaacaaaagattctaatttaccttcttccgattacgttagatcaaaatacgtctaaaaaataaaggagaaaaaatattttaaaaagaagaagaaaaaagctccagtataaccaaaaacataaacctaagagctgattctttgaaaaaaaaatacacttttaaaagttaacaaaataaagaagcaaaaatacacaaaataagatatttgggagaagttaaaagattcacaaaagactactttcctcaactttatgcaaatacacttgaacatctggaaaaaaaggataatttgttttaagaaatacatgctttatcaaaattaactctagaataatttttaaaatgtaaataataaaattgccacagaagaaacttttctagccttaaaagatttaccctccccaaagaaagcatcaggctgggaggaacatttttaactgggaaatgatcaaacctcaaagaatagataattttaatgctccttaaattgttcagagtaaaaggaaaaagcaaacatgcccatttttttttctttttttttttttgtagagatgggggggtctcactgtgtttcctagactggtctcgaacttctggcctcaagcactcctcctgcctcggttccaaattttttatgatgtgagcataacattgattctgaaaccaaacaacattagacattcaaaaagaaaattattgcccatctcatttttgcatatcaatgcaaagcctgtaaataaaatattagcaaacagaatcaagcagtatatttaaaaaaaaaagacaagtttattgcagggataaactgggtttttattaggaatttattataactaggactcattacttcaatatgaggaaatcagctgtcacccggtttgctcgtccttacagacatctccctcctcttcctctcttcctttccagtgaaaatgtcttcaagtttcctctaccaaaccaaaacttcaccccacttcttttattctttcctcctctcttctcagaacaaaggggttgttgctgaccagcccagggtttcttatttggggccggatcattcttccttgtggggcagtcctgtccttcaggtaggatgttgaggagcaccctcgtgtctacccacttaggcaacagtagcaactcccgcatcatgacaaccaaaaatgtctccagacctccccaaatgtacgcggggcggcgaggaggggcaacaccggccctggtcgagaaccgctagcctaggctcgcccctctacctgggcgccacaacttgccagggttggttattctccctggatcctttccttcctcctcatttgagcttcacgccctcaagtatgaccaaaggttctgtcattccactcctgcagttttcattaaggtcttaggccacttccatgtcaagaaacacagtggctctttctaacccctggccatgaggcacccctggaggaggagccgtgagggtagggaagatgctgagggggatgttgaccttgccgacttccaggcgcctccgctgcatcccggaggaggcgttgggcggtgagggtgcagcgggggggcgggccccgcaggatgaggtgtccgtgtgcggctagcgccacaggcaagaccgggctccttgcggggcggaggtgaggccgtgagcatagctctcaaactggagggcgcctcagaatcacttgacgggcttgcgagaatgtggactgctgggccccaccttcatggttttagtgcaggaaaaaccgaataggctgggtgggacggagaatctgcattttctcaagttcccagatgaggctgaagctgctggtccgggcaccacccttagaaaacctccagtgtagagtgcggaaatggggtccacatctggcttgggacgcccaaacatcgattatgtgcgaccagaggatgagcagatagggagatgagacactgagagctgggagagagggggcccccggccgccggctgaaggaggacggcgcaggcggcggtccgggtactacatctcccagcgagccccgcgcggctcgcgctcgccccctggcggcgatggctggaggcgccggcggagcgcgggtccctctcctgagcatcagtgagcgcccggagccgtggccgctgggggttgcggcggcgctgagccagcggggccggtgagtactagccgcgccgccagcccgcccgccggccggctctttgcgcctcagccgcgtggtctgaagggatggg

SEQ ID NO: 17517 - DNA, 2300 bp, Homo sapien
ggcctgctgataagcctgggtccagggtgctgtggacacactgtggtgtggaagcaggtctgtgcccagacaaggggctgtgaactgaggtttaccagacagtagagggtaagtgaaaagcaggagttcaggctgggaagcctgttctgggcttagagtggccttgggcaggcctggaggctggatgatagaactcagcatccctgcagctgctggtcatttgctgtgcctggggtcaaagtgcaagacagctggcaggagtgggcagaagggagcaggggcctgagcacttggtgtgccttatcctccaacaaagaggaggtggaggtggcttcatggcatggctcaggctgtgctctttgagggtcgggggtaactgtccctctttattttgaaagtcagatgtgtctgtgtcataaagggcacatccatagggggcagcggaagtgctgttacataaccgtttctgtccctcacgctggaaacagatcgcacagcagttgctgtacttgctgttccttgtagacttactcctgtgcaaggaacgtgtaatgacaaggtaatcccaggagcagcctgcaaaattatccgtcgtatttgtggttcctgtgtatatttaaaacacaatgctagaagcgattgatgctgacgaaggatagggcatattccaggcactgaataaattaaccctgcaaagcacagcagttgctttcattagccagctggcactgcaggaatattgctaaagcctgtgggttagaaaagaaaatctcaggaatgcgagaacaaaaaagaaatcagccacattcagtgatttaacttaatctggcaacaataaggaaatccagaactcacggtgctctgagcaatggcggactcccgctgcatgtgcgagtggatggatattccctgttcagtggaggggatatccaccacgactctgggtacccacggcgggatgcagatgtgagttagggccatgcggcgatgatccaggttttgttcctgcatcctctgcaactagagaagctccagcaaagttctgtgttcccctcttttcttcctgatgtccccaaggagtgaagcaaatgaataggcctagctaatgtgccatctctctctcccttctctacctggccaggcactttctgggatggctgctgccatcatgtccatgacactgaaggcctctgctgcctgcagtcccactgctgcctccgccaccctgggcaccactgctgccttgttgccctgtggctgtgaggtgccatagtgccaagtcttcagcacgccccagaagccatgatgagtatggtggaggcctcagaattttcctggggaagtagctctttccatgttgccttgatggccctgttcccacctcctgtctctccccctaggccaagtgttatcccaggagacccttcacttccacagacagacagacagactgccagggaccctcctcagccagcctcttcacatgccgaggccacagcactcagtgtggttgggtccagttgagaccctgctgctcatgacttaaggcttctgtgcattgaattaagccactaggggacttatgagatcaccctctggcttctcttgttgggtcccatacagccagtatgtgtcaccaggggcatgtggcatgtgtagcctgcctctcctgagtttgcagagctgggctggctcctccttgattttatcttcctctggaccagagtggctgaagtatagtgagcagagggaggggcagtggacgtggtgaggggccagacctctccatccatgggtgggggctctcgttatggagggtcccttttttgcgtctgtgctcagcagtgcgggggaagagggtttgtccccttcctcccaggtcctcatcgttcaaatgcacggaagcatgttggtagagcacacagaggttttgctgggtgggtggggcagcatgccctgcagttcttgcattgtttccagaggaaatagaatagaatgcaacagaactggcctgcctgttgcctgggaagctgttctcctgacatcacagggctgtgcccatatccccgcttggcttaggggcccctaagttaggaacaaagaagcagaaaaggttggataaaagataaggtactcagacttgatactttaaattatcaagttcctaagtctatggttaccatcagttcatactttacaaagcatttattaacataaattcatttattatgtttctgtgaagatgcctggttaaatctgaaaccatagaaatgtaaagtattgtttactatttctgtgaa

SEQ ID NO: 17518 - DNA, 2300 bp, Homo sapien
gttttatagattacagaaataaaactgtgactcttgtctttgacacgctagttttgtggcagaaaccaactcatggtactatactaccactaaaaagaagtaatgtgtatttaagggctaatttgtgtctgctgcctgcagcctatacattggttcattcatttgttttcattcatttgttccgagtctctgtgtttataaagtttacactctagtggaggaacaataattagtaaacatgtagtatatggaatggtgatcagtgtcacagaggccagcaaagtaggagagggtgtgtgctgagggtctggcttactatttaatgtggtgcgatgagagaagcccccttagtagggtgacatttgagcaaaggcccagggagtgagagagggtgagacataaggtctatgcagtgtaggtgtcgggaggaagaatgttgcaggcagagggaacaccaagtgcaaaggccctgagatgggaacatgccccgcttatttgaggaacagtgaggaggccggtgtagcaacagcaatgtgagaaggggaaggtgagttcactgatgggggaagaggaggattattcagggccttggaggccattgtaagggctttgactttccctccaagtgagacagaaagacactggagcgttgcaagtgggggtgtgacatgatttgacctaggctttagaagcatcactctcactgtatgtgcagaatggactataaagaggcaagggcaggagaagtgagactggttaggaggcagttgcagtaatcctggcaggagatgacagcggcttggatcgggggtagcagtggaggaggtgagaagtgctgagatgtagggctatttatgatacacatactgacaggcgttgttgagggacgagatgtggcatgtgaaaggagtcgaggtttctggcctgagtcactggaagaacggaactgccacttatggagatggagaggactattaaaaaacctaagtggaggtgtcaagagaaggtgtcaagaaggtagttggacaaatgagtctggagttagaagagggaaccagcctggagatatgtagatggtatttgaaagccacaagttggtaaatcaaagaccaagagagtatataggaaagaggtctgttggctgagctttagtgcccagggtgggtcaagatgaggaggaaccaacaaaggggactgggaagaggcttctaggggagtgagcagaaaactaggagagggtagcatcctggaaccaagtgaacacactgtttggaggcgttaggagtaatcagtggtgtcctacgatgttgatgcgtgacacctgagaatggaccgtagtgttcaagtgatgcacgagatagaaccagtcataccactaatggtttttttagtcctaaatatttttactgcaagatttcgttgttctaagtgttttcactgtcagatgaaggatgaaagtcgttcagggtaatttccattttagtaatttccgacagcggcagaacagtttctacttacgattggtatgcatttttattattagccatagtattcattttgggtgagtacgtctttgttagcgttatttttcttcaccacctcctcgagttgttcatccattcattcattcacccaaagaaatgcttattaagcgcctgtcctgcgctagtcctaggtttctcttgtcctgataggtctagcttcacacgagcaggattttgcctttccggcggcactaggcttccgcctcaccgcagtggggtttttccagcctaccttgtgcagctgcggttctcagcatccgcgggcggaggcctgcagccggtcagccggtgcgtcccgcccacggcgcggggccttctggcagccaagaaggaaatacagatgaggtgggcggacagtatgcagatgacgggggcgggccgcgcctggcgggcggtgtgcagttgaggtggtccggcaggatgcagatgaagggggcgggccgcgagggcgggcttgatgcagatgagggggcggggcccacgggcgcgggagagcagcggctccgccggcagctgctgggaactggaaggcgcccggtcctttctttgactggagcggacccgccggacgcaaccgcctcgccagccggagccagcgcgagctcggcacggtggacacccggtccgaggccggcaagccggctggtgcccgagtcggccaagcatgggcaaccactcaggacggcccgaggatccggaaccaggtctgtgcggctggcgggggtcgcgccgcagccgcaaccccaccccccctcc

SEQ ID NO: 17519 - DNA, 2300 bp, Homo sapien
aaaaaccatagttttctatatattaatttgacagttcagcctttattaggtcaaagtttcaaaagagctcagctgttagatgtttagtaatgaatgccatcagcctttatgtcatcaggattcaggatgtttaggtgtgtgtttgctcagggctcagaaatagtcttggtggtgggtttacagctgcccatcttgttaggtgtggaacctgccttagcgctggggctgctgccagtctatgggaacattccctcccgtgcccttcctacactgtagaggcctacaggttgatgaccacttctgggacccttcattacacctctcactgaaagcatgtagagttgtgtaagtgacagcagccagccttgactcatcaaatagtctttcagtttgtaaaaaaaaaaaaaaaaaagtccaggattttattttacactgtaacatctgaggtgggtttcaattctagagcacaatggagactgatgtctgggtttcacccctagaattgtttttacattgtctgtgatatagtacagatgaaaataaaagagaattatttacaccttacatttgctgttacaagtattctgtattatgtctatatcatgtcaagtaacataggtatgttcttatttcatttattcttgtttctccatgtacacaaatgagtacatcatttccacttacggcaaaagtgatatgtcattgtatcagatccatctctcagtattatctgtatcttctgatttcttaatcaaatttatgctgtcaaaatatgttaatgatgttttttaaagtgtttattgagaaattcacaaagaacttgtattttgtcaaaaggccattgtttttgttgccaacattatcagtgcagatgtactaaattgcaagttacagaaaacccagctcaaggtgacttataggaagggtatttactggcttgcctaactgaaaggccagctataggccaaacttcagggttgatttgatttagcaacttaacaatgctattgagagtttagtttccttcttccttctctgccatctgcattcccaccttcctcttgaaagggcagggtggttgccagccattcccacacctacacattttctcactctggtcccgtggtgtttaatagcttgcccagaaaaccttccctttgtcacattgatcttaattgagttgtgtgcccatgcgtgaaccagcaactggctggggatggggtcatcctgagtagctcaggcttggagtcagcctcacccaaagtatagggctgtggggaggaagcacagaaaccacagtcagaactgggtaattagctagaggaggaggaaatggatgaagagcgacagccactgtccactgtgccatgtgatttacagtcatttgggttttgtttataagaatgcttgctttattttttcatttttttcttcttctgtctttaaggggcctttacaacaactaaacggacaggcattccagccccacgggaattttcagtaactgtctcaagagagaggtctgtgccacgtggtccctccaaccccaggaaatcagtgtccagtccaacttcttccaacactcccactcctacgaaacacctgaggaccccttccacaaagcccaagcaagagaatgaaggtggagaaaaggctgcgcttgagtcccaagttcgggaacttttggcagaagccaaagcaaaagatagtgaaattaacaggcttcgaagtgaactaaagaaatacaaagagaaaaggactctgaacgctgaggggactgatgctttgggcccaaatgtcgatggaacatcagtctccccaggtgacacggaacctatgataagagctcttgaggagaagaacaagaactttcagaaagagctttccgatctagaggaagaaaaccgggtcctgaaggagaaactgatctatcttgagcactccccaaattcagaaggggcagcaagtcacactggcgacagcagctgcccaacatccataactcaagagtcaagcttcggaagcccaactggaaatcagatgtccagtgacattgatgagtataaaaaaaacatacatggaaatgcattacggacatcaggctcctcaagtagcgatgttaccaaagcttctttgtcgccagatgcttccgactttgagcacattacagcagagacaccctcaaggcccctgtcctccaccagtaacccctttaagagttcaaagtgttctactgctgggagttccccaaacagcgtaagtgaattgtccctggcttccctcacagagaagatacaaaa

SEQ ID NO: 17520 - DNA, 2300 bp, Homo sapien
aaaaatattagtcttttattttcctttttcattcagtttttgttttacagcttttgtagagaccaacccaagtagatgcaggtgggtgttagataaaaacacacatccccaggggacaagccatccagcggtgaggaatctctgccatgttctcttccctgctgcccacaaacgttacggagactcccttagcctccccctcctcttccccactgaggggcagcttgtggagatggaggactcgggcccatagatgcagaccccctaccaaatctagcaatagttctcacccttccaaagctcgagtgccattttgagatgacctaccaatgacatgcagtaaaggacataacctcacagcctttttagaagcatttcgaatatctacagttgcctcaattcacggggcatttcactcctctgatccaggttagaattttgctaaatctgtagcatcctgaatagcacactaatttttttttttagcacactaactttaactacattagttgagtgtagttgatacatctgtggcctcgtgtctataaagagcacactagattgtacccagcacttttggatatgacatgctaattagatgtatttaactattcataggaaagtgtatgataaatgactgtaatatttctaataaatatattttgtttctaattatttttttctcactgacatttatcaatattttttcaaagtgccacccttaaactgagtctgttttcagaccagcatcttcatgcatatatccttgtcgggtcacagtctccactgcagctgctcttgcgggtggtgctggaattttccacagaggactgggctcctgctggttcctccgctgcccgtgtgcagctttcttgctcaggccacaggcttacgtgaagatcacccttcaaggcctacccaggacactgctgagctgtgcagatgtgcacacgatatgtgcaatgtgtgactaaatgccaactgagaccccagaaaccactcgcagggggaattatgccaagattgaggaggcagggtgaagatactttttttctttttctggtttttttttttttttgagatggagtctagccctgtcgccaggctggagtacagtggcacgatcttgactcactgcaacctccgcctcccgggttcaagcgattcttttgtctcagcctcccgagtagctgggactacaggcacgtgccaccacgcccaactaatttttgtatttttagtagagaacaaggggtcaccatgttagccaggatggtcttgatctcttgacctcatgatctacccgcctctgcctcccaaagtgctgggattacaggtgggagccactgcgcccggccacagatattttgtaaatgattgcttccttaccccttcctagttcatgttttcttaaacatagttacatttcttctttgctatactaaaaatccctaattttagttggtcagagagagggatttgagactgagctcccatctcctcggctgcagcatctgattaaagccttcttcctttgcaatactcatctcagtggttggctttctgtgggtgagcagcgcaggatctaggctgaagccctgaggcttcagtgacaaaatctgtttttcataatgcgatctgtcttaattgtcctcaagaattagtatttgagtgctctctagattcttctttgtcacccttccttccttccttccttcctttcttccttcttttcttctctttccttcgttctctcctgccttctttctttttttgagacggagtcttgctctgtcgcccaggctggagtttggtggcacgatatcagctcactgcaacatccacctcccgggttcaagcgattctcctgtctcagcctctggagtagctgggactacaggcgcgcaccaccacgcccaactaatttttgtatttttagtagagacagggtttcaccatgttggccaggctggcctcaaactcctgacctcaagtgatctgcccgcctcaacctcccaaagtgctgggattacaggtgtgagccaccgcgcccggccgtcacttttcttcaatctcactggtgctcgcgggctgaagggtcaggacggactagaggcgagcaatcccggtggcaccaggcattccccgacctgcccgggtcgccagctgcacggaccctgggcagatgcgcgcagcggctgcggcacagggcggggagcggctgctcggccccatcctaaggcagcagaatgcccagagctggtccctggctccaggcgcaggccgagtagcagctgggc

SEQ ID NO: 17521 - DNA, 2300 bp, Homo sapien
gtgccacccttaaactgagtctgttttcagaccagcatcttcatgcatatatccttgtcgggtcacagtctccactgcagctgctcttgcgggtggtgctggaattttccacagaggactgggctcctgctggttcctccgctgcccgtgtgcagctttcttgctcaggccacaggcttacgtgaagatcacccttcaaggcctacccaggacactgctgagctgtgcagatgtgcacacgatatgtgcaatgtgtgactaaatgccaactgagaccccagaaaccactcgcagggggaattatgccaagattgaggaggcagggtgaagatactttttttctttttctggtttttttttttttttgagatggagtctagccctgtcgccaggctggagtacagtggcacgatcttgactcactgcaacctccgcctcccgggttcaagcgattcttttgtctcagcctcccgagtagctgggactacaggcacgtgccaccacgcccaactaatttttgtatttttagtagagaacaaggggtcaccatgttagccaggatggtcttgatctcttgacctcatgatctacccgcctctgcctcccaaagtgctgggattacaggtgggagccactgcgcccggccacagatattttgtaaatgattgcttccttaccccttcctagttcatgttttcttaaacatagttacatttcttctttgctatactaaaaatccctaattttagttggtcagagagagggatttgagactgagctcccatctcctcggctgcagcatctgattaaagccttcttcctttgcaatactcatctcagtggttggctttctgtgggtgagcagcgcaggatctaggctgaagccctgaggcttcagtgacaaaatctgtttttcataatgcgatctgtcttaattgtcctcaagaattagtatttgagtgctctctagattcttctttgtcacccttccttccttccttccttcctttcttccttcttttcttctctttccttcgttctctcctgccttctttctttttttgagacggagtcttgctctgtcgcccaggctggagtttggtggcacgatatcagctcactgcaacatccacctcccgggttcaagcgattctcctgtctcagcctctggagtagctgggactacaggcgcgcaccaccacgcccaactaatttttgtatttttagtagagacagggtttcaccatgttggccaggctggcctcaaactcctgacctcaagtgatctgcccgcctcaacctcccaaagtgctgggattacaggtgtgagccaccgcgcccggccgtcacttttcttcaatctcactggtgctcgcgggctgaagggtcaggacggactagaggcgagcaatcccggtggcaccaggcattccccgacctgcccgggtcgccagctgcacggaccctgggcagatgcgcgcagcggctgcggcacagggcggggagcggctgctcggccccatcctaaggcagcagaatgcccagagctggtccctggctccaggcgcaggccgagtagcagctgggcgggcagcggcgtcgggcaggcccttccagccgggctgacaggccgctctgacccagccatcagactccgcttgcgtcctggcagcgcggaccctagggcaacttcgctgcagtggccaagccgggggcggaactggcccatacccctgaaccgagcaagcctaggagcaggtgcgccggcggcgctgtgaagcggcactcatgacaggcaggctgggcgccgccaccccgaaacctccgagggaggaccagccagcccaggttggcgctggagctgcagcgccacctgcaggccaagaagtctttttctgggaggctggagctgcagcgccacctgcaggccaaggagtctttttctgggaggctggagctgcagcgcgacgtgcaggccaaggagtctttttctgggaggctggagctgcagttgcagtgaagtcacaggttccgtgacgtcacaggtgggcaggcgcactagtctgtaacggattggcttggccttacccgcgaggctttgcagtggctgcttggcttggcagtggtcgcttggcttggcgtggcagtgatcgcttggcttggcatttctggcttagcggtcctcctttcgcagattggaaaccgcgggctatcctgctgggaggttgtggccgaggcagtagctcgctactgatggtctcctggggtggagaaaagcggggaggggctgaggggtctcc

SEQ ID NO: 17522 - DNA, 2300 bp, Homo sapien
gttctttgaatacttccttactttctggcataagctgtttcaaccatactttgtattttctctgccccagcccttgaatcagccattttcatttttttccagaagccctgactttctttaggggacagtaattagaaaccaatatctgggcagtaattgtggtagatacgtatggctattggagttgtcattgctcataggcttcctcagtgaacagagcagaaaaatacagctagatggataaatatacaaacatacatgcttatattcatcgatatttctatattagaatatactgaaaaccatgagttcttcctggtgattctaattccagttgaatcacacatggctcattttagttttttttccctttcagtactcttgacctttgaacaatgtggaagttagaggggctgaaccccacacagccgaaaatttgcctaaattttgacttccctgtaatgtaactgctgactgacctgattaactattgttgaccagaaaccttacccataacaaagttgattaatatatatgctgtatattctatgtattatacactatattcttataaaagtaagctagaattgccttagctattccagctgttttggggttcgatataaattttaaaatagtttatcctaattctgtgaagaatgtcattggtggtttggtagctgacttcaaactatactacaaacctgcagtaacagaaatagcatggtactgttacaacagcagacacatataccaatggaacagaatagagagctaagaaataatgcagcacacctacaaccatccaaccttcaacaactccacttaaaaaaagcaatggggaaagcaatgggactgctggatcaaatggcaattctaagttctttgagaaatcgccaaactgctttccgcaatgactaaacaagtttaaattcccaccagaagtgcataaacgtccccttttctctacaaccttgccagcttctgttagtttttgaccttttaataatagtcattctgactggtgtgagatggtgtctcactgtggttttgatttgcatttctctaatgattagtgagtttgagcttttttttcatagccttgttggccacatgttatgtcttcttttgaaaagtatctgttcatgtcctttgcccacttttgatggggttgtttgttttttttcttgtaaatttaagttccttgcagatgctggatattagacctttgtcagatggctaggttgcaaatattttctccctttctgtgagctgtttactctgttgatagtttcttttgccgtaaagaagctctttagtttaattaggtcccatttgccaatttttgtttttcttgcaattacttttggcatctttgtcatgaagatcatttccaggtcctatgtctgcaatggtatttcctaggttatcgtccaaggttttaatatgttttcattttagatttaagtttttaatcctgcctttgcctcccaaagtgctgggattacaagcgtgagctaccacacccagcgaggaagccaagtttaacgtgtgtgctccactcctccaacctggccaaagggcagtcatcatcactggccactactgaccacagcctttagaaactccccttgaacgtgctgggctgaccttcctctgatcacaggcaaggtaaccatacactcaaggccaatgatcccatctgctgtgggctgggtcatgctcccaatgcttacagaacctgggaggcagaggaaaactctgcccatcccatgggacgttacctgtaagctttgaacaccagaatcttgaggcctatctctttctggaaggctttgtcttcctctaaaccaggaagctggagcaattccaccagattctgtacaacagatgcaacaagaaaattcatgaagagtagatcttaggttgaatttttcacagaagaccttgtaagaacagaaaatggtgagaaaaaaaaaccccgaggtcaatacaatggggaaaagcctgtgaagtgacctggcagcagccacacctgctgtcacctccattcccctctcatcttggaaacagatttgccctttacaactcaactcatagctcacccgccttcagagacttcttggcccatcttagctggaagggatctgttccagcgctgagcttttattttgcttagcatctactcagatgccttgactgtgtgtgtctcacagtcctactgactgacaaactccctgggggccgagatggcatggattcaggtctcagatgctctatggcacctgggagcatcttac

SEQ ID NO: 17523 - DNA, 2300 bp, Homo sapien
agaactctgacttgggaaaaatgttaaggatcaatttatctcaaatatcacatgtagctcttaagtctgagggccctctattcctcatcttacctaaaaggcacaaacacacctctccaagtcaggtatagggcccccaacaatagttgcctggtcaaaaaatgtatcctcagagttgactactactacagtaaatctggacacagtttctgaaaatttttgtttccctaaaagtttccatcaaactatattcactgacatgtaatgataatcatcaagactaaatcacatcccaggaggtatctgaatgcaaccgtgaggtgctccttcatgtccgaagatgcatttataacaatctggaaaacagtctagatcttcttggaagttagaccttcaactttatctgaattttgatgataaatgaagagctcttcttgtgcagtttctgaggttcttcaaaagagtgactgtttctctgtttccccagaaaaatactacaatatgtggtgtgtgtgtgtgtaggtgcctgtgcacatgtgtgggtgtgtgtgaatttgcctatatgtgtgtgtggatggagtaggtatacatgctgtgtgtgtgtggatgtgcattgtgagtgtgggtgggagatcgtgagtgcatgtgagtgtgtgtgtggatggagtaggtatacatgcctgtgaatgtgtgtgtggatgcggatgtgtgagtgtgggtgggagatcgtgagtgcatgtgagtgtgtgtgtggatggaataggtatacatgctgtgagtgtgtgtgtggatgcagatgtgtgagtgtgggtgggagtttgtgagtgcatctgagtgagtgtgtgtggcgagtgtatggaagtgggtagcccatgcatagagcatttcttagcctacttgacagcttaggagccacctcctccaggaagccttccttaatctgtccttcgtcctgcccctcgggacccaggtgacaccgagtatgcaattgctctatccctgcaggcctgcccctcactcatctcatccccaaacacagacacatgcaagaatgtgacactcccttcccaatacaacactaggacatttgattccctttgtattcccagtacctagtgcaatgtctggtacacggtaggtcatcagtaaataataaattgaattaaaccttgcaaaggcctccaaatatcagaattagtaagctctaaaggctttgtttattcctgcagattccttctcaggtttcagcaggtcatagagaacatctcttccaccagtcctagtctcaatgggacagtaaatgaaacagaaacaccaccatcccataccctccccttcagtccctctaaaatgagctgccgctgctgggagaaccagagctaagcttctgcagaggcctctgcccatgtcaccccagctccgcagtcctacctggcatgagtcttcctataactatacctaggcttcctgactgctctgtggggacacccagcctcattgcaccacaggatggggcagtcagagcagggcttcttacactttaacatgcatacgatcacctggttagcatgtggattctgatccagtaggtctgggatgaggcctgagattctgcacatctaacacgctcccaggtcctgcccatgttgctggcctgtggcccatccttccaccagaagcgtttagaaggctttagtctcctcgcagctgttcaagagaccggtgcggtgcaatcgggtgctgagtcatttggtcactgccgcttcttgttaagtcaacttctatcatttcacatgcatagaagttttgacaagcccttcagtcttttgtttctttctgtacgccagtaaaaaagaaagaacaagccaggcacggtggctcatgcctgtaatcccagcactttgggaggctgaggcaggcagaccacgaggtcaggagatcgagaccatcctggctaacacagtgaaaccctgtctctactaaaaagacaaaaaattagctggacgcacctgtagtcccagctacttgggagactgaggtgggagaatcgcttgaacccaggaggtggaggtgcagtgagccgagatcgtgccactgcactccagtctaggtgacagagcgagactccatctcaacaacaacaacaacaaaagacaaccaaaaccaaaaaaaaaccaaaaaacaaaaaaccaatcctatactcattgctcccagtctactaaagcagaaagaaaactggactgggcgttaggtgacatgaaccccagtcccagctctgcaggcctccaaggttctctggc

SEQ ID NO: 17524 - DNA, 2300 bp, Homo sapien
tatttatattcttttgctttcatgggacctatctcattcccctcccctaaacggccacacatttcacagtgctggctgaatgtttcatgtagaaattttattttatgattaatacacttgtgccatttcttggaaccacttgcttgtttaattctagtctatcaagtgataattttgttgatatttagaggctcctcagttaatttctgtgggatttttcgttatatttaataaggaaaataataggaaatagctaagaaaaaaagaaacaaagccaattattcctgagcatgtttaaaattattgaagtacacttgttaatttttagtatagaacctacatttcataatagaaaaccttggacttgccagtgttagctgctggaataaggtgtttgtccagtacattcagaatgtcgccacagattaactttagctcagtctcaacctgaaaaaataaaaatgaattttaaaaaattcagattgttgaagtctagaaattctgtaagttattacacattctatgtacctctgattttgaggaagagagcttagtattgaacagaattagtttccctctccaaactccattcctcccttttgacacaaaagcagagaaaagctgcctctgggtcatcaaaagtatcttttcctttctgcgtgcaattaagtgctacacacacacaccacccctaccccaccaccccatcacagtccaactgcagaatcaccaatgactgaaactgaacacagatgctacttggtaaacactggtcaattacatgaatctttcacaaggtagcaactattgtgtccatttacttgggaaaacagaagctaagacatttgctcaaagagcatcacttaaaagaacttaataagcagagctaggatttgaacccaggcagggtgcaagggacagaacaaaattcaaacccaggcagtttgccttcagtacttatattcctaacaacgttcaacaggcaatccctttagtggaagagatccaaaactagttaagataccaaaaatctgtggaccaaagtaactattgccacatacccagtttacttctttttttttttttttttttgagagggagtctcgctctgtcacccaggctggagtgcagtggtgtgatctcagctcactgcaatctccacctcctgggttcgtgccattctcccgcctcagcctcccgaggagccgggaccacaggcgcccgccaccacgcccagctaattttttgtatttttagtagagacgggtttcaccatgttagccaggatggtctcgatctcctgacctcgtgatccgcccgccttggcctcccaaagtgctgggattacaggcgtaagccaccattgcccagccgctaaactctttaattttcaattactccaattgcttgaaactcaaatagccatatggggctagtggccaccatttggacagagtgactccaacattccatgtggtgtaattttatttgctagcctttagcatcatgtaatgtgatcttcttcacttgttttctgtctctgtgaccagagcatcagctccttgaggtgggaattggtttgtcttatccactgctgtatgctggggctagaagtgggcctggcatatagtagatgctcaatatgtaattgccgaatgaatgcatgagtaaatgaatgactcctggggaccatgaactctgaatttctccaaaaggaatgctagttctgccagggcttgctgctctgtgacctcaagtcaggatcttgccctctctgggctcagcatcctgaccaaggggcactggggcccctctggtcctaaggcactgagacttactgctgcttactctgtcctgttgggagaaaagctgagtgttgggagagaagctgaggcagggcttgcatgtctgctagacttgctggctccttgcttctagcactcccattatctcaagtagccacatgtttcaaagaaaatgctacaccatcgcagctgtagctcactcacttgatacattgattcctttaaacccccacagcctcaccacctgtttctttgtttgagcacaaataaatagcctgggctccctgtgtacccattgttctcacttaatacatgagaacatgcaatatttggctgtttctgtgttaattcacgtaggataatgaccttcagctgcatctgtgttgctgcaaaggacatgattttgttcttttttatgactgcctagtactttgtggtgtatatgcaccacattttctttatttaatgaaccgttggtggatacttaccttggtt

SEQ ID NO: 17525 - DNA, 2300 bp, Homo sapien
aagccatatacctttttcagctcattatccccagaatgtatttgtacattattaacacagaatagacacctaataaatatttctaaatttttattgttcttccttgccacaaaacagcaatcacttttttttagcatgatgtacatgcccttctatcatcttgccctgaactatttatcaaatcttatttcttcccactcccccatttgtttcccgtgctgtggctgtacagaactacttagagctctgtcaactctccatgctattttataataatcaacactaatgaaaagaaagggggctttataacagaggcagaactcattatgttctaaaaaatacacgcatgtttcccatgttgaatagtgtcccgcagaaagtcatgtccagctggaacccaggaatgttaaactatttggaaacagggtctctgcagataacacttagttaagacaaggtcacaatgcattagggtgggctgtaaagccaatggctgtgtcctttcaggaaggtcgtgggaacatacagagacctacagggaagacggccatgggacaagggaggcagagtctggagttacgctgcctacagtcacggaatgccaaggacagctggaaaccaccagaagctaagaaggagattttacctgaaagcctctcaaagaaatcaatcatactcacacctcctttttgaatttctggcctcgtgaatggtgaaaaaataaatttctgtcgtcttaagccccacggtttgtagtcatttgttctgttcctagccttaggaaactaacacagcatgctaagggaaaagaagagaattctgcataaaatgtcattttactttttaaaacaactactgttgacagtaaatgagtattcttccaagattcatatgcagaacatatatgcagcccggaacattttttgggacccatggcataagtgattatgatagataaaatccaaatattaacctgccaaaagagttattttttcttttgcagtcatttaaaggtaataagcagaggtcatgagccctgtaaaaattaatctattcatttgttgtcacttgatacttacgatccgttgacatatttaggttttaattctttgtacagattatggttcgtcttgcactgtaattttattgcacaacaaattttttatttatcatatatctaagttgtttcttaaacgtgagtaacattgcacttgaaaatactcagaagacttctgtcgacgttctcgtaacagcttcttctagttaataaaaacctaatcccattttcctattatgtatagattacaagtaaaatcggcatttaaaaagtaaaatctgttcgacaatttctattgctattgtaggtagtataacataaaatgtgtcttatttttccctcactcattgacaatttaagtaaattttttaaaccaagaagctcttttcacataccaggcccagtgattggaattgagtattcagtattgaacagagcaaacaagtttcttatcattaagctcatattctatgttataaacatttttccagtgaaattactggaatgttttcaagcaatattgaattgtgttcttataatcacctatctccatttattgttgagaatgaagaaaattttggagcatacaattcaatgcaatgatttttttttttttttttttttttttgagacagagtttcgttcttgctgcccaggctggagtgtagtgtcacgatcttggctcattgcaatctccacttcctgggttcaaacaattctcctgcctgagcctcctgagtagctgagattatagacttgtgccaccatacccggctaattttttgtttagtagagacggattttcaccaggctatccaggctcgtctcgaaatcctgacctcagatgatccacccgcctcagcctcccaaagtgccagcattacaggcatgagccactgtgcctggcccagtgcaatgatttgatagttattatggtggttttaaaatgacctgagtgaaatatagtgcttacatcaattccttatctgtcatgcatttcatctagtaatctgctctaactacattaacattatttctttttattaaatgtcttgagattaaaaaagatgttttgtagttatactcaagcttggaaccatagtgaccaactgttacggacagactggattgtatccccttccaattaagttacggtgctgctacagaaagaaaagaggtgaactattttttaaaagcatttctccattggctttgaaaatgcctatatcatcatgaatagaat

SEQ ID NO: 17526 - DNA, 2300 bp, Homo sapien
aagggtaaatgaagccttcaatttgattgaataaaatacaagatgtgcaccaccatgcccggctaatttgtttatttttgtacaggcagggtttcaccatgttgcccaggctggtatgggactcctgagttcaagccacccacctgccttggcctcccaaagtgctaggattacaggtgcgacccactgcacctgtcctaaaagacagattttgcttaatttctacacttgatgttctggtacagacatttgcttggaaatacagtatagttagcggaagccttttcatggggaaataagatatcagtaagtattccaggattttaaactagaatacaaaagaagaaaatatttaaaataaactatagggtaatataaaatgtatttacatccttacatttaactgcttattttacaagcaataagttatcattcaccaattaataatttatgtcaagttcacctgtattaatacacataaacttctatgaagttccataatgccaaataaaaaaggaacatttaggtttaacatgttattttatataggcataacgcaacaccagcattacaggattgcatttacaaattctcttgactctaagcatgaaattatgttaaaagactaaggcaatttaactgtttttgggtttttttatattaaggaaacctaaatttgtatgagtgaattaaattgaattacattttcttataggcatatcagtttaccctttgttaaaataacacgcactgccctacaaaatgaatgccgtagtcacaatcatgtttctgccacaatcttaaagatttggggaaacaactacaatctaaaatcagagactccatgtccaatgccaaaggtacacacctctatttttccccaataagcttcttggaaaagtctttgaattacacgttaaagtgcacttcaaggaaatgtgatgttttcgtttatagctggtgaacagcatgcaatttgacagcactgtcactaacaatcagagactgctctggatctaagtactaaaaatgacccacactgcaatcacaagatatttggaagtgggaatttattgaacaaagttaggccgggagtctaaagcagcacttgcttcttttgctccaagacgacgacgtttaacattagcatcactattgtttctttttccctcaactcttctcccacactgccttcttctcccccaccaccttctcccatcgtctttccccgcttcccttctccctccctccgctcccccttcttctcccagcactcttctcagcccgtctttctgcctttttcttcccctccccacctcgttccctgcctcatcctcttctctcccacccatctttttcccctctccatctctttccccaaggtcgtcttcgccgctttcccctcccttcttcttccccccaaccctcttccctcctccctccccatccttttcttcccttcaccccttttccagtcttcttccccaccttctgccctttccctcccctctccttccctcccctctccttcccgacccttctcctttcccaacgtcttcccacctttttctcccctctccgtcttctcccctccttcttccccactgcggtcttcccgcatcctcttctgccgtctccctactgtcttcttcccgcaccttcttctcccccgcagttttttttccccttccccaccgttttcttcccctcagtctctcccattcctcgcagcacgggttcctgtggcggcagcttttccttccatctccttctctccacccgctggcttccagtctccaccttcccgcctattcccccagcagcgtcttcccgccgctccctcttctcccctccccctcctcaccgtcttctcccggcctattaccgccaaccgttttcttcctcaccccgcacccttttcttcccatgtctgccttagtcttcttcccaccctcttctcctctccccatcgccttcttcccaccctcttctcctctcccaatcgtcgtctttcccagcctcttctccattttcttgccgcctccatatccccaccttctcgcagcagcgtcttcctgccgcgcttttctctcccctcaccatcttctcttcctcttccccaccgtcctctccccacgccctcttctcctcactgtcttctccccgcgccttccccacaaccgttttgtcccccgttttcttcccctcacaccgttttcttcccatgtcctcccaccgtctcgcagcagcgtctgtcagtcgcaatcttcttcccactttcttctctccccctcccatcg

SEQ ID NO: 17527 - DNA, 2300 bp, Homo sapien
cctgatggtgtgtcaaatacccaaagcttgcatggagggacctaacaatggaccttttcacagctgtgtttccagaatctttattgactttacttcatagtatacaataagatgaaaacaaaacgcaaaccgcctgatttccaagagcttatttaaaaccaaaaccaccatgtgagacttagtatagtacacattagatatggatgacatttctgcagtaagtcattgtaagtctagtaaatatccagatgataacatctatttaagaacagcactgataattatatacgaggaggtcatgttaagtattccacaacaaattaaagagatgatgtccatgaagttatctatgttactctatataacagatggaaaaagcttgggtaatattcagtgcggatactgacttgtgttcctgactcataggcagtgctcagacacatttaacccactgtctgacagaatgaatgaacgtgtgctgtaagtgaacccgttctgggcatgaggttaattattttctatgagagtacattaaatcattttcttttccaagggtaaatgaagccttcaatttgattgaataaaatacaagatgtgcaccaccatgcccggctaatttgtttatttttgtacaggcagggtttcaccatgttgcccaggctggtatgggactcctgagttcaagccacccacctgccttggcctcccaaagtgctaggattacaggtgcgacccactgcacctgtcctaaaagacagattttgcttaatttctacacttgatgttctggtacagacatttgcttggaaatacagtatagttagcggaagccttttcatggggaaataagatatcagtaagtattccaggattttaaactagaatacaaaagaagaaaatatttaaaataaactatagggtaatataaaatgtatttacatccttacatttaactgcttattttacaagcaataagttatcattcaccaattaataatttatgtcaagttcacctgtattaatacacataaacttctatgaagttccataatgccaaataaaaaaggaacatttaggtttaacatgttattttatataggcataacgcaacaccagcattacaggattgcatttacaaattctcttgactctaagcatgaaattatgttaaaagactaaggcaatttaactgtttttgggtttttttatattaaggaaacctaaatttgtatgagtgaattaaattgaattacattttcttataggcatatcagtttaccctttgttaaaataacacgcactgccctacaaaatgaatgccgtagtcacaatcatgtttctgccacaatcttaaagatttggggaaacaactacaatctaaaatcagagactccatgtccaatgccaaaggtacacacctctatttttccccaataagcttcttggaaaagtctttgaattacacgttaaagtgcacttcaaggaaatgtgatgttttcgtttatagctggtgaacagcatgcaatttgacagcactgtcactaacaatcagagactgctctggatctaagtactaaaaatgacccacactgcaatcacaagatatttggaagtgggaatttattgaacaaagttaggccgggagtctaaagcagcacttgcttcttttgctccaagacgacgacgtttaacattagcatcactattgtttctttttccctcaactcttctcccacactgccttcttctcccccaccaccttctcccatcgtctttccccgcttcccttctccctccctccgctcccccttcttctcccagcactcttctcagcccgtctttctgcctttttcttcccctccccacctcgttccctgcctcatcctcttctctcccacccatctttttcccctctccatctctttccccaaggtcgtcttcgccgctttcccctcccttcttcttccccccaaccctcttccctcctccctccccatccttttcttcccttcaccccttttccagtcttcttccccaccttctgccctttccctcccctctccttccctcccctctccttcccgacccttctcctttcccaacgtcttcccacctttttctcccctctccgtcttctcccctccttcttccccactgcggtcttcccgcatcctcttctgccgtctccctactgtcttcttcccgcaccttcttctcccccgcagttttttttccccttccccaccgttttcttcccctcagtctctcccattcctcgcagcacgggttcctgtggcggc

SEQ ID NO: 17528 - DNA, 2300 bp, Homo sapien
ctgcgtacacaacatgtctggtatacacacactgagcgcctgccctgaggactggtgggcctcctgtactttcttagagtccaggaggaagagaaggaagaaaaggtgaagaggaaggcccaggtagtagggttgctggtccggggcactcgcccactattgactgccccagagggtgacatgggaggggacatggcactggagcccacttgggggtggcaggtccccttgcttccttgttagtttcttcgtagaggccctaagatgcttgagcacagtgtcatcatccgtggcccaggtatggaagaactggttccgaaaacatgccaaaaggccagacctggatgtcttcatgaggcgctctagggacagggtggatatcaggccaggacagttacctgggaatggtcacagctcataccccgtggccacttcagtctcccactgggccgtgccggatccttttgtggccaccccaggcgtccagatgtacacaggagactgtggctggggggtgatctggacagggaagtgctcaccacactcctgactttcatctgggtcatgtgagggatgggctcggcatcacagtgcccttcccaagcccacctggccagacctccctctgggccagaacagaggatcatgaggacagtgtgaggaagctgcccttgggccagtcgggtctgaccgcagggctccccaggccccactgggtacacatagacttactcttctgaaccttaaaagcaatgcttctgatcggcatcaacacctgtccttccagcaaatacatgtcccacaagcacagggtgagcccgagagagatctgtggggacagcaggtgtgagacaacctggcccttccaggctggggctggtggctcaagctgcacacattggggcttcagtctccagagtcagtgaccttccccatgagggtcgcctgagccatctagaatggtgggtcagacaaggtcttgcagctcctcatagggggcactcatttgagtggggatgtggctcctggacagaggggcttgcccagggcttgaggcttccctgagccctctcaagttgggtcctggcccagtctgcccatgaggctgggcctgagccccagccattgccctgggatgacccctcttgggcagagggttttgcttgtgtgtccttcggggacccgcctgagcctcctgtgggctgggagtgagccagacccccggactggggaagcagggcactgcagggcaaggagggtccctgagccagggtctccctatgcctccttaccccttgaatcaacatccggagaaggcagcctaatgaggaacactgtccgcatagaccttccttgtcctgatgggaggaacagaggtgctcagggccccctgggctgccctaaaaacctccatcttccagggcctctgaagacccttcccctagtgcagaacactgggcggtgtccagagctccccacaacactgtccccttcccacactctcagtggacacactgacctttgacttgctctgcgggagcggggcccccatccctgtgcctctgtctcctccagggcaggaaaggaaacaaactcccagcccatggagaacccgacgtctcaggtcaggccctggctgggactccgccagtcaccagtcccacgagggtctccagtccccctgctcctacagccccacgggaggcaaggcctctgagaagagccaaggggacaataaactcacctgatgccacatggtcttgggttgtgacttgggtaccacatgctcctgttggtcttggagcccctggactgtcccgccatttgggctgtggaatcctgagaagcccccagcccatcatgaaatcagagccttcccccaagatgtggagccatcagctgcaagagctgggcagctgcagaggcccccaaacccgaaggcctcccaccctcccatctggtgaccccaccatgcggcctttgccctggggaggtgggacaagaacatcccctggagcctggctggaggttcccctggaggcctcctgggctagggtgcaaaaagggcaagcctgactttgaggtcacaacagagcagccagaacacggtgggtgctgggcttcctggtcatcttgtggaagtggggttgggccaggggacacgggatggggagatgctgccacctgggcttggttagcccattcgtgggcaccaagggcagcaggagcctgggcagctggagggcaggaggactctcagggaggggagagtcagctgcacagagtcagagccggagggc

SEQ ID NO: 17529 - DNA, 2300 bp, Homo sapien
ttgttgctatcatcctcctttctcttattgccacccaggcaagcagctggtcagtctttgttcagtgtccagcttccaaagcctagacaacctttctgtagcctaaaacgaatggtctctgctccagataactctctttccttgagctgttgtgagctttgaagtaggtggcttgagctagagataaaacagaatcttctgggtagtcccctgttaattatcttcagcccaggcttttgctagatggaatggaaaagcaacttcatttgacacaaagcttctaaagcaggtaaattgttgggggagagagttagcatgtatgaatgtaaggatgagggaagcgaagcaagaggaacctcttgccatgatcagacatgcagctgcctacctagtgaggacttcaagccccaccacatagcatgcttcctttctctcctggcttggggtaagaagtggctgtggtgtttggcaatgctaattcaatgccgcaacatatagtttaggccaaggataaagaagagacactttaagtttgtagtaaaagtggtctctgctggggaagggttttcttttctttttttctttaataacaaggagatttcttagttcatgtatcaagaattcttgaagttgggtgtttccataattggtaaaaacagcagctcacagaattttgagtattccatgagctgctcatcacagttctttcctctttctgctctgccatcttcaggatattggttgttcccctcatagtaataagatggctgtggcatttccaaccatccaaaaaaagggaaggattttaggaggtggagtcgggtcaaacaagaaatatatatatacatatatacattgcttagaacgttaaactattagagtatttccctcccaaagagggatgtttgaaaaaactctgaaggagaggaggaattagttgggatgccaatttcctctccactgctgtacatgagatggggaggttgagggacaggatctataggcagcttctaagagcaaacttcacacaggaagggatctgagaacacattgccgggggcttgagaaggttactgagtgagttattgggagtcttaataaaataaactagatattaggtccattcattaattagttccagtttctccttgaaatgagtaaaaactagaaggcttctccccacagtgttgtgccccttcactcattttttattggcggggtggggggctctgttaacatctagcctaagtatagaactgcctggggggcagggttaggaatctcttcactaccctgattcttgattcctggttctaccctgtctgtcccttttcttttactagatctttctcttccctgaacgttttcttctttccctggacaggcagcctcctttgggtgtattcagaggcagtgatgacttgctgtccaggcagctccctcctgcagacagaatgctcagggtcactgaaccactgcttctcttccgaaagtagagctagctgccactttcgcatggcctccggagtgtctccacctacacctctgtgctcccccgccacactgatggctcaagacaaggctggcaaaccctcccagaaatgtctctggcccagaaagcctctctctccctccctctctcatgaggcacagccaagccaagtgctcatgagccagtgggcctgccacagagcaaacgagggtttattttcagtcccctctctctggatcagaaccagagagcatgctgaatgcccctctgcttgctcggtaagggtgccccacctgaatcagtgctctcagctggcagtgcaatgcttgtagaagtaggaggaaacagttctcactgggaagaagcaagggcaagaacccaagtgcctcacctcaaaaggaggccctgttccctggagtcagggtgaactgcaaacctttggctgagacctgggatttgagataccacaaaccctgctgaacagagtgtctgttcagcaaactaaccagcattccctatagcctagggaatagtatagaagtctggcaaaaacagaaacagaacatcagtgttttgagaaccttggactactcctgtccctgtagctcagtcatcaaagcagaagcctggctttgctctattaagattggaaatgtacactaccaaacactcagtccactgttgagccccagtgctggaaggaaggagggcctttcttcctgtgttaattgcatggaggctacaggggttagcctggactaaaggcatccttgtgttttgagctattcacctcagtagaaaagaatct

SEQ ID NO: 17530 - DNA, 2300 bp, Homo sapien
tatccgtctgaaaatgatcttttaaattgggaaaactctgattaccttacatccttcagttcagagtagcattgggtaaagacattttggctgcagacaaatcactctttcatagtcatcagctttcagaacattctaaggcttcattttccatctaaacttttcagttaatttgactctaacttttaattgatgttactgagcagcaaaggagcctgaaggacactgctttgttttgaaaaatgaagaaagaaaggaatgtaaatcctgtaaatgtaattctaatgaaatcaagatacaatatagtgtttataaaatgaaatacaattatttctaataactgtactttcatttcaaataattttcaacaagttagtgacgtagaataaatacaattccagaagaatccaggattttttttctattgcattgctttttattaaattatagctacttgaaggctttgaaaaattgaacaccagtaaaactgcccttcttttgttaatatgttttgttttcttgtttcatttttaattcaactagtcattcaccagaaaaaatttactcaggtaaacttttttgattatcctttcatagcatttaacgcaagtgttatttgttgtagtcttttgtctatgaatctattaatgctaagaaactgaacattcctaggagtgtcctaataagaaagaaaaattaacaatttcagctgtatttttacttaaataaatattcatatagtttacctttcaggatcacaacaaacactttgattatataagaaggtctttgtatatacatcagactaccaagaagtcatatctgattttgtgcttttctactactcttcccccaaacacttgttcaaaaagtttacttttaaagggtctgaactgtgtgtcaagcactgacatcagcatgttacctgaattaactcattaaactcttgtgatactcatgtggtattagcagtgaagaaactgaagcacagaagcttcaagtaaaatgtccggttttagagcaactgaacagtagagtatggaagcccagttactgaccttgtaccattgcccagtactgtgaactgacctaaaaaggcctatgagatatcaacccattaagatccatgacataaagaaaattgtttgtcctacaatatcccaatctggatgaaggcacataaagagaatatgcttaagcatgatgacaaaaaaataagaaagaactgtgaatgcactttacaaaacagaaaagaacacaagggactttggaaccaagttgaaaattaaatatgttcatgtgcacataacaaaagagtgatcataaataaactgtgtcaacactgtactatgaaggtgaaacttcctttttaggattagctaaaccttgtataacttgtaaaaaaatgcaaccacatatgttgatgtactaaacccagtgttttcttttggcttatataccaaaaacaggaattccttcctgtaatgaagaaaaaacacaggcatcaaggagtaacaaaattaatgtcttagaatgtaaaatatagaaacaccaattaaggctcttttttttttttttacataatacatgtgaaaactgcatcagaatttacaaaaaatctacagcgtaatttgttctggcaataaccaatcacattctgctggaggtaactttagtaacgtcaagcaaaagtcttaaaattatgacaggtggcattcatttaaaatactctcaagagctcttagaaatcaagaacacaggagctgcggcggtggcggtgcaggaggccgggcaggggtgcggagggaccgacggacgcacgggcgggcggccgggagccatggagcgcggccctggggcccgggggcgcgggccggggtgggcttcccacggcacgacatggagacctgtggttgcgaggctccctggggctcggcttggaccgcgatggggctgggccctggcctcctaacggggctgctgtctggggcggtagctgcgggggcgctctcccctctgcccgcgactcggagcacccccacccctcccctgccgggccaggccgggcggcgttgttggcgggggccccggtggaggcccggcccaggcggcgcccgccatgaacgggctgtcgttgagtgagctctgctgcctcttctgctgcccgccctgccccggccgcatcgctgccaagctcgccttcctgccgccggaggccacctacaccctggtgcctgagcccaagccggggcctggtggggccgggaccgcccccttggggaccctgcgggcctcctcgg

SEQ ID NO: 17531 - DNA, 2300 bp, Homo sapien
ggactcctctttgtcctaggtgtaccaccaccactgccaccgaggccttcgttacagcacccacaggttcctccccaccccagaacgggatgggccctgcagtgctcctactcccccttcccagcccccagacttcctactgctaccaccactagcgccaatgccaatacaaccagtcaccctcaacgtaccagcccaccctaccaggctcctacctccaggcccccgtgggtgccctcctaccgctccagtcgagctgtggtctccatctccaccaccaactgcatgaggcaagctgcagagccacgtcatctgctccaccgtaccacaggcgactcctccttctcctccttcagcctggcttggagcagctgggcaggcaaagccagaaaagccgaaaacaggactcagggattggaaccattagagcctcacctcgttatgctggtgactgggtgtcagggatcagtttcattgaaggcactcacacccaccttccaaagtccaacccctcctggcaaaagctggccaggaactggggcctggggtgggagtgagtgccttcactgaaaccggcccctggccaagtccagctggccaggaattgctgggcccaccaaggctgccctcctccgggagcctgagtaggagaaactcagacccagccagcgctccccacccaagggctggttcccattcctgacacctccacccacagtgccctgtctcccacttcccccatggtgcatactactccctgcctggtagtcccaggtggtcttcgcaacacaaagcatgagggcaggccgggaaaccacagtgggtgtggaggccctaccatgcaatccagctcgagtggagaaaatcgccttctagagtctggagtccgagaagaggaaaaccatcccttacttggaagctatgagaagaaggaggccactgctgtcactgccactgccacctcctcagctcgtcaatgccgctggcagtgtagcccccatggcacccctaatctgccccctgccactagcagtgtagcccccagatagcacatccaatacatcctacagtttcaggcaatgtaaccccaatatccccccacaaaagcactccccccacacctcagggagcataccacccaatagtgcccacaatctgacccagccacgggcagttcagctcctaatggtgcaccccccagtcacagacagtgcagcacccaacaacgcccctaaaccacccccactgccagcattgtagccccagttaactccacccaacccactccctgctgctggcagtgcagcagaagataacgcccctaatccttccccagccaccagcaatacaagctagtgtacacaatctgcctcccctcaccacccctgccaccacgggcagtatagccccagatagccaagcaacctgccccaccaccagcaatgcaaccccggagagtgcccccaaccagaccactgccacaggcagggtagcctctagcagtgaaccccaataggacacccaacacttgcccccagaggcacacagggcaggccaggaaaactcacctaccccatcacgtttctaccactgtggctaagctgcagtctccgacgtcaccaccaaccacagcgaggcaagccatggtggcacaggttccagcctccagcatgtggcagtgcctcttccttctagtcctccagcctggcaggagaagctcctgctgctgaccgctctcctactgctctatcgccactaccaaccgcagcgaggtagtgacccaggctccaggctccatccatcctccaccctccagcaggtggaaggttgcggcttcttccagttctctaagctggacacagagttgctcctccgctggacacagaagagcctgaaatgacctgacgccacctcagcatgctttatatatgaggttatgcaaatgcagttcctggactacatgttctgattggatgagaaaaaaaacctctaggcctactctgattggactttattttcatgctgtgattggttgtgttaagacttgctctcatccaatcagaacatgatcataaagtccaatcagagtaagcctggaggtttttttctcatccaatcaagacatgcagtccaggaacctccgtgggcattaccgcagtatataaatgatgctgaagcggaaacacgttttttcaagttcctgtatttttatgtggagttgctcactgcccaacgtagaggactaggaatcaggagtcggtggccgtatgctggaggctggagccgcgggagcgcggctc

SEQ ID NO: 17532 - DNA, 2300 bp, Homo sapien
aatgactaatatttctaataaatacattttgtttctaattatttttttctcactgacatttatcaatatttttcaaagtgccacccttaaactgagtctgttttcagaccagcatcttcatgcatatatccttgtcaggtcacagtctccactgcagctgctcttgcgggtggtgctggaattttccagtggactgggctcctgctggttcctccgctgcccgtgtgcagctttcttgctctggccacaggcttacgtgaagatcacccttcaaggcctacccaggacactgctgagctgtgcagttgtgcacacgatatgtgcaatgtgtgactaaatgccaactgagaccccagaaaccactcgcagggggaattatgccaagattgaggaggcagggtgaagatactttttttctttttctgttttttttttttttgagatggagtctagccctgtcgccaggctggagtacagtggcacgatcttgactcactgcaacctccgcctcccgggttcaagcgattcttttgtctcagcctcccgagtagctgggactacaggcacgtgccaccacgcccaactaatttttgtatttttagtagagaacaaggggtcaccatgttagccaggatggtcttgatctcttgacctcatgatctacccgcctctgcctcccaaagtgctgggattacaggtgggagccactgggcccggccgcagatacttttgtaaatgattgcttccttaccacttcctagttcatgttttcttatacatagttacatttcttctttgctatactaaaaatccctaattttagttggtcagagagacggatttgagactgagctcccatctcctcggctgcagcatctgattaaagccttcttcctttgcaatactcatctcagtgattggctttctgtgggtgagcagcgcaggatctaggctgaagccctgagccttcagtgacaaaatctgtttttcataatgcgatctgtcttaattgtcctcaagaattagtatttgagtgctctctagcttctcctttgtcacgcttccttccttcctttcttccttccttctttccttctctgtccttcgttctctccttctttttctttttttaagacggagtcttgctctgtcgcccaggctggagtttggtggcacgatatcagctcactgcaacgtccacctcccgggttcaagcgattctcctgtctcagcctctggagtagctgggactacaggtgtgcgccaccacgcccaactaatttttgtatttttagtagagacagggtttcaccatgttggccaggctggcctcaaactcctgacctcaagtgatctgcccacctcaacctcccaaagtgctgggattacagatgtgagccaccgcgcccagccgtcacttttcttcaaactcactggtgctcgcgggctgaagggtcaggacggactagaggcgagcaatcccggtggcaccaggcattccccgacccgcccgggtcgccagctgcacggaccctgggcaaatgcgcgcagcggctgcggcacagggcggggagcggctgctcggccccatcctaaggcagcagaatgcccaaagctggtccctggctccgggcgcaggccaagtaggagctgggcgggcagcggcgttgggcaggcccttccagccgggctgacaggccgctctgacccagccatcagactccgcttgcgtcctggcagcgccgaccctagggcaacttcgctgcagtggccaagccgggggcggaactggcccatacccctgaaccgagcaagcctaggagcaggtgcaccggcggcgctgtgaagcagcactcatgacaggcaggctgggcgccgccacccccaaacctccgagggaggaccagccggcccaggttggcactggagctgcagcaccacctgcagaccaaggagtctttttctgggaggctggagctgcagatgcagtgaaggcacaggttcagtgacgtcaaaggtgcgcaggcgcactggtgtgtaacggattggcttggccttacccgcgtggcttggccttacccgcgaggctttgcggtggctgcttggcgtggcagtgatcgcttggcttggcatttctggcttagcggtcctcctttcgcagattggaaaccgcgggctatcctgctgggaggttgtggccgaggcagtagctcgctactgatggcctcctggggtggagaaaagcggggaggggctggggggtctccgaagccggcagtctacgccacgaggaagacccc

SEQ ID NO: 17533 - DNA, 2300 bp, Homo sapien
tgaatgttttttggatgaaattaacatttaaattggtagactctgtgtaaagcagatgaccttccattctgtgggtgtgcctcatccaatcagctgaaagttttgtcagaatgaggacagaattctcccaagcaggaagggattgtgccagcagactgcttcggactcaaacagcaactgtttcctgggtcttcagcccgccggcctaccctgcggtcttttaggcttttaagggactggctcacatgattgtgtgtatctatatttatatctaatctatatcatctgcatcactcatttctctggagaaccctaatatatgcccttaaaggtcattttatatcaagcgtttatttttgccagacatgattgtgttgcactaatatttgtctcccttttcttaaaattatgccttcatttttttgttgaatattacatctgtgacttagctttctagtgtgagtgtgttatttgttgtcaagatgaaaaatacacatacacaatttaataaacattaaaggaactgtggtgaccaaaatgcagatggatgtgagaaagaagggctgtgagctgccacctcattaatccacaatggcaccattttcctctcacctgaacttttagaaactttttttccaccttacaattgcttatgcaataaacttcactctcacttagactccataacttatcccagaaaccttaatgcctctaagcagcaacaaatagactgacaaagagatgtgttaccttgttcagacaacccgatgattctgtgaaagcacataatgaccatcttcactttacatagttaacctgaactgccaattaaattgaactgttctcatctgacgtagttattggcctagctttttccctgtattcttgtactggagacatttaatatggtcatcataagtgaaggtaagttatttcaaataaatatactaattggatcagactcgattctattttactttttatatttcaactgtgcatgtatacatgcactattaatttggttttaattataattttgattaataatttgaatctaaacttatccccgtccctgatacttacccggccggagctagcacaatctttgactggattatagcaattgactccaaatgaccctactgcgtttgcttttttgcctcccattaatgcttgcactcagtccagcggccagaatgttcctttaaagatacacattgaatcacattactcctctgctcacaaccttcccatggctcttaatcatatttcatctgaagactagaatcgttaaaatggcctgcaaagtgcattatgattcagtgctcagtacctttctgactatttctcctgctgcttttccactttgctttctccactgaagttatgctggcctccttgaagtttccttctcagctataggaggtttgtgctgtatcctccttcacctgtaacagactcttgcgggtatttctacaactcactcctcatatcatttacatcttctctcaaatgttaacttcacagtgaagtcttccttcaatatcctacttaaaggtgtaccaagtttaccagcccagcaggagcttctgtctcctctgtgatttgtttccctccaaagcacttattgccttctaataaattatacaacttattttactttttctctttgtctctttttattgcttttttggttcatttcttattgtatctcttccaccaaataaattttgaataaaacatttttactaatttgtctcatctccataatttcagcaaaaacaacagaccttcattcagcttaggaacataataaataggacgaagttgaataaacgaaatggaggggagtgaagtattccagatggaagaggcagtacgtggccaagaggaaacagaccatgtgcgctggagaaaaaggatggccagacttgcagaaacctggaattggtgattggctttagaagtggagagacaaaaaaggaggcatagaaagtgccaacatttggctacacagggaagaaagacgtaaaataataaaaacattggcatcacctgtagactcaaatcctgtgagtgaaggacctgagcaatgaaggatggattgaactcgtgattagccttcttcagcatatgtaaaatgatgtctgcttttcttctctatttgtcattttaccgactttttatatatagtagtttccccatatccatggaggatgtatcccaagacccccagaggatgcttgaaaccacagataataacaaactctatgtatcctatgatttttcctgtacatcct

SEQ ID NO: 17534 - DNA, 2300 bp, Homo sapien
aaagacagtaaaatgcattaagcttttaaattcattcagaatggctacaaataatgagtctttaaaaatttgtatttattatgaaacgaataaaacctagtgactccaatgcttatatcagctaaagcttgctgctgtcaatgtgtcttcatttttaaagtcctaatttactatattgtttgaaatagcgttaagatatatgtttcatttggaacacttagtttttcttaaaagaaagacaattagtacaaaagggattaacatccacatagttacaaaattcaaataatacgggtaaaatggtacactctattagaggattcaacccataaattacaaaagtctgtgaacattgttgtaggactccaatatgtatagcattaccctttaagacttgtatttcaaatgtaacttaaaactaccatacaaaaattaaaagcacagaaacccacgagagccataacacaatagccaagtaagcaaccaagtattacatattgttttatttgtggacgaatatgtattaattgcaatcatatgagcttcatgttttcagtataagacatcatatgttgtaaaatccaggtaatcacagggttaattggataaaatatgggatttgtttatctgctacttaagacataatcttttggcttactttgtgagtcacactctaaacatttggttttaacatgtgatgtaataaattttaatagggctcccttttgaaaggggaagagctctgtatgcgcaggaaaatgtgtctgttgatgcagtgaaatgaagttattttaatgtattcatttttacagctatgtaggcaattgttaattatatttctaccagcaaaacaaaactatatatgtgtttgtgagaatgtgtgtatccctgtgtgagagagagaaagaaatagggatggaagagaacactaagtctaatgcattacaattcagttaaattttcaacgtaagtcagactgcccacaagaatatcatttggccgggcgccgtggctcatgcctgtaatcccagcactttgggaggccaaagcgggcgatcacaaggtcaggagttcgagaccagcctggctaacatggagaaaccccgtctctactaataatacaaaaaaaattagccaggcatggtggcggacgcctgtaatcccagctactcgggaggctgtggcaggagaatcgcttgaacccgggaggcagaggttacagtgagccaagatcatgccactgcactccagcctgggcaaaaagagcaagactctgtctcaaaaaaatatatctatatgtatatatatacacatatatatgtatatatcatttatagatatatataatttaagatattgcagagtgtgtgtgttggggcggggaatgacctctgaaaacaggctacagggggcatcgtgtggttgggcacggaccccgaggtgcgaggggaccctgagctcccaaggctgagggtcagaggcagggcctgggagccccagggaagcctccacagccagccacagacacagtaagcgtccttgttcacgacacagggcacacagtgctcggtgagccgggtcaggatcagatgctggtggtctctgcccagtgcgggtctcgcttcctgacgcaggtgcgccttgggctcccacaggaagcggtcacatccagactcaccaggcctgagatgttggaagatggagaagcctttgccacaggaaaaatcctccatgaacacaatgaaacttggcctgcacctgggacatccttctccacggctagtctacaatgcaggtgctctgcacacgctccctggctgaccccaacgcagagaagatgcacgtgagcccacccccacagcaggcgtggacatttgcctcccttttataatagctgtattcaaatgaggtatcctggaagcctcgttctgataggatgagagcagactctgtactacaacacggattggataatagtctccaactctgattggttaagattgtgcaatcagagatggaaattattatccaataagagttgtcaaaaaggttccttgcgcagtggtcgtcatagttcagaagcgaccgggagcgtgtgtggtgcgcgcctgccttgaggccaggcctcagagaagggtgtcccagatgtaggcaaagcgtcctccatgtgttcctggaggaccgtcccaagtccttctccattctcccaacctcttgggcctggtaagtctggatgcgagcgcatcccacggggccgaggcacagggagagaggaacggggcagagggaggaaagcgtgt

SEQ ID NO: 17535 - DNA, 2300 bp, Homo sapien
tctgggaagcatttttctctctaatcttaaaccttctgctctcagaagacttagtggcccttctctattcctctgtcatgattcaacgtctttgaactgtgatgtatatacaggtgtcctcgtgccctgtccccactgtctagtgaagttatgtagaatatgtattccacacacgaattaagttctgctacttaagtttctttttcacagatctgcacacatggatatgaatgaagtgtgtattgaatagagagggtgggagtggcacttccagatgcaactgactggaagacacgctgtcccctgggggctctagctgatgaggacagcctgtgtcctgcggtgtcactttctgaacttggggcaccatgatacctactcagggagggaggttgctggggcttccccgggtgtacctggcccaccatatgttcagctgtctcactggaacaatattgattcagtcattctttatatgataatgggaatcgattattctgctcagtcactgggcattaggtgggttttcttggcaagactgaagctgtggggctcttgttagggaatgagaaaaaggagcattgaaaatccaagtgctgtgatttctcgtcatattaaaataacaaggacaccctctgctaaaatgaggagtgtcctcacatggccttttaaagcgttggccctggctcccccaggcttctgcagggtgaactgctcttcccttagagactccccatatttggggagacactaatcccagagccgtggtctgtctccaggtgatgacaatgggaagaaggccaacaaccccaaccactgcaactgcatcatagaccagatcttcacaggcgggttgcagtcagacgtcacctgccaagtctgccagtaagtgagaggctgcgtgctcggcaatatcaaaccctctggggccgtactgacatcctcccagtctccagagctgtgtgtgctctgagaggtctttaaggaggctatgagataaatgattaatagacgccatgagagcgaaggttgtggggtgggggtgcttcctcttggggaggtcgtagggcaggtgtcccctcgggatgcgagcccttcgtgttgaggtcttggctgttgtctacagccagcagtgtgttcttggaagcttcccctaccattttgcatcttacagtccttgaccagggaccaagtgaaagagccctcttcaagaaggcgtggatcatgcatggtggattgtttttctacgtgcttcgaagtgtgttagttttcattattttatggtttctggttccattttctgatgtagtggccctaattcttctcagatgtggtctctgcttagagcctcaagtgttgagtgcagggagaatccattgctttgttaggtcaggggaccctctcacccaacctcagtgcatgctacaggttttttgtttttgtttttgtttttttcaggcatggggtcttgtgtatgttgcccaggctggccttgaacccatgggctcaagcgatcctccctccttagcctcccaagtagctgggactacaggcatgggccaccgtgcctggctctgttctttacttcagttgaagtttaaaaaccctggacatgatccaccgaaattatttcagaacccgaaatggactgtcacttctaaactgcataagacgagcaaatatcgggaaaggccagtgctgcctgtgtcacgggggccattttctataaggagcatagaccgtttggggccttgtctctgagtattagaaaccgagtttgctctgagcaatttggacctcctcgctgtcccttaactactgaattccattagtaggagattgtctcaagatttaaatcctgtataaatatcgagagtaaatttcccagtctgcaagttttcattttttatattgttaaataaatttctagcaaggaactggccttgtgaaatgcagcattgactgtccagtgcaggccaccgggcctggcctgggcacgctctgtgaaatgtgcaggggtctccagtgttgcctagggtcacaggccccaagttctagatgcagctgagatagacctgtggattcagagcctctgacagggcccatgagtttatcctcctcccaagtccctcagtgactgtgatggtctccagactgggaagtccttgcttgaggagcgcccctcgccttccgagttcacacacacccctccccagggccaccttgggagccaggacacgttgggtgtgagcactgctgctcttgctcctgccccatcccacctgagtgtcactgtgaca

SEQ ID NO: 17536 - DNA, 2300 bp, Homo sapien
tcttcctaaagcccgtgctggcgtttctgattcagcagatctgtggggggcaggggcttcttcactcttaatcagttcccagctgatgttgatgccgctggttcagatgccatactctgagaacccatgcgctcaggtcacagggcacctggctgcttgtgagtttcctgtggtctctgggctggcacagctagttgtagccgatatcctatcagttaattttaacttggagtcttttagagaacagagtcctgttctgacggttcaccgagttgaacagcttggtgggctggccttcccatcgcttctcatccgtctcaaggctgtgcacccgggccctaggcgcttacgtacaacctatgggttctgagatcacagcccagaaacaacccacagttgagctaaaatggctggttttggtcaaatgtgactttgggttctgttttcttttggtacttactttttttcctctgaaaaactacgtgatccttttaattcttacctagaaatcaaaggaaagttacttagtagcttaggtagaatttcatgtcctagtatgatttataagagaggaaagagccactgtggaagtgactatgctgttaccccaagcacctagtgagaataacgaagagccttctgtaagcagcagaaagatgttctaaaaatcacttgttcaaaaatgcattgctgttaaatgttcacatgacaaaatgtgacctctgacgtgcttctgacagaattcccttggaaatgtctgaaaagaaatgtaaggttcttctgtttagaaacctggttgccagagctgttcagcgaggtggcctggccacatggccttggttacgtgcattttgtccttgtggccttcacggcatctttctgttcatcttttgttttgttttgttttgtttttgagtcagagtctcgctctgtcgccaggctggagtgcagtggtgcgatctcagctcactgcaacctccgcctcccaggttcaagtgattcttctgcctcagcctcctgagtagctgggactacaggcgcccgccaccatgcccagctaattttttgtatttttagtagagacggggtttcaccgtgttagccaggatggtctcggtctcctaacctcgtgatccgcccgccttggcctcccaaagtgctgggattacaggcgtgagccaccgcgcctggccattctgttcatcattctttgcgccttcctgtatggatattcttgtcctctgaattttgtcccatgaatttgagatccctctgggaagcatttttctctctaatcttaaaccttctgctctcagaagacttagtggcccttctctattcctctgtcatgattcaacgtctttgaactgtgatgtatatacaggtgtcctcgtgccctgtccccactgtctagtgaagttatgtagaatatgtattccacacacgaattaagttctgctacttaagtttctttttcacagatctgcacacatggatatgaatgaagtgtgtattgaatagagagggtgggagtggcacttccagatgcaactgactggaagacacgctgtcccctgggggctctagctgatgaggacagcctgtgtcctgcggtgtcactttctgaacttggggcaccatgatacctactcagggagggaggttgctggggcttccccgggtgtacctggcccaccatatgttcagctgtctcactggaacaatattgattcagtcattctttatatgataatgggaatcgattattctgctcagtcactgggcattaggtgggttttcttggcaagactgaagctgtggggctcttgttagggaatgagaaaaaggagcattgaaaatccaagtgctgtgatttctcgtcatattaaaataacaaggacaccctctgctaaaatgaggagtgtcctcacatggccttttaaagcgttggccctggctcccccaggcttctgcagggtgaactgctcttcccttagagactccccatatttggggagacactaatcccagagccgtggtctgtctccaggtgatgacaatgggaagaaggccaacaaccccaaccactgcaactgcatcatagaccagatcttcacaggcgggttgcagtcagacgtcacctgccaagtctgccagtaagtgagaggctgcgtgctcggcaatatcaaaccctctggggccgtactgacatcctcccagtctccagagctgtgtgtgctctgagaggtctttaaggaggctatgagataaatgattaatagacgccatgagagcgaagg

SEQ ID NO: 17537 - DNA, 2300 bp, Homo sapien
cgatcctcttgccgtagcctctggagtagctgggactactatagggcttcaccgggtaattccgagtacctgcatgtagccaatacagttctgggaacttgcggctgtagtagtacataaaacacacaatatcattaccctcttggaggccaggcgcagtggctcacgcctataagcccagcactgtgggaggccgaggctggtggaccacttgctgtcagaagttcaaaaccagcctgacgaaaccccatttctagtaaaagttccagatcaacatggtgaaagcccctctctactaaaaatacaaaaattagcggcgtggtggcaggcgcctgtaatatcagctactggggaggctgaggcaggagaatcgcttgaatctgggaggcggaggtttcagtgagccgaaattgcaccactgtactccagccttgggcaacagagcgagactctgtctcaaaaataaaaaataaaaaaaaaagattaccctctcgtaatttttcatgctattaagggaagagacaataaaaaaaataagtaaatattcattacgccagatagtgataaattctttggagaaaaacaaagcagggtaagggaatggagaattttggggggcttgcaattttcattagggtggcaattttccttttcacggaaaaggaggtgtgtgataaagctggaaggaggtgagcgagcatcagacatggaatataaggatgcagagggtgagggggtagggaaagcattttagggagagggtactgcaagcacgaaggccatgaggcaaaaacctgtgctcggcaatttgtcttggccacaaaagctttatcccagtcgtcagtccattaaaccctgtagctttaagtgttgtgagatcacaatctttattttttaacttgtgatggttctggacggcaattgctgtttcctgcaatctgtggatgaatgaatgagcaaagcagttagcagcgggatgagtacaggggagcagctccacacctgacaccttatccaagttcccccagacccttggcgccctggttcccccagaacttcgtttgcattcgtctttaaatgtcttctcagtttgccttgggtcagttatttgtataccgattagacctgtgccgcccactgcggtagcagctagtaggaattggatgtgctttaagtgtaaataccagatttccaagacttgctgcaaaaactgtaaaacattccactaacgattttgcaatactgcctacatgctgaaataatttgactttattgggttgagatatattactgtaactttcttttttcattagaaaaatgtagccactagcaaatgtgaagtgtcaggcgtgtggcgcgcagatgcctctttaaactggatggcgccgggttggccctcactatcagcgggctcccgacaggaggcgccccagcttgcggccgggggcagcgcctaccaggcagttggcaggcagttccagccccgggccacggcactgcagggcccgagccaggttacggcaaccgggggccctgcaaacagctcccgattagggggtgcttttgggtgggaaagcgcaggccctggatggaggcccgacctgcggcgctccagctcatcgccccgcctctttgcggcagagctcaggccggcgcaaaccggttcagtgctaggactgacgtctcgcgccgcccaaccgcagcacgcccccgcctccccagtcctctggaagagacagggaacgtctagccgccagggtcccgggaggcggctctgtaccagacggactatactgagagcctatgacaatagccgaaggtgccggggggggggggggggtggcctactaccaataaaggaaggggaggggcgggccctcgttagcttcccccccctaccacgcttcctcgggcgcgggtctacccagagcctaacgggcgcgcgagtgtgggggaagggcctggcgcgggctggagactgcgcagtgcggtgccggccgggagggggggggggggtgacgtaatctccgtccgcggccgcggcgccccgccccgcgacaccctccgcgaaccgcgagagcgcagcgcaggcggtccgcagcagccgcagctcgggggcggtgcctgccttgcagcctcccctcggcgatcgcgcagccccatctttgtccggcctccgcgctttgttctcggcgcccgggccttggccagcctggccagccgccgagcagcccccacgccgcgctggcgtcgtcctcgcctccctcgccgccgccccccgcgcgcggccgggccttgcc

SEQ ID NO: 17538 - DNA, 2300 bp, Homo sapien
ccccatgttggccaggctgatctcaaactcccgacctcaggtgatccgcctgcctcagccttccaaaatgctggattacaggtgtgagccactgcacccggcccactggaatcctttttgtataatatcctggctgcgaagttagagtttttacacttgcatttggcagatgcaattcaaattggttaccaaaactttgaaatatattgagttgcttctaaaacaaattccatgcaggattgaagagtgggtaggctaagagggtagcaggcctgggaaatgaaccccaggaaactgacttagtcatgcaataaagactcaggtgttaccagtggagagtgtccaggttcttggcgttttgaacaaacaattggacaaaacgcacaaacaaagcaaggaaagaatgatgcaacaaaagcagagatttattgaaaacaaaagcacactccacaggttgggagcctgcctagcaggtggctcaagagcccggttacagaattttctggagtttaaataccctctagagggttcccgttggttacttggtgtacactctatgtaaaagaagtagtggcctgtgatcagcctgattggttgcaagaggggaccaatcagaggtaccttcaatttttcatctgccaggcagaaaagcggggcaggttgcaaagggactagcttctgttccttttgttacctgggcatggaaagttcgggttttccttttgatttagttctaggaagtcagcgtgaattggccttaggttccctgtctccagaccctatttttctgccttacggttcatattgggtttgctacaaggatattcaaactttgtgaattggcaagcaggaatctagagtttccagaacaatggagaggggccagaaaggtataaaaacttttgtgaaaacgtcaaaaataaatatttagttaaaaataaaatttcccattttcagattttgtgaatatctgtaagaatttccaggatatattaattcgctaaagttaataaaagcaagaaacagaaggacgtttcagaatgctattgtttgtgtaacaagggggtgctgaatacatacataattgcttggttatgaataaactggctctggaaggacacacatagctaatagcatcgttacctagggggaggtgaagtgggtcctggagaacagaaagggagattttccaccttacacacatttgccatcttatgattttgaacgataagagtccccccgccccttccttcctctgccctgccccttccttcctctgccctttactctctcaatatcctcttttcatgctttttttttttttttaaatcacttcgggtcctttaaaaaatttacttgcaagaagtacgtacatattctgaataaaattcattttcagatatatgtattacaaatatcttgtctgttctattgtctttcccttttctcaatggggtcttttcggtgtcttatagttacagacacccaatttatcagctttttcctttaggactggcactttttgtgttctgctaacacgttattttcctctcttatggtcataatattctgcgattttattgtctagagttgtattgttcacattcaggtctaccatccgtctagaattattttacttgagataggagtcaaggttcatttccccccaatcgaccttcaattgacctagcactatatattgaaaaaactcttcttattgcattacagtggctacttgtaggaggaaaaagtgactacatagctgcaggtctgtttctggtctctctctttttcattcattgtttttacctttgtgccagttatcacactgttctgattactgtggcattataatcatcttgataactgtatcgtgaattctccaactgtgttcttcgccggaagtccacggaacaccaaccacgaccttcggaatttccctccggaagatgaaggcactgtagttatgcgggtggaccctatcagatctcgggtccatcgggtcctgtgtacaccttgagggacgcccacccaacgcgcatgcgcagcctcaatgctgggattggacggagcctcgccggctgcgtacacgtcacttccgaggcgggaggatgaagttgattgactatggtctctccggctaccaggtaggggctggggaagaaggaacctccgagatgaggcgatagggtctggccttgagctgaggcgacgccccggcttgggtgaggggaagcggtgtagtggtcgagctaaggccgcgggccctgggcggcttccggatccccgcgacgccgaac

SEQ ID NO: 17539 - DNA, 2300 bp, Homo sapien
actttttagagaccagacaggtacaaggtcttgaaggacaaaagttggctgggagagctgggcaccgtggctcatgcctgtaaatcccagcactttgggaggctgagggggatggatcatgaggtcaggagttggacaccagcctgaccaacatggtgaaaccccgtctctactaaaaatacaaaaattagctgggtgtggtggcaccacctgtaatcccaggtactcaggaggctgaggtaggagaattgcttgaacctgggaggcggaggttgcagtgagccaagatcgcaccactgcactcaagcctgggcgacagagcaagactctgtctcaaaaaaaaaaaaaaaagttggctgggaggtaaaagcattttaggtaaagcatagaacatctacgtatctgcaaaccctctgaatttactagcctggcaagttccagacgggaaaggtaggcagttgaatttggagagctaggcaacttccaaactaaggaggggcttcttgattgtgctaaggaatttgaatcacacactgtaggtgatgagggacggtgagaggattgcaagcagctaaaactgtggtagaatgtcagctggaaggaaatcgaaaggaatcctcaacaaggagagggtcgcctttccgtctgctggccctcctgctgtggcctgcggcggggtgggaaggggggttccactacacagaagtgtgacgcgcagggctgggcttcttctaggctgaattcgggacagattttcgcatttgttttgctcaagtatttatgggaccaattaatatgtttagcaacgttgtctgtgggagcagtagaggaactgagaagttcacaaactgtaagagatcctccaaagagtccacaggtctgaggcagcagcacctgggaatctctgggctccagttagtccttcctgactttgactcgttacagcagtgtccagacagggatatgtcgggtcctgtggcagggttcccgtcaggtgggatggtttagccccgcatctgccttcaaagatcccgagattatgccgtcgcagcggccagggcaggagtgggtgcgtggcagggactgagtctaagaggcctggaggccctgtctaaaacagagctgtcgctgggccctctcgccttcaagcagttatcatacagctattcccctttcttgttttcagaccctctcctctaacagcctgcacctgcaagcagggacctccgtggcagcagggacagcgtgtctgtctcggcctccaaagtaccccggagtctaagagaactgggggaggatggtgcgggagcagcgcccgcctccaaggagggcccgggcggcgcctcccgcccctcggtgaccttatgggccaaggctgtgaagggcaggcgtggcgacgcggaggggcccggcgctagtagcccgcagacagcgcggcggcccccagcgggagaggcagcctggcggccaggacagcgcggccgggcgcctccgcgcagtgctctgggagttgtaggcacttgcctctcctctctccttcagctactggctctcgaaactcaaggacctaccggtgggtgggcgcctgtgactcccaggctgcgaacgccgggaactcagtttcttcagaaatgctcgaaccaggacggctcctggagtcctcgcgccctcgcagaaggactacgggccccggcgaccccgggggcggggcttccggcgcgctgccttgtgggcacggtagttccgccgggtctggcttccgcctgccgagcggccccggaccgcaggccggactacacttcccgtcggcccgcctgctctcccgatgccgccttggcgcgagacgttggcaagcagagtgtctccaagatggccgcttggggaaggaggcgtcttggcccgggcagcagtggcggcagcgcccgagagaggtgagatccaagggcttgttgcccccagtgcaggcggctcagcggccggagagcccagcgcggcctccgagggctgcagcagccttccttccctggtttccccgcgctccccctaccctcgccgggcatactgggttccagttccggaggatccgggatccgggtgggagcgaggtcgaaggcctcggcggagagcttaggggaaggggcgttagccgggctgagtaaggtaggcagcggccatgcggggcggggcccgaggccgggccgtgctgaaaggaactggcgcccagcgcaggcctcagggacccgcctagctgcccgcgggccgatcggctgctgaagcacccttcccgcctgggcacgcgc

SEQ ID NO: 17540 - DNA, 2300 bp, Homo sapien
gagattgttgattaaaaaaaaaagtgatactattattaagacagagtcttgctctgtcatccattctggagtgcagtcgtgcgatctcagctcactgtaacctccacctcccgggttcaaatgattctcatgcctcagcctcccgagtagctgggattacaggcgtgtgccacgatgcccggctaatttttgtatttttagtacagacgaggtgtcaccatgctggccaggccggtcttgaactcctgacctcaggtgatccacccgccttggcctcccaaagtgctgggattacaggcgtgagctaacgcacctggccaacagtatcacttttatacagttgttgtgaaaatcaagatgtagatcacttaaaatataaaacagcacttggcctccatacacgtatcacctcatgaaataccgcaatcctctgaggggagatactatcatcccatgatacaaaccaggcagctgagaaacagaagttacacaagcagcccctgagccagaagtgcgttctagaatccctagtataccctctgaatcaccacactgatacaaagaaaagacagccatatccgcagtgtcataccatggaactgttaagaggtctccagcatgaactacgctgacacttggaggcagggctgtatgactcaacaggaaggccaggtactttttagagaccagacaggtacaaggtcttgaaggacaaaagttggctgggagagctgggcaccgtggctcatgcctgtaaatcccagcactttgggaggctgagggggatggatcatgaggtcaggagttggacaccagcctgaccaacatggtgaaaccccgtctctactaaaaatacaaaaattagctgggtgtggtggcaccacctgtaatcccaggtactcaggaggctgaggtaggagaattgcttgaacctgggaggcggaggttgcagtgagccaagatcgcaccactgcactcaagcctgggcgacagagcaagactctgtctcaaaaaaaaaaaaaaaagttggctgggaggtaaaagcattttaggtaaagcatagaacatctacgtatctgcaaaccctctgaatttactagcctggcaagttccagacgggaaaggtaggcagttgaatttggagagctaggcaacttccaaactaaggaggggcttcttgattgtgctaaggaatttgaatcacacactgtaggtgatgagggacggtgagaggattgcaagcagctaaaactgtggtagaatgtcagctggaaggaaatcgaaaggaatcctcaacaaggagagggtcgcctttccgtctgctggccctcctgctgtggcctgcggcggggtgggaaggggggttccactacacagaagtgtgacgcgcagggctgggcttcttctaggctgaattcgggacagattttcgcatttgttttgctcaagtatttatgggaccaattaatatgtttagcaacgttgtctgtgggagcagtagaggaactgagaagttcacaaactgtaagagatcctccaaagagtccacaggtctgaggcagcagcacctgggaatctctgggctccagttagtccttcctgactttgactcgttacagcagtgtccagacagggatatgtcgggtcctgtggcagggttcccgtcaggtgggatggtttagccccgcatctgccttcaaagatcccgagattatgccgtcgcagcggccagggcaggagtgggtgcgtggcagggactgagtctaagaggcctggaggccctgtctaaaacagagctgtcgctgggccctctcgccttcaagcagttatcatacagctattcccctttcttgttttcagaccctctcctctaacagcctgcacctgcaagcagggacctccgtggcagcagggacagcgtgtctgtctcggcctccaaagtaccccggagtctaagagaactgggggaggatggtgcgggagcagcgcccgcctccaaggagggcccgggcggcgcctcccgcccctcggtgaccttatgggccaaggctgtgaagggcaggcgtggcgacgcggaggggcccggcgctagtagcccgcagacagcgcggcggcccccagcgggagaggcagcctggcggccaggacagcgcggccgggcgcctccgcgcagtgctctgggagttgtaggcacttgcctctcctctctccttcagctactggctctcgaaactcaaggacctaccggtgggtgggcgcctgtgactcccaggctgcgaacgccgggaactcagtttctt

SEQ ID NO: 17541 - DNA, 2300 bp, Homo sapien
gggcgcgaggtgagggtggctcacacctataatcccggcactttgggaggtctaggcaggtggatgaggtcaggagtttgagacggatggatcgcctgagcctgggcaacatggtgaaaccccatctctaaaagaaatacaaaaatattagccgggtgtggtggcccattccagtggtcctagctacttgggaggctgagatgggaggatcagaggatattctcggtaaatatatctgacaaaggaacggcttgagccaggtaggcagaggttgcagtgagccaagatggcgacactgcactccaacctgggtgacacagcgagaccctgtttcaaaaaaagaaaaagaaaatatttgaatacacctatgagctgtaagcccccaccactttctggatggccgaaccaatgtacaccttacaggtattaggtctttgcctgtaacttctgtctccctaaaatgtataaaaccaagctataacccgaccacctccagcacatgttctcaggacctcctgaggctgtgtccagggccatagtcactcatatttggctcagaataagctcttcaaatattttacagtttggctttttttgtcaacacaatggaataattactcagtggcgaaaaagatgcaaaaacagggatgaatctcacagataaaatattgagcaaaagaaattggacattaaaagtacatattggactgggtgcggtggctcatgcctgtaatcccagtacgatgggaggccaaggcggatggatcacctgaggttggaagtttgaaaccagcctggccaacatggcgaaaccctgtctctactaaaaataccaaaattaccccggcttgttgttgtagccctgtagtcctagctcctcaggaggctgaggcaggagaatcgcttgaacccaggaggcagaggctgcagtgagccgagatcaagccactgcactccagcctgggcgacagagagagactccgtcttaaaataaaataaaatagtatatattgtatgattatgtttacatgatggtctagagaaacctaattagtcaacaacactagaagtcagggacagtggttacctcaaagggtagggcattgcttggaagagggccctagggaaccaccagtgttctgtattttgatttggatggtggtcacacgggtgtgaacatcaagtttgcaccgtaattagcaaaatattaaaagtaacctgtatgattcactgcacagctatgggcaacaggagtgccccttcaggtgagcaagaggggagggtgtggctctaaggttgagccttgaggagcctaattaaggcgcctttcaaagaagtctgagccccaacagtcctgtgtgtcttcaagcaagtccctgcccctttctgggattcagcctccccatctatggagtggatccagggatccccaaggcctcttcccgcatttacgcctctctttgggagaggtggcatttcactcctatcccaaacaaggcttcacaggacaattccttcccagtagccagtagccacccaggctgccaacacgggtgggtgcgcactcctagcaccagtagccccagggcttcagctgcgtgagaacttatgcatgtctttcacttgtcttagcctctatttgctcatctgtaaaatggagtcaagcatacctatttctcaggcttctggtgataaatctcagcgcagtgattactgagcgccctgtgcgccagggctttgctatacacaggccgtgcacacagcaagtgcttaataaatggtggctgccttggggacgattagaatgtccatacaaaagattgttacgtcttttttagaaggctccttgcgggggtcccaaagttgcacgtgggacaaacgcaagacggaaaagtagccggcgcggcgcggcggcggcccgtgttgttttgtttggggctgcgagaggaacgcggccggcgcggcccctttaagaggtgactggaatgtatcaaaacaaaaaggccgcgcgtccactggctgcgcgccgcacgtgacctcacagctgatttcctggccccccccccaccctttttgttgctgccgccgccgccgagtgtcactttcagcgccgccgcctgcggtctcccaggccgtaactaccccaccgcctgccgcctgcgcccgcgctccagccccgccgcgcgcctgacctttccccgcgcgccccggcccccgccggcgccgcgccgcagccccgcgcgcagatggcgcactcggctgccgccgtgccgctgggcgcgctggagcaggctgcccca

SEQ ID NO: 17542 - DNA, 2300 bp, Homo sapien
aaccacttgccaatcagaaaatctttgaattgggggggtggggtgggggcgcgaggtgagggtggctcacacctataatcccggcactttgggaggtctaggcaggtggatgaggtcaggagtttgagacggatggatcgcctgagcctgggcaacatggtgaaaccccatctctaaaagaaatacaaaaatattagccgggtgtggtggcccattccagtggtcctagctacttgggaggctgagatgggaggatcagaggatattctcggtaaatatatctgacaaaggaacggcttgagccaggtaggcagaggttgcagtgagccaagatggcgacactgcactccaacctgggtgacacagcgagaccctgtttcaaaaaaagaaaaagaaaatatttgaatacacctatgagctgtaagcccccaccactttctggatggccgaaccaatgtacaccttacaggtattaggtctttgcctgtaacttctgtctccctaaaatgtataaaaccaagctataacccgaccacctccagcacatgttctcaggacctcctgaggctgtgtccagggccatagtcactcatatttggctcagaataagctcttcaaatattttacagtttggctttttttgtcaacacaatggaataattactcagtggcgaaaaagatgcaaaaacagggatgaatctcacagataaaatattgagcaaaagaaattggacattaaaagtacatattggactgggtgcggtggctcatgcctgtaatcccagtacgatgggaggccaaggcggatggatcacctgaggttggaagtttgaaaccagcctggccaacatggcgaaaccctgtctctactaaaaataccaaaattaccccggcttgttgttgtagccctgtagtcctagctcctcaggaggctgaggcaggagaatcgcttgaacccaggaggcagaggctgcagtgagccgagatcaagccactgcactccagcctgggcgacagagagagactccgtcttaaaataaaataaaatagtatatattgtatgattatgtttacatgatggtctagagaaacctaattagtcaacaacactagaagtcagggacagtggttacctcaaagggtagggcattgcttggaagagggccctagggaaccaccagtgttctgtattttgatttggatggtggtcacacgggtgtgaacatcaagtttgcaccgtaattagcaaaatattaaaagtaacctgtatgattcactgcacagctatgggcaacaggagtgccccttcaggtgagcaagaggggagggtgtggctctaaggttgagccttgaggagcctaattaaggcgcctttcaaagaagtctgagccccaacagtcctgtgtgtcttcaagcaagtccctgcccctttctgggattcagcctccccatctatggagtggatccagggatccccaaggcctcttcccgcatttacgcctctctttgggagaggtggcatttcactcctatcccaaacaaggcttcacaggacaattccttcccagtagccagtagccacccaggctgccaacacgggtgggtgcgcactcctagcaccagtagccccagggcttcagctgcgtgagaacttatgcatgtctttcacttgtcttagcctctatttgctcatctgtaaaatggagtcaagcatacctatttctcaggcttctggtgataaatctcagcgcagtgattactgagcgccctgtgcgccagggctttgctatacacaggccgtgcacacagcaagtgcttaataaatggtggctgccttggggacgattagaatgtccatacaaaagattgttacgtcttttttagaaggctccttgcgggggtcccaaagttgcacgtgggacaaacgcaagacggaaaagtagccggcgcggcgcggcggcggcccgtgttgttttgtttggggctgcgagaggaacgcggccggcgcggcccctttaagaggtgactggaatgtatcaaaacaaaaaggccgcgcgtccactggctgcgcgccgcacgtgacctcacagctgatttcctggccccccccccaccctttttgttgctgccgccgccgccgagtgtcactttcagcgccgccgcctgcggtctcccaggccgtaactaccccaccgcctgccgcctgcgcccgcgctccagccccgccgcgcgcctgacctttccccgcgcgccccggcccccgccggcgccgcgccgcagccccgcgcgcagatggcgca

SEQ ID NO: 17543 - DNA, 2300 bp, Homo sapien
atcaggcacctactatgtgcctggttctgggctatgcattgggaacacagcagggaatgaggctcggatggtctggagggagagctgtgttaaaaactgagtcagtaacaaagacatcagcagcataagtgttgtgcctcagtctggggaccatgatgagaaggcctcttaggggtgttcatttaggaagcggtctgagggatgagagggaaccagccccaggaggcttgagtggaagaatgttctgggcaggagcagcaagggtgaagctgctgcggcaggaccatccctggcacatttgaggggcaatactgagactcttgaacatcccaagaagcagagtgcacaaggcggagtgtggccttgtgcagaagtcaaggctgttggccagtgcctgaacccagaaaactcgctggactagccttgcagttctggtagaaaggaagctgctcctggatgcccattttacagacggataagcacaggtcaccagggatgatatggcaaggatggaggcagcccacagtgttttcaaactcacatttcctgggcacctagtgagtgccaagccctaggccaggtgtttccactcctgaactcatgaaacgctttcagagaccttattgtccccatgggataggtaaactgaggcacagagctgctcagtgacttctttaaggtcatccagctagtaagtggaggaattggtattggaacccatacctatctgagccccagactcatgattttccatcccactgcctgggaagggtgaacaggagacgcaggaagagaatggtgatggctgcaaggcttccctcttatctcctgtggctccccactctgtgcatggggccctgcatcacccccactttacacctgggcaagcagaggtcaggcccggcctcaagcctttctagcaggtggtggaatctgcttccctcacgtgaggtccctgacagggtacacatgtctgcctggaggccaggggctgaccccttgacctttgcctggtacattctgccttcactagccctggctttacatccagagtcatctgttcccagcgccagattggtcagcggttcctgaaatcccccgaggttccgtgtgggagcagagggaggactggcccatccagccattatgcagatgggcagactgagatcctaggaggagaggagagaacgaaggtccaggagagagccaggatggggcctcggggctcgcgggataaaatgcaccgcatgccgcctcactccctctgagacacggtttccccctgtgtagaacaggggcagcagtaaccagccacgaaaactcctcgtgctgcctcgtcaccgggcatcgctgagctcaccaccgaccccgcgccctggccgggcgcctggagcgcgggcgcgggcgacgtttgctggcgccaggccctcagtgcgtgttagcgagcagcgccgggagatagctgtcaccgccgcccgctcacagatgcgtagactgaggctcaggtgtcaccacctgaccaaggctagttccgctacaaagctgccgactcggatccgaacccgggtccaatttacagaaaaggaaactgaggcccagagacactagggagcttgctagggtgaggcagctgcaggttcagagagccaggaggcagcccagcagcgcacttttaacccccgcccacttcggcaggcccagccgtgccacctttagggatctcgggttttttccagacgacgcacccaggagaacgcgcccgcgcatcgcacccgccggggctgcgggtctgggggtgccgggctgggcctgggcgcctgcagggagcagcgggctcagtgggtcccgggagtgggtggggcttgcatgttgacgggcagcgcgaggggcgcggctttagtccagggggcggagcctgaccggacctgggtttttcgggcggctggcggacttgacagagagcgggaggggcccggatcctgggcctaaggagggtggggcgtgtgcttgacaggcagggacaggccggcgtctgataggcagaggacgggccttggaaacgaaaggaccaatcgggcacgcaggggcggggcctgagtcagcgcagttcggccggggtctccccggcgctgcccagtctgtctccggcgccgcccgtcgcggactcgtccttgctgcagtcgccgccgcagtcctcgccgcagtcgccgccgccgccgccgccgccgccgctgctcctccgcctggcctgggccgtctgcccgcagccatgagcgtgctcggccccggtggagcccgca

SEQ ID NO: 17544 - DNA, 2300 bp, Homo sapien
cctgggccagcccgggaagcaagagggcctggggtcatggttctaggggctcagtcctgagtcaggggtgttggggggtggtgggccaagctgaggggagcaactgggtgccagtgtcttgggagggtcccagaggagggctgctgggcagcagcatggaggacacagcattgtggcagggccccacgactgatgcccacatgccgtccacgcctgcccttgtccgcgcctcctggcgctgcccacctccatcaggcctgtgtgcccagtggcttctgcagatgcctccccgaagcagtggccctggaaacctcaaacagcctcttgccaggggcatgaaggccatacagggccaggggaggcagaagcagtttgttgggccccttgcagcttccagataccaagcctgactgcggcagctccagagagggccccagactttcttcccctgaccccagtcctgggcacatgtccttgtcacctccctgccctgcactccagggccaccttccctggtttctctggggaggccatgtccagctgtccctctcccagctggtcccctgcccagggtggccggcaccacctcctgccatgtggcccatggccgggattgcacctggctctgctgacacctcctggcggctatatcgagtgccctgactgtccttgcctgcatcactgtgctgatgcccccaagggcttccaaggcccgtcccaaggtttacatgtgccagtgtgtgcggtgatgcggtgacaggccagggggctgcctcactggggcagggctgcgaggggctgtggatgccagcggtgtgttcagacctaatcaggaggtgtgtgggggctggggagcactgctgcctgggagggttgctttggcggtgtcagttggcagctgaggcacacgttggaggcctgcccaggacggctctgggtatggggatggagacagctcccatccccttgtcattctgctcttgcctggcttagccttctggtcaacccatagcctcctgccgttggcatggcacacggcatcccggatggctggggcagaccccagggtggcgcgggcagacactcgttgggaaagtctgcagggacttccaggtggcagggctggttctaggccagctccctacctacctctcagggctgctgttgagggtgaatgagacctggcaagtccagggagcccctaggtaccagacagcactgaatttgaacctgatgtctgtgctagcatttccatcaccaagaaccccgtttttggtatgtctcatcatcaatcccatgctttgtaagattttaatagtaatgataaatcccagcctttgggaggccgagacaggaggatcatttgagggcaggagttcacaaccagcctgggcaacatagggagagctcatctctacaaaaaacataaaagattagctgggcatggtggcacacgtctgtagtctcagctactcaggaggcagaggtgggaggatcgtttgtgcctgggaggttgaggctgcaatgagtgccacagcactccagcctgggtgacagagtgagaccctgtctgtttaaaaaaaatagaagtaggccaggcacggtggctcacgcctgtaatcccagcactttgggaggccgaggcgggtggatcatgaggtcaggagctcgagaccatcctgtctaacacggtaaaaccccgtctctactaaaaacacacaaaaaattaaccgggcgtggtggcaggtgtctgtagtcccagctactcgggaggctgaggcaggagaatggcatgaacccgggaggcggagcttgcagtgagccgggatcgcaccactgcactccagcctgggcaatagagagagaatcgtctcaaaaataaatacaatacaatcaatacaatagaatacaatacaatagaatacaatacaatagaatacaatacaatagaatacaatagaatacagtacaatacaatacaacacaacacaacacaacacaacacaacacgtagtgataacagtgaagcacagatggcgtttgttcaggtttgttttccgttctgcaggagcagcagcactggcctgtcgacagtgcaggtggctggcaatggccttgctgacctcgagccgggcccacgtggggacctttggagcacagcctacgatcctggtgcaaggaatgtcccattcttctgatgctctgggagggctgagcatcacttgtgggtccccctgccctgtcatggcctcttaaagcctgagcatggggcctgccccacagtgtgggagcctggggcc

SEQ ID NO: 17545 - DNA, 2300 bp, Homo sapien
cacagggaaagggtgggactcaaggggctgggggcaaggtcaaggcccagggtctctgtgcagagctttaatttttaacagaaaatattttatattctggttacgaaaagcctgacatcaggaataaaagctacctataattctcattacttagggcagttttttttttcacctctgcagagaggctggtcatatccatggtgaccatttatgggccacaacaggtccccatctgcgcagtgaaccctgtgctgagcaccttgcagacgtgatcttgcttcgtcctgcagcactgtgcggggcaggtgggtggcatttctgcctcgagctgttttgtacatgaggaacccaaggtgcagaggagggcaccatgccagggtcgcagagctggagtttaccacggctgcgccactccaagcccagagcctcagaagttcagagactttggcccagaggcaggatagaagtggcctcagaagctgctggccctgtgtgccatggtttttcctgttagaatgtgctgagcctctgcatctccagactctgttgccgtttcttgttgagcacgagacttgggcccctccttccgcctcagggagggctccctgtggcaggggtgctgtgagccatggcctggcctgttggggtctgcgagtcaataaactcaggagtgactcctggccagacccctgacttgctgtgcagcctggggcaagtggcttcacctctctgagcctgttccccaagtaaagtgaggttgggagcccctccctgtagggctgtgggagtatctggagtcacagatgagaagggccctgcctgtggccggtgctgtggctgtgacagactcgcagtgagacccatgcggtccctgacagccagggtgttgctgcatcttaaaatgagataaaaacgctgcgcacaggagtagtgactaggcgattgattcatggggtgagcagttagcaggcaggcacccagtgcatgtggcggcagctgctgctgctgctgctgctgctgcttctgtctgtggacgctgttgtttcctgaagcctctggggcctggcagcggggtccccggggtggctttggtggaaaggctgcaggtatctgcttgcctggctcctgcactctgcccacctgccccaggatggaccctgggacccctgtccctgccaaggctattctgtttcctgttgttctggccttgtcttcccagtagcggtaaccacccttcgccctccatctgggctgggttggctgctgggccccggtgcgtggctctgagatggggccacaagtctgtgttgcaccgtggccaaggctggatctgaacctggcttggaggcggcttcagagactggggtcttcttggcaggcggcagcagggccatgggcagtttctaagccccagtaccagcagccagggtgagccagcagcagggagtggcgggtggtgggtgagggccaagatgtggcaggatcatgcttgggaaatgatgaggcagaagctcccacaagggcaggcatgtggccagcatgtctgtactgggtggtctccgggagccgtgtcactcccagccctgctgcctgatggtgccagagcaccaggtgaccctggcatctctgatccttgcttctcctgcctgtggaatggcggctatgccttattcaaagggcggccctgactacagggagctctctctgcatgccagccccactgtgcctggagccccagaaatgctgaccctccgttagtaccagctgagtgctgtgcacctggccaggctcttgtagccagcctgagaggtgtggacactggggcctctcgcctgtccctaggggtggagtgaggaaggtactgccccgggactctggcctgcctggtgcaggggaggggagagagccagcgcttttcaggggagggagagaaacgggcatcgggtgtcggcctccagggtgagcagggcccagcagagctagcctggagggcagcccgggctggagtccccgcctgctccaccgcctgttgccctttctgggggcctggccttcctcatcttggatgcagtatgagccccatcctgctacctgcagctaatgaagcccctgtacagtggctgctgcaggtgctggctggacccccgctgggccccttctcaccccacatcccattgactagtcaggcagggcagtgaggacacctcacagatggggaaactgaggcccagggaggtactcaagatgtgcccagtgggcagggctgagataaggccctggagtccagcctccaggcctgg

SEQ ID NO: 17546 - DNA, 2300 bp, Homo sapien
tagggaggggcggagacctggcctgactcacagtagtcatcttgggtgtcgagcccctgggcaggggccctgtgtgtgtgtgtgtgggaaggggggggtggtgttccaggcgtgaggatgccctgggcacagccacttgtcccaggagctgtcagaatcttagacccagaggagccctgaggtgttcccgtccattcccttgcccctttctaggccaccagagtaaggcctcgagggagggatgtctcaggccccattcctcttgggacagctgagtggtctctgagggtgggagctggtttgaggcttcttccgcagctggcttgggcttccccatctgggaaatggagcaggggcaggtggggagctgagtcatttccctccttggtcactcggagggagaagaaggaagtttcctgagagcttttggtcccctgggaggctgtttctcccaggaggaggaggaaaccaggacacagtgtgccaggcagggcagggtgggggctgcagacttctgcgatgccccttctttctccactgcagccctaagttgaggacacacctgattctgcgtactggctccaccatctggtagttctgtaattaagcaagtgaccacccctctgtgcctcagttccttcatctgtaaaatggagccaatgagcttatccaccacagatggccgcagtggtaatgaaataattctagctgggtccatagcacagagctcagaacatattgagtgctccgcctggctgttttaccagccaagtcaagtgctaagcactttaggtagactcatctcatttaatccttgctacagccccatgagtgtagtgatttctactgacaacagggaaacagaggcactgagtggtgaagtgacctgtcccacagctagtcagttgaggtgggattcaaacccagggcagactgatgtcggtgagtgctgggctggatttcacccaccagctgcctggggccaggatcctagggctggtggggcctgcagatcactctgctctgagccgccagcaatctgggtgcgggccagagagccgtcctcctcggttagaatcctgcagccagtctccctgctgtgcagacacataattatatttcacattaaaggggaagctggaggccaagggggccaaggagccctttgaggctcatgctctgggcacagactggcctcctcggcccaattctgaggccctagggccgagctgggggtcagactggtgacaaaatggagttcccctgggtcagtgtccaggcgagcaggtctgtctgccaggatgaaagacttggcccctgcgggaggctcagagatatgaggcccagacaataggcctcagaaagctgggagggcagggcatttggggacaggttgggaagaaagcctgagcctccagagacaggggctcgaaagagaagggggtcacatggggatccggtcggcagagagaggtccagggaggagcacagagaaggcaggagatgggagaagccaagcagctcaagatggagaggagaaaaatgctattagggtgggatggtgtgtgtagagggtgcgtgcctggtgtgcaggggaaaagggctctgtgggaatgcacaagcttagacctgtgtgtgcgtatgcacacgtgcagatgccatcctgcatgtgcacatatgagcgagtgtgcacatgtgcccctgcgaacatcatgcatgtgggggcatgtatcctgcatgtttatgcctgtgtgtgtgctcgccatgcacctgtgcgtgcgcgcgtgtccccggcggacgtgcctgcatgtgtgtgtatgtgtgtgtgcgcgcatgtccccgggaagtcgtgcctgtgtgtgtgtgtgtgtgtgtgtgtgtgtgtgtgtatatatatatgtgtgtgtgcgcgcgcgcgtcccagtgcgcaagtggctggcggtgtgtgtgtagggggcggcccgggactaggaggggctcggggccaggccggagccgtggtaggctggtgcagcggctgcgcggcgcggcgcggcgcggggcgggcgtgctctccgcggagagttagaggagttgccgagctgagctccggtggagcgaggcgcggagctgggtgcgcgccgagcctctgcctcccgccgcctcctcgccctccattcctcgctccccgtcttctcccggccacaccgccactgctgccgcctccctgggaacagtagccgggggagggggactggcgcggtcagagcctgcgaggaggtgcggggcgccggggcgtaggggagcgcgccgggccctgc

SEQ ID NO: 17547 - DNA, 2300 bp, Homo sapien
cccggctaattgttgtatttttagtagagatggggtttcaccgtgttagccagggtagtctcgatctcctgaattcgtgatccgcccgcctcagcctcccaaagtgctgcgattacaggcttgagccaccgcgcccggctggtgtcctacttttgatgtcttctgctaaccgtcctaccttggacaggatctaaactttgtctgctattctgctgccccatcctcttcccagactatgaaaagagagtttcagtatgacacttggcaactatcttaagggtgaaaaatggcatctaattacttctttgggtttctactttcactttttaattttaatttttttgcctttgcgaactcttaattattttgcagctcattgatacattttttaaaatggttcttgatatgtattccagaagtttttgttgttttctggttcttgtcagcccatgttgccggaaataaaattctttcaacttgttctttaacaatttacagtatccatatattccttcctgttctagaggcaatagagtgagaacacacacttaggagccaagctggcctgagattaagatccaccagcaatgtgacctcagtagcctatttacattctgagtctcatagggttggtgtgataattaaatgaggtaatatatgaacaacacttaaaacagagactgacactggtaaggatggactttcttgttattactatctgaaaaagttgaaaaattatgagcctgagtaacagttatacatcttacccaatggttcactaacctctggtccctggctaccccggccccctctaccatgcagtcacccacacccatgcttatactgatggagaggagtcaactatgagctattcactggatgacaagcccagctactgtcacaggtgcaccccaagtccaggacagaatgctagcagatagctgctggtctgagaaatgtcatcatcatataagcctgagtgaaaacacagcccctttactactaagaaatctgaaaacaaacaaacataaacaaacataattttaaattttgtattttttatgatgtcatttgtcccaacagccatctgacatcaatagccctgattactaaaagtctcaacgttatagaaatgttctcctcctttttgaaaaccatgttcatttttcccccacgatacagcgctatctgcaaagccttgaactgataacatagctcaggggctaactcttgtcttagcagagtagcagctgaaaaaagaagacaattcttaacaaacagggagatcaggaatgctcacttctaaaaacattatttattcagggcaagtggtatttgtgacgtgcgaatgaagcttaaacttcagctttaatttataagaattaggaaatgcagattaaatctctgatgccatattgtgaattcagtaaaggttaactaatctacgacgcaaagacaaacgttagctatcctacgcttattattctggaaatttaatgaaaattaaacaagaagactcacagagtataagaattgtccccccgccttaacagtgttgttttcagcctctgttgcctgaaacattgcagaataattcagatttttttaaccccacctttttattgagtaaaaccaaagtactaaactaataaatgtgaaaaaggatgttgggtttaaaaagaaaaagcctcaagacatcgagcctcttagatattttaaaagtgaagactgagaaggaacgcactgttgctaaacagaattataggattatggtcaatttataatcttttcaatatgggatttgaatgttctgatattagataccgtgtacgtgctttatttatatagtacctcccgagaagaaaaaaaccagtattggtttatacagtatttggcatgctattcacgtatgcagtgatgtatacgatgtcagagctagaaaatagcttagatacgatttggattcagcgctgggcggctccgcccccgccaagccccgccccgtcccctcaaccccgcccggctccgcctcgtcccctccgccccgccccgtcccctccgccccgccccgtctcctccgccccgccccgaccccggggcatgcgctgtgcgcccggccggcgtggctggctgtttgaggactgcgcgcggagctccgtggcgggtgtctgaagtcgtgagtttactgcttgtaaggaacatagcgatcactgggaacctggaagtagagactcctttctgccatccatccgtccctcgggctgctgcgaatccccccgccggcctccaggaccccgggc

SEQ ID NO: 17548 - DNA, 2300 bp, Homo sapien
ggcccccagttgatgctcaggtcccaggaaggtaaccaggcttgtgatggatatatggctccaggtggatacccaggatccagggagaaatcagggacaagtgggcaccaggcctcagagggatacctacgaccctagtgacctcaggccccagttggacagtaggccacaggtgaactccagtcttcaggtggacatcaggccccaggggaaatacaggtcttaggtttactcctaagacacaggtggacacaggtcttaggtttacccctaggacccaggtggacaacaggccctgggtggccactggccccaagtatccagtttcctaagagctagggtgggcaaccccactgggcactgtggccaggcctgccatgtctccttgttcagctgccacattctgatggggagggcgggaggtgtcgagagaccacagtctaagttcttattacctgattttatttcacctccagtgagtgctcactctcctctcacctgacggatttactctcatctgcaggtggtttaaatgtgaaggtttactgaagatttaaagagtgttatcacagttgggatgatttaaactaacagtacacactgcattttaagaaaataattaatccccagaggagatatgggttatggagccatgacaaattttcaacattgcttcccttacttgtttccaaataaaggatttttgattccccattgatgttggatgagaacgctgagtgtgcaagcaaaatattttttaactaagggcccaatagtgtcttaaatatgcatagctgagtctgcaggtggagagtgacgggtttgttcaaaatgtggtatagagtggccttgggtctcacctgcctgcccttccatcctgtggcctcccagtgaggcacccaagccccgccttagggcacaccccttcacagggccacataggccccagtcctcacctatggggtcatctccaaatggcacagcaacaccttctgtccaggcccaggccagggtcccagtatctccaggggggcctggcatccaggcatctgttgagaactggcccaatgttggggtctggactagcctgtgggacctggacatggtggggcaactgcacgaggactcatgcctggctttatgtgtagcaccaggaaaggcacattaatcgtattcatttattgctcacaaaacctctgaggtgggtgccttctccatgtcacagatgggaatgacaagaaataataaggttaaagagcatgctcatggttgaaacctggtcaggaactcagaactggagtctatagacccctacctgtgacctctgtggccggaagaccctctctcaccgggtttgtgtttgcagcatgtcctgtccttccctaagggtctcaggttctgaggcatggtgagggctgctggagcccatcactgagctgcagaaggagatactaacgctggccatgccaccctccaggcagacacaactggagttgaaaatcgagatggggcaaggctgccaggaacagagggaggcaggtggagaataactcaccagggaggggtttccctgctacagctttccagggccatttccactttctgggtggcattttggggcagctcacacagtacacccacatagccagtccccagggtcacaatccccagatgttgttcatcttggtgacaggccctgtgcttctccaggagcctttgtgtatgggcccttcccaggtaagcgtgatatgtcctggctgtcgtcagtccagggcactgccagcattttcctttctggtcagggtcaaagttttgttgaccatctccaggatacgatggccagctggcccttggagagccagtcactccaggtgacacggtttggtactggacgtccgcggtcccctctcccacgccgccccatactgggccccgtatccagccgccaccgctgctgcagcaagaaccgccccactgcctccgcgcagctgccattgtttaaagggacctcagcctgacttccaggagctacgcaagacttggccaagtcaatgcgcatgcgcgaggagcgagccgcttctccccatcacagcgattcccagggttgtcatagaaaccactccctggggcttggcaaagcaggagccctccgtggcagggcttcggtgtcggggctccgaggctccggcctgacttctccacggggtccacaggagcgtctccggatgccaggacctgaaatgggccgaccaggatgaggaaaccacaggcagaggccggggaagcagcgcggcatccca

SEQ ID NO: 17549 - DNA, 2300 bp, Homo sapien
gatgaatcaaaaaaaaggtttaattctttcagatgagcccacaaatccgaaagcattttcacagatagcttgtttctagtttttaccatgggatatttgttatttcactataggactgcatggactccgaaatgtctcctcgtagatcctacagaaagagtgtttccaaactactgaattaaaacaaatgtttaaatgtgtgacataatttcacatatcacaaagcattttcacagacagcttgtttgtagtttttatcacaggattttcagtttttcactataggcctcaatgtgctttgaaatgtctcttcttagattctgcaaaaaacatgcttccaacctgctgaatcaaaacaaaggtttactctgtgagataaatacacacattctaaagccttttgacagacagcttgcatgaagtttttatcaggggatattatgtttttctcaatgggtatcaaagggctgccaaatgtcccttcacagattctacaaaaaaagtcttaaaaactgctgaatcagaacaaagatttagcttcataagatgaatccagaaatcgcaaatcatttcactgaaggcttgtttctagtttttatcacaagataatcagttttttactataggcctcaatttgctcaaaaatgttccctcgtagattctagaaagaaagtgtttctgacctgctgaatctcaggaaaggctaactctgtgagatgagatcagacatcagaaagcattttcatacatagcttctttgtagtttttatcccaggatattcagtttttcactatatgcctcaaaaaattttgaaatgttccctcatagacagtacaaaattatgagaggacatttcaaatgaggggacatttcaaaagattgtacaaatctatgaggggacattccaaatgaggggacatttcaaaagagtgtatccaaccttctgaatcaaaacaaatgtttaactctatgtaataaatccacacatcacaaagcattttcaccatatcccccaaaaaggaaactcttgttctcctactcctattggagggctgcatgattcctataggatgaaaagcaggcagccatggctggcttttgcctggtaatctaggctctgtttcatttcatctgcacgtcctttctcatagtggagaggctctttcattgggctgttgctgggtgggactgcctctcgccacagttctattggctgccggggatttcagggagcaaaagggacttcgggtaggcaggccatgctccaggttgtgtattatgatctcgttgtggtgcctgaggttgtttgcactttgcaggagacttttgggtcctctgacaggaatccttgaacgttgcttggactccagcacaagtcagctcgttctctcatgcaaaccttgattttcctttgttttcatgggggcggggggggtcaacagtgcccctcaacagcactgctggacacccttttcatgcttgcaatcgccacagacggcctctgagacaatgtctcaacctcctctgcacccgtgagaggccagttcaaggtgtgagaacactgctacgccttggacttgcctttgccgtagttcctgcctttcccagagagcccctgcgaggcccaggatgaagggaggcaatgaggtcaaaggcccggccatctttcgctgacacccgcctctggggtctcaggtatgagttcatcacccaaagacccctcaacaggtcaccagactatattccaatccccatgggacccgattcctgaacgcagcctctttcgggaagggagtcagaagagcagtttccagagaccaactcacactctcgaaatgcctccttctccagcgggacccgaccttggagacggtccgagggggccctaaggtcgagacttttagggtcctgcagtggattatcgtaggcagcctttttcctgataccagaccagctctgcctgtaccattttcctctgtttaagcaggctaacagctctgacagctgggcgcccgagactgcctcgctaaagcgcatgcgctagtctcagggcgccaggcctgagctgtaaattctggctagcgtcacaatgaatgccaccgtcacctagcgacaaatccctgcggcttggcggagacagagaactttgtggaggtgcctaggcggtggactctcgcctgtcttctctgtgggatccacgggatagtcccatgatcctaggagagggcagacgtgagccagcctgaagaaacgccaagcaggagccccaggaataaaccgcaaaatccctaaggatcca

SEQ ID NO: 17550 - DNA, 2300 bp, Homo sapien
caaaagatggccgggcccttggcctcactgccttacttcatcccgggcctcgcagaggatctctgggaaaggcagaaaccgcgacaaatgcaagtccaaggtagagcagtgttctcacacttcgaactggcctctcatggctgcagatgaggttgagacattgtctcagaggttgtctgtggtgattgcaagcctgaaaagggtgcccagcagtgctgtggacgggcactgttgaccccccatgaaagccaacaaaaatcaaggcttgcctgagagaacgagctgacttgcgctggagtccaaccaatgttcaaagcttcctgtcagaaaacccaaaaccctcctgcaaagtgcaaacaacctcagccccaaaaggagaccacgacccacaacctggagggcagcctgattacctgaagtcccttttgctgcctgaaatccctcgcagccaaaagatttatggcgagaggcagtcccacctagcaacagcccaatgaaagaacctccacaatgagaaaggacgtgcagatgagatgaaacagagcctagattaccaggcaaaagccagacatggctgcctgctactcatcctataggaatcatgcagcccttcaatagaagtgggagaacaagagtttccttgttggtgaatgtaatgggaatttacggttttaaaattataacagctgccagtcattaaaacgtgacagcgtttagaagaaaacactcatgtaatggattcccatgaggatcgtcctctgtgaactgtgaaacatttagtgtgtaagacgttgagccagccccaggaaaccctaggccgatgaggaacatggaagtcagcaaaagaagaggcaagtgcggtggccacatcccacccagcatcaacccatcacacttccatttggctctaggtataaaagcccccaaattgggagtttgtcaggatggcctcagtttgcactccaaatgttccctgcaccttggagttttcccacctgaacaccgggccatgggtgtactggttgtgcaattaagggactgaggggatgcagctggaagcaccttcatctgtcttcaccttttttgcaggtagaggtgtgggacctcattcaccccacaacagattgtatcctctcccctatctgaccttattgctgctcacactttctgtccctgaatgaaatccgaagatgatggaggagtgccccctcacgacgggaagtacctgctcggctgggaactgaattcgatgtaaattctgccctgcggacagaactgctagtgtctttccctgacttggacgcaagacggtaaaacactgggagatgtcctttcttgggtgtggtgtgctcctgttctttctagaagaacatctttttttttttttttttttttttttttttttgcagtggaggtgattttgacccaggccggtctcagccagcctccgaattcactgcggattcatgatccacagaaagataaagagcaccgagccgcgcagaccaagcagagccacacagacaggacaacataaggttgggagactcaaaaaaaaagaagcgctgcagtgcattagccacattcctttaagtcgactacacttacaggcacatacacacacacacacacgcagacttccaacacttgtaacactcccacagaacacacagaccggcagcttctgaggctgcatgtttctgaaggaaaccccacctaagagagagcaaccctgaggaacacaggtgggctgtatctaaaaatcacagtggggcaagtttcaaaaagacttacccctacgatgactaggcaggcctgaggcatcctgcagatccttttggatccttagggattttgcggtttattcctggggctcctgcttggcgtttcttcaggctggctcacgtctgccctctcctaggatcatgggactatcccgtggatcccacagagaagacaggcgagagtccaccgcctaggcacctccacaaagttctctgtctccgccaagccgcagggatttgtcgctaggtgacggtggcattcattgtgacgctagccagaatttacagctcaggcctggcgccctgagactagcgcatgcgctttagcgaggcagtctcgggcgcccagctgtcagagctgttagcctgcttaaacagaggaaaatggtacaggcagagctggtctggtatcaggaaaaaggctgcctacgataatccactgcaggaccctaaaagtctcgaccttagggccccctcggaccgtctccaaggtcgggtcccgctggagaaggaggc

SEQ ID NO: 17551 - DNA, 2300 bp, Homo sapien
aggtaaccaggcttatgatggatatatggctccaggtggatacccagaatccagtgagaaatcagggacaagtgggcaccaggcctcagagggatacctacgaccctagtgacctcaggccccagttggacagtaggccacaggtgaactccagtcttcaggtggacatcaggccccaggggaaatacaggtcttaggtttactcctaagacacaggtggacacaggtcttaggtttacccctaggacccaggtggacaacaggccctgggtggccactggccccaagtatccagtttcctaagagctagggtgggcaaccccactgggcactgtggccaggcctgccatgtctccttgttcagctgccacattctgatggggagggcgggaggtgtcgagagaccacaatctaagttcttattacctgattttatttcacctccactgagtgctcactctcctctcacctaacggatttactctcatctgcaggtggtttaagtgtgaaggtttactgaagatttaaagagtgttatcacagttgggatgatttaaactaacagtacacgttgcattttaagaaaataattaatcctcagaggagatatgggttatggagccatgacaaattttcagcattacttcccttacttgttgtttccaaataaaagatttttgattccccattgatgttggatgagaacgctgagtgtgcaagcaaaatatcattttttaactaagggcccaatagtgtcttaaatatgcagagctgagtctgcaggtggagagtgatgggtttgttcaaaacgtggtatagagtggccttgggtctcacctgcctgcccttccatcctgtgccctcccagtgaggcacccaagccccaccttagggcacaccccttcacagggccacataggccccagtcctcacctatgtggtcatctccaaatggcacagcaacaccttctgtccaggcccaggccagggtcccagtatctccaggggggcctggcatccaggcatctgttgagaactggcccaatgttggggtctgggctagcctgtgggacctggatgttggggggcagctgcatgaggactcatgcctggctttatgtgtagcaccaggaaaggcactttaatcgtattcatttattgctcacaaaacctctgaggtgggtgccttccccacgtcacagatgggaatgacaagaaataataaggttaaagagcatgctcatggttgaaacctggtcaggaactcagaactggagtctatagacccctacctgtgacctctgtggccggaggaccctctctcaccgggtttgtgtttgcagcatgtcctgtccttccctaagggtctcaggttctgaggcatggtgagggctgctggagcccatcactgagctgcagaaggagatactaacgctggccatgccaccctccaggcaggcacaactggagttgaaaatcgagatggggcagggctgccaggaacagagggaggcaggtggagaataactcaccagggaggggtttccctgctacagctttccagggccatttccactttctgggtggcattttggggcagctcacacagtacacccacatagccagtccccagggtcacaatccccagatgttgttcatcttggtgacaggccctgtgcttctccaggaccgtttgtgtatgggcccttcccaggtaagcgtgatacgtcctggctgtcctcagtccagggcactgccagcattttcctttctggtcagggtcaaagctttgttgaccatctccaggatacgatggccagctggcccttggagagccagtcactccaggtgacacggtttggtactggacgtccgcggtcccctctcccacgccgccccatactgggccccgtatccagccgccaccgctgctgcagcaagaaccgccccactgcctccgcgcagctgccattgtttaaagggacctcagcctgacttccaggagctacgcaagacttggccaagtcaatgcgcatgcgcaaggagagagccgcttctccccatcacagcgattcccagggttgtcgtagaaaccactccctgaggcttcgcaaagcaggagccctccgtagcagggcttcggtgtcggggctccgaggctccggcctgacttctccacggggtacacaggaacgtctccggacgccaggacctgaaatgggccgactaggatgacgaaaccacaggcagagtccggggaagcagcgcggcatcccatcttcaggcctgcccggagggtg

SEQ ID NO: 17552 - DNA, 2300 bp, Homo sapien
tgcccgggggctattcgctcacacaagtttcgttcccgacgagagcagaacccggcagccacaggggttgcctgggggccagtatttctatgccacccctgtaggactgtgggtgggggtgtccaccgtgactggatgtgtcttctaggaaacgacagtcttgaagaggaagccgggaatgggagatggcaacaatccccgtccctggaacgccggcctctctggacaagccacccgcttcgcacccctcctcttatgcccgtggcggtggcacggcgctgtatcctgcctgggctatggcctctgctctgtcgtccctcttgctctgtctcccctgtttctgagcggcctagatgcctctcggtctggctgaatatcttctacgaagatcacttccccgtccatcagggagacacttcctggagatccgtgtcatgactgtttctctctccaagcctgtttctgctggattgcgcaggtctgatgaccctggggctcttggcttccatacgtgtctcagacagggaagcttcctcggtctccgtgtttcacctcatgggtgggtggattgcctaggatgagcgagcgctaggccggcgagactggccttgtcttctaggacaagtgcatttcccctgcgcttcctgtctcactcttgagggacatcctctcctccgctcacaggtggacagactccctggatcttttggctgtaacgaatgtcaggaaacaaagggactgcgctgggactggggctggggctgcgtgcaggggaggttgcgtcagggctagctgggtggtggagggttgggggtggggtgactgttgcagaaacctctgtggtcctctggcaggcatttcaacatgtggcttggctgaggcacaagccccgtccaggttcccaggtcttctttgtgttcccttggcactcagggaaaggccacttgatcccctttctaccgggcgcatgcctgggcaccactgttgctttcgccctcgccccacatgcctccggtgacatacattcacgccatctgctctggtatacgccagtgccaggcgtgatcgcattgtctccacctgggattcgccccgtccctgtctgcacgtgtcctggaaagcggtgtcggcttgcaggagccccagggcttttagaagcgggccaggccaccgctctttcaaaggaggagggaggcagagggctcacggatcagtgaattttccgctgacagcaggccttgagggccatgggatcattctgtgctgcagcgaggccctgcctgcctcagcagatgtggtgagcccatcctttctcgcccagagtggtccaaaatcgcatctgaagaggagtcctgagaacccagcaggcgccctgaagctccccgtccatcggtggaagtcggctcaaggaggtcctgaagacgggactcctgggggctcggccctgggacacccgtggccccctctcccacgcggccccaaactggaccccggatccagccgcagccgcggctgcagcaggcgcgccccctgccgccgcgcagccgcccgtatttaaaggggacgcagcctgcctgactgccaggagccaagcgcgagtcggcccagccaaagcgcatgcgcgctgcagcgaggccctgcctgcctcagcagatgtggtgagcccatcctttctcgcccagagtggtccaaaatcgcatctgaagaggagtcctgagaacccagcaggcgccctgaagctccccgtccatcggtggaagtcggctcaaggaggtcctgaagacgggactcctgggggctcggccctgggacacccgtggccccctctcccacgcggccccaaactggaccccggatccagccgcagccgcggctgcagcaggcgcgccccctgccgccgcgcagccgcccgtatttaaaggggacgcagcctgcctgactgccaggagccaagcgcgagtcggcccagccaaagcgcatgcgcgagccgcgcgccgctttttgcttcacagtgcttcccacggttgtcttaggaaccagtccccgaggcttggcaacacaggagccctccgtggcagcgcttgggtgtcgggcctccgaggctccggcctgacctctccacggggtccacaggaacgtctccggctgccaggagtcgcaaggggccgagcaggatgaggaaaccacaggcggagtccgggggaagcagcgtggcatcccagcctcaggcctgccaggacggtgttcgggtgagtctcccgagaagtcgtgcccccgtgatctcgaggacaggtccgcct

SEQ ID NO: 17553 - DNA, 2300 bp, Homo sapien
actcctccccacgacgcttacaagcaaggactagaataccttaactaacggtaacacattaaacccaccctccaaaagaaacttctcaaccacaagcgtaccaaaaaacactatatatccttgagtacatagtacatctaatcgctcatggtagatagcacattccagttaaacaagtcctcgtcaatacggatatccccctcagatagtggtccgttgttcaccatcctctgtgaaatcaatatcctgcagaagagtgctactcttcttgatccaggtccataatacttgggggtagctataatgaactgtatccggcatcttgttcttacctcacagccataaagtcaagaccaaccacacgttccccttaaataagacatcacgatggatcacgggtctattaccctattaatcagtcacgggagctctccatgcatttggtattttaatctggggggtgtgcacgcgatagcattgtgaaacgctggccccagagcaccctatgtcgcagtgtctgtctttgattcctgccccatcccattattgatcacacctacattcaatatcccaggcgagcatacctatcacaaggtgttaattaattaatgcttgtaggacataacaatcagtaaacacacccacggccgcttttcacatcaactctacaataaaattctgcaaatccccttcccccatctttggcctcaccaacccaggaaaagacatctttgccaaaccccaaaaacaaaaagccttaatccaactcaaccagagcccaaatttttatctttaggctgtacgcatttttaacagtcacccctcaactaacacgtctttttccctcttagcctcacttcacagactctacaaatttagttatccctttttcagccatcccattcaacgcatgcccgaccactactaaaccaacaccctaaactaacccaaccccaaaggcaaggctttcccccctacccattgcttgtatgcccatcccctagccttgcttacactgtgcaatcacagtctatgtagcttaatgacccaaagcaagacactgaaaatatctagatgggcctacactgccccatagacaaataggtttggtcctagcctttctattaactcttagtaagattacacaagcaagcatcgccaccctggtgaaataaccctctaaatcactacaatcaaaaggagtaagtatcaagcacgcattagtgcagctcaaaacactttgcctagccacacccccacgggagacagcagtgataaacctttagcaataaacgaaagtttaactgagctatactaactttagggttggttaatttcatgccagccaccacggtcatacgatgaacccaagctaatagagactggcgtaaagaatgttttacattatccctcaataaagctaaatttcacctaagttgtagaaaaccctagttgatataaaacaaactacgaaagtggctttaatatttctgaatacacaatagcgaagattcaaactgggattagataccccactatgctcagccctaaacttcaacagttaaatcaacaaaactgctcgccagaacactaggagcaacagcttaaaactcaaaggacctggcggtgcttcacatccctctagaggagcctgttctataatcgataaaccccaattcacctcaccacctcttgctcaacccatataccgccatcttcagcaaaccctgacaaaggccacaaagtaagcacaagtatctacataaaaatgttaggtcaaggtgtagcctatgaggtggcaagaaatgggctacattttctaccccagaaaattctacaataacccttatgaaacctgagggtccaaggaggatttagtagtaaattaagaacagagtgcttaattgaatagggccataaagcacgcacacaccacccatcaccctcctcaagtatatttcaaggactatctaactaaaacccctatgcatttatatagaggagataagttggataaaccaaggtgtagcttaacataaagcaccctgcttacacctgggagatttcaatttaatttgaccaccctgagctaattctagccccaaacccaactaattctactaccaaataacctcaactaaaacatttacccaaataaagtataggcgatagaaatgatatctcggcacaatagacataataccgcgatggaaagatgaaaaaacataaccaagcataaagtagcaaggacaaacccctataccttctgcataatgaattaactagaaataactttacaa

SEQ ID NO: 17554 - DNA, 2300 bp, Homo sapien
cctctagaggagcctgttctataatcgataaaccccaattcacctcaccacctcttgctcaacccatataccgccatcttcagcaaaccctgacaaaggccacaaagtaagcacaagtatctacataaaaatgttaggtcaaggtgtagcctatgaggtggcaagaaatgggctacattttctaccccagaaaattctacaataacccttatgaaacctgagggtccaaggaggatttagtagtaaattaagaacagagtgcttaattgaatagggccataaagcacgcacacaccacccatcaccctcctcaagtatatttcaaggactatctaactaaaacccctatgcatttatatagaggagataagttggataaaccaaggtgtagcttaacataaagcaccctgcttacacctgggagatttcaatttaatttgaccaccctgagctaattctagccccaaacccaactaattctactaccaaataacctcaactaaaacatttacccaaataaagtataggcgatagaaatgatatctcggcacaatagacataataccgcgatggaaagatgaaaaaacataaccaagcataaagtagcaaggacaaacccctataccttctgcataatgaattaactagaaataactttacaaagagaaccaaagccaagacccccgaaaccagacgagctacctaagaacagctgaaagagcacacccatctatgtagcaaaatagtgggaagattcataggtagaggtgacaagcctaccgagcctggtgatagctggttgtccaagatagaatcttagttcaactttaaatttatctacagaaccagctaatgcctttgtaaatttaactgttagtctaaagagggacagctctttagacactaggaaaaaaccttgtagagagagtaaaaaatataacttccaaagttggcctagaagaagcgatcaattaagaaggcgttcaagctcaacacccaaccacccaaaaaattccaaacacataactgaactcctcacatcacattggaccaatctatcatttcatagaagaaataatgttagtataagtgacatgcaaacattctcctccgcataagcctacatcagaccaaaatacttcactgacaattaacagcccaatatctataaataatcaatgaaaccattattacccacactgttaacccaacacaggcatgcttacaaggaaaggttaaaaaaagtaaaaggaactcagcgaatcttacccctcctgtttatcaaaaacatcacctctagcattaccagtactagaggcaccacctgcccagtgacatatgtttaatggctgcggtaccctaaccgtgtaaaggtagcataatcacttgttccttaaatagggacttgtctgaatggctccacgagggttcagctgtctcttactttcaaccagtgaaattgacctgcccgtgaagaggcggacataatacaacaagacgagaagaccctaaggagctttaatttatgaatgcaaacaagaccaaataggcccgcaggccctaaactaccagacctgcgttaaacatttcggttggggcgacctcggagtataacctaacctccgagcaacatatgctgagactataccagtcaaggcgaatatccacatacaattgacccaataatttgaccaacggaacaagttaccctagtgataacagtacaatcctattctagggtccacatcgacagtagcattaacgacctcgatgttggatcaggacatcccaatggtgcagccgctattaaaggttcgtttgttcaacgattagagtcctatgtgatctgagttcagaccggagtaatccaggttggtttctatctattctacatttcttccagtacgaaaggataagagaaatggggcccacttcataaagtgcccctgccccatagatgatattatctcagcattttactgtacccacacccacccaagaacagggtttgttaagatggcagaccccagcaattgcataaaatttaaaactttacaaccagaggttcaacccctcttcttaacaacatgtccataactaaccttctacttcttattgtacctatcctaatcgccatggcattcctcatgctaactgaatgaaaaatcctaggctacatgcaactacgcaaagggcccaatattgtaggcccctatggactattacaaccttttgccgatgccataaaactctttaccaaagaatccttaaaaccctcaacgtcaactgttaccctctac

SEQ ID NO: 17555 - DNA, 2300 bp, Homo sapien
aagtaacagggataatagcagttggttaaaagaattaactcagactgatatgaatgttggtacatgagctacaagactgcattaaagtttttcttttgttctactctaaaaattcagcaactaggcccagtgcctgatacagagtgagtcctcaagatatcgttgactgaagctaacaaagtgatttattgatttatttatttattgagacagagtttcactcttgtcacccaggctagagtgcagtggtgcaacctcagctcactgcaacctctgcctcccggtttcaagcaattctcctgccttagcctccagagtagctgggacttcgccactacgcctggctaattttttgtatttttagtagagatgggggtttcaccatgttggccaggctggtctcgaactcctgacacccgcctcagcctcccaaagcgctgagattacaggcgtgagccaccgcccccagcctaacaaagtgatttttttttaaagacgaggggcaggcagggcgcagtagcttaacgcctctaatcctagcactttgagaggccgaggtgggcagatcacaaggtcaggagttcaagaccagcctggccaatatcgtgaaaccccctccctactaaaaggatgaaaaaaattagctgggcgtggtggcagccacctgtagtcccagctactcgggaggctgaggcaggagaatcgcctgaacccgggaggcagaggttgcagtgagccgagttggcgccactgcactctgctctgggagacagagcaagactccgtctcaaaaaaaaaaataaataaataaccaaaaaaaaaaaaaaggaggggcgatgttttattaaacatttcgctatttgaagaattaatacactcatgcaaagaaaagatgaagtaaacatgccctacagtgttatcatttgagatctcttaaaagcggctatgcagccgggcgtggtggctcacgttgtaatcccagcactttgggaggctgaggcgggcggatcactcgaggccaggagttcgagactagcctggccaacagggtgaaacgccctctgtactaaaaatacaaaaattacccgggcttggtgtcacatgcctgtacaaatcccagctactggggaggctgaggcaggagaattgcctgaacccgggaaacggaggttgcagtgagccaagatcacgccattgcaccccagcctgggagaagcgagactccgtctcaaaaaaaaaaaaaaaaaaaaaaaaaaaagcggctatgcaacactctactctgtcccatgaatatctgccacatatttgaattcccagtcttatacgccccaggcctttgcaatgtttagggtccacacgagaagccattaaaatgcaaatacgtcatctgtgaccgggaaccaagctggcatctagcagatactgacacatttatcagtctgatgtgtggacaactaggtgcctcccagaggccttcaggtaaggtggaggaagggccaattctgagctgacacagtgggatccatcttggccaggacagtgggatccatcttggccaggacaaaggcagtccagagaggccccgcggcgcggtgcggcgcgatcacgcccgagtctccttctcgttcccctcggcccttcctaaaacctgctggctcaggtctgaacaatcgcagctggacaggtggtgcacaacgatgttaattttcatcctgtctttttcatcagtgcatccttcagttccctattacttgtgggctggggagttggccaaattgagtgaaaacctgaaatgtctttttgttcttttggttcagccagtttaagttccatgcaatctttaagctaggaggctaataataatacaattctctgcttgcccttttcaaagccacttcagcttataaactccatattagaccatccaggcccagaagacgccaccggcctacaggcagagtcagcggaaccagcctgggctggatctccccctgcgaggcccccaggcaacgcccgcgccgggccggggagatcacgtcccgtgcgtcgggaggcgggggcctcgggctgtgacgtcacgtggccgcgcccctgccgcccagatatctccggcgccgcccgccattttgactccagtgtctcgtttgcagtcggcgctttaggggaactgtcttcctccgcaggcgcgaggctgggtacagggtctattgtctgtggttgactccgtactttggtctgaggccttcgggagctttcccgaggcagttagcagaagccgcagcggccgcccccgcccgtct

SEQ ID NO: 17556 - DNA, 2300 bp, Homo sapien
aaaataggtaatagggaaaattaagaccaacccaaaataggtgatacactgataaagaggctcctttccccaaattgaggaaattgtagctgagtttgcatgcatgcattgcagtatgagcttgttgatcatgctttttgttaaatatggaagtaatattctccatatactctggtaatatgccaatttttgttaggaatacaaaatttgagtaatctgaatttaaaatatatgacattgtccattttttgtccttaaaaaccaaaataattccatttttgagtcagtttgaggcctattaggaagactcttaaggaccagtatttgagaatcacaaatataatgcattttggttttttttgtttttttttttttatgacagtcttgctctgtcacccaggctggagtgcagtgatgcagtcttggctcactgcagtctccacctccaagattcaaacagttcttatgcttcagccttccaagaagctgggattacagacacactccagcataccaccatgcccggctataatgcattttcttttattttagcttattttttttttgagatggagtctcactctgtcgcccaggctggggtgcagtggcactttcttggcttactgcaacttccgcctcctgggttcaggcaattctcctgcttcatcctgggattacaggcgcccaccaccacgcccagctaatttttgtatttttagtagagacagggtttcaaaccatgttggccaggctggtctcaaactccagacctcaagtgatccgcttgtcttggcctcccagaatgttgggattacaggtgtgagcaaccacacgcggcctataatgcctttttaaagcactggtttggagggttggactagacaacctgtaagtctcttctagttctgagggttttgtgatttttgtgacctgggcctgaaaagggtaaaaatacttgtttggatagtgtattttgtagtgctttcctttgagtaatggtgtaatattgtattttatggtgaggtatggtttttgaaagctaagaaacttaatttggaagatacttttcctgccaactaagtttaatttcttgcattttaaatgttaataatttgatgagaacgtaatacaatgcaaaagttaggacttttgtaattgttaggtctaattggtcattacattattattgaccagttttttttacggaaactttcttaaaaactcttgcattgggaaattttagggaaatcactttatcaaaacttggagatagtcattatcgttaaggggtcttcatatactgcataccccccgttagaggatggaatgcagaactcactataccctgtctgcatagaagagggaagaaactcaatcccaaagtaatatggaagcagtctcacatgtattgttggttatatatgatatccagtatttttatttttccttttagtgagattacgtactataggtgaacttttagctcctgcagctccttttgacaagaaatgtggtcgtgaaaattggactgttgcttttgctccagatggttcatactttgcttggtcacaaggacatcgcacagtaaagcttgttccgtggtcccagtgccttcagaacttgtaagactgttacttttctgtattttgtatctgtttgtggaatttaccattttctctcagtgtagggtaataaaaacattttgatatttaagttttactttatagatgatgtcgtgagttttaatcatgggctgaatatatttattggaaattttgtgtaaagaattctttgggccgggcgcggcggctcaggcctataatcccagcactttgggaggccaaggcaggcagatcacttgaggtcaggagtttgatacccgcctggccaacatggtgaaaccccatctctactgaaaatacaagaactagctgggcgtggtgtggcacacctgtagtcccagctactcgggaggctgaggcagaagaattgcttgaacccaggagccggaggttgtagtgagtcgagatagcaccactgcactccagcctgggtgacagagccaaataatgtctcaaaaaaaaaaaaaaaaaaagaattgtctggtgttatttatacattaagtttttctgtatgttaaaagtcagattgtgtctaacaagtgtatatatatatatagtgttgtgccagagtaggtgacttctgtgatgtgaagctttttggattcactttggattttacattttgttggataaccctggtgcatagtagtagagacaggggtttcaccgtgttggcca

SEQ ID NO: 17557 - DNA, 2300 bp, Homo sapien
ctgtgctcggtgtcatgaatattttaaatgttttatttcatgatgggggagaatttgcatgaaggaaattaaatatagttattgattgccaagtgagaagttggattgtttttagagataatagataataatgggcatatcagggttttttttttttgtaagtctagaaaagtttatgtgctgtagaagagatctagtctatatgttaagacattcccttgctaattattttcttctctgttgttctatttttttggtccagtttgctgtttttaaagttttgagtcccagctggtcctgtacatttaactgaaaaaaaagtaacttaaaataatataaaaatagcactcatgtatgtcctacagttataggtgaaatttgatattgtttgtcttacatagcatacctatagacagcttaagtaaagtgactgttaagagggttatgcttattgatgaactcttgtagttgtttaccagctctgttagtatagttaaattgatctcagtagcttcaagtatttataaaatggttgaagtccaaatacatgtgataattacaatacactttgaattaatggagggtgggaggctagttgaaatgcattttatttacccaaggagtatgttaaaatgatagttataaatgttggaagtttaaagcaagatactcagtttagttctttacaaatcataagaagaacaaaattagatgttgacattgctattttaggctgtgtgttttccatatgcttcttgctttccctgtcacaggtggtggcagcaatattggtgtgattgaggttatgctggcaccactcgcacacaggcgcacaatggtgttagctgggcagaaagagtggcatctctggctaccgggctgggggcgacctttaccataggatgaagtaaccttgcattcggctgcaaggtgtactgtacgtacacaggtgctggtcgatgtccactttctgcttttctttctttctttttttcttttttaaagtaatttcccccacagtaaaatacactgactcctgagtaaattgattttccagttttatggaattgggagtctgacaagtgaaaccaatttaatgtaaagtatttggctttcaaatggtttctctgtgctattttttggaattctttcagattccagagatatcttacgtctttgattcaatttaaaatttgtacttattttcttttagaaataatgtattgtgtctgtgcagaaaaaaaaaaaaccaaaaaggattgctttactccaagaggagagattgtcttaggataaacctccaagctcacatttaatataacagactgaagtaaacattagaatcctgtttagagctattctgcacagttaactactgatctttagaatctaaaattgtatatgaacttattcttaaataattgaaccgttttatattcaaatgacttatgatcgtggttagtttgggaaaaataagatggttaaattttgatttattgaaatgtaattgtattattttcataaaatagcattttcattttgtaatgtggtttaacatccttgttgtttgccaaagaaatttcatttggctgtgaatattctatttgcttgcagtatctgtttctcttcctaggctcaagttggtgacccaagcctattgtaaacaagtgattatctcaaagggagatgccaatggagtaacaatttgttaaccttacgttttctgtctgtatatttttttaaaaatctggtagtttctggaaaaaaaagagaagggggtttgtagtacttaaccctatttatttccgtatattttagttaattagtttttggaataaatggatttcagtatagctttgtggttaaattgcattgcctttattttatgtttaggcttatttttaaattaacatttaacagaaacatttgaaatagaatttgcatgtctgccttaattaacttaaagactgattttaatctgactatgacactgagcatattctttaaattactcataatttataatgcttaatataatcttaattaaatttagcagttttagtataagatgtgccattttgtcctctgtatgtctgaatgaagctataacatttgcctttttattgcaggttttcctttggaatatggataaatacaccatgatacggaaactagaaggacatcaccatgatgtggtagcttgtgacttttctcctgatggagcattactggctactgcatcttatgatactcgagtatatatctgggatccacataatggagacattctgatggaattt

SEQ ID NO: 17558 - DNA, 2300 bp, Homo sapien
ggcaatgttggccagcctcctccactgtgaagttattaataaaatctgggggcagttactttgagacaatgtaaatattccacttttcctttttttttttgaaacagggtctagctctgtcactcaggctggagtgcagtgggacaatcacggctcatttcagcctctgcctcctgggctcaaatgatcctcccacctcagcctcttaagtatctgggactacaggcacttgccactatgctcggctaatttttgtaatttttgtggagatggggttcaccatgttgcccgggctggtcttgaattcctgggctcaagtgatccacccaccttagcctcccaagtgctgggattacaggcatgagccactgtgcctgaccccattactccttaatcatttcatttatttgtttgcttatttatttatattagtatgaactcattgcttcctattttatccaagggtttataatctattactctcattatttatcttgatgctcaagttgtcccagatttggctcgtgggagcttcttcaagccagcttctgtgtcctcctttaagtgcttccttgctttctggtttaataagatatctcgggttcatatggtactttcccaggctcggccttggaattagacatttctctaaggcattctaattccttttagcatagagttgtgtttagaagtcaagatccatgccctaggcaaactcactgccaggtggcaaaaaataaaaataaaaataaaaaaataaaaaaggatctagccccccagtgtgcttattgtgaatggggaacacactctatctatgtctccatattaaacaccacaagtttacatccttttggaagttttatcatggactctgaaacagagagtttctctctagaattataacttctaagatcatatagacctggagatactgagagacattttagcactgctgaataagatcctgttggggaatgaagtcaagcagaggcaagtggatctgagaggtggacaaacctagggtcccagaatactactagatctagtcatgcctgagtcccttgaatttcttggctacatgagccaatgcatttcttttttgtttaaagctaatataaactaggtctttcacaattgacggagtcctgatcaatatactaaatagcttacaagtgactagtttgcctttctaccatggaatgctggctctagccttcaggtttgttcccttccagtactggcggcagagggagtttacctctgtctggttccccgtctgtcaatgcttgagactgtgaccacgccagagtactgggctccctagagtcacttggttccacggggacctcgcccactttgctgctagtctttcatgaaatggtgctgcaccaccttagaggccttggagaagaaggtgtgggggaagaccatcagctcctccatgggtctgccctaggtgtggacgctggctgccttttaacaccccaaagcaaagacagggctgcagtggtcaacccagcattactgaaggctcaaccatagcaggagggaactgagaggctggagaaacagacttaaaactggaagccaggttgggtgcggtaactcctacctataatcccagcactttgagaagtcaaggctagagaatcacttgaggccaggggttggagaccagcctgggcaacatagcaagaccctgtctctacaaaaaaaatttttaaaaatttgctgggtgtgttggcctgaagttctagctacttgggaggctgagacaggtggaccacttgagcccagaagttcgaggctgcagtgaactatgatcatgccactgcaccctccaacactgtctgaaaaaagaaacaaagaaacaaagctctacctctcccatgataatctaagagaatccagatgtctacaaccacacaggaaccaaagcctatgggtttccttctgcagtgaccccaggggactcggcagtccccaaccagccccgaaggcacccatcaacaacagaaaatgaagacaaacctcagcagccttcctgcaacaccagcctgatctcctggggggcctcctgggcagaaaacagccccctaacacacacacacacgcacacacacacacgtacatgtcactagtaccacccccacaccacatccacacactcacacatgcgcacacacacacacacttttctcccaaggacagaccattttctttttctttttttctttttaaaaaactcccacgacagcttaaaaagtattattattattattattattattattattaat

SEQ ID NO: 17559 - DNA, 2300 bp, Homo sapien
accttgtgaagaaggctcctgcttccctttcaccttctgccatcattggaagttttctgaactgcgagtcaattaagcctctttcctttataaattacccagtctcaggtatttctttatagcagtgtgaaaacaaattaatacagaccccttccctgaaatgccttctccttaggccaccagctgccctgatgctcctcctctgccccctggtctttccttccccctaattaggcccaagtgatccacatggccaggcccagccccatcctactgcaggcctgtgtggctgctggagaggccgggctcctttcctcaccccgaggctgcctgatatgctctctggatcctggaggaaacttaccccctatccttatactggtgcaacttcttccaagacctcaaagttggacaacgtgagccagtcttttttcttgtctccacttgctagggctgtcactgggacagtcctggggcgggatggggtggaggggcaatggatgaatggatggatgaatggacagtagtccagggaggatgtccctgtctgtcctgaactgggcccttcctccaatgagaagccttcctgagtgagtttatacagtcaacccttggtatccatggaggattagttccagggtccccagggatgccaaaatccatggatgctcaagtctctgatataacatggccaagtattttttattttttattttttgagatggagtttcactcttgttgcccaggctggagtgcgatggcgcaatcttggctcactgtgacctccacctccggggttcaagcaattctcctgcctcagcttcctgagtagctgggattacaggtatgtgccaccatgtctggctaattttgtatttttagtagagatggggtttctccctattggtcaggctggtctctaactcctgacctcaggtgatctgcccgcctcgacctcccaaattgctgggattacaggtgtaagccaccgcacctggcctaacacagcctagtatttatatataacctgtgcacatcctcccatatacattagaccttctctagattacttatgatatacaatacaatgcagatgctatgtaaatggttgtgatactgtattatttagggaatgatgacaagaacaaagtctgcacatgttcagtagagtcatctaatctcttttccgaatattttccatccgctgttggctgaatccacagatgcagagctcccagatacgagggccaagtgtgctttgagagtaggatggtgaggtggctaatgagtacaagggagtaagtgtcagtcaggagggccctgcactggggcatctggatgccctatctcaggacttgaggctccaggtttggatggcacaggcaggctcagccaaagtcaaagccctccccttgaatgttctttttatcccaagctctttctggcccctggaatttggcatcccctaggatgccttgggtggaatgacgaataagccagattttagataacatgtctagaagagtgagcccctactgtgtgccgggcactttccccacaggattctctagctggaataaccaagggtcatggagagaaatacccagttaaaatatcagaaataaaaaaagacataccattagagatactaaaaagatcattaggtaatagtattcgcatttttattctgagatccaacagcagcaatcacttccctccacccctatgtgtatcccaggaccaccctgggcggggagggctgaggttagggagcacccatggatgctgtgatgctggctctgagcccagggggtgacagtgacaaggaactgggtgcacacatgggtgaggcagccaggcctggccagagaagcaacagacatgtgcacagatgtgtttacctacatacatgtgtgcacacacatgtgcaaacacatggcacgcaagcatgatgatgccttaggcaatgcaggatgctgactttgggccctgctgacccaggcaaggcgcctttgtgatgcttgcctttatctcagaatgtcactggtgcttagcacccgtccgctctctgccctgcctctgtgttctacagcagctacacacagacagtggtatctgtgagcagctctgtggactcaaaggttttctccctgagaggcgtaacccaggccagctgattcatcagaatcaggtgagtgtgacctgctctcttccctccatgctgacttggggacagtggctaatggtgtgggtggtgctggcctctgggcacgtgctgaggagggtcatccctgaacact

SEQ ID NO: 17560 - DNA, 2300 bp, Homo sapien
tatataggcgctttatttttgttcctattctgaatttgttttcttgggataattcccaggaatggaattactggatcaaagagcatggagatggagtgtgtgtgtgtgtgtgtgtgtgtgtgtgtgtgtgtgtgtgttaagacttgccaaactgttctcccatttttttttttttgaggcggagtatcgctctgttgcccagactagagtgcagtggtgtgatctcagttcactgcagcctgcaccttccagattcaagtgatccttctgtctcaccctcctgagtagctgggattacaggtgcacaccaccatgcccagctaagttttgtttttgtttgtgtttttttttttttttttttgagacagactctcgctctgtggcccaggctggagtgcagtggtgcgatctcggctcactgcaacctctgcttcccgggttcaagcaattctcctgcctcagcctcctgagtagctgggattacacgtgcccgccaccacgcccagctaatttttatatttttagtagagacagggtttcaccatgttggtcaggctgatctcaaacccctgacctcgtgatccacccacctcggcctcccaaagtgctgggattacaggtgtgagccactgcgccaggcctaagttttgtatttttagtagagacagggtttcaccatattggccaggctgatctcaaattcctgacctcaggtgatctgcccaccacagcctcccaaagtactgggagtacaggcgtgagccaccacacctagcccctccatttaactcctgttgaatgatagctgttttaaaaattgtactcctgggtaagtatctcatattttttacaattctttctgacctttgtacctttcttcttctctcctttattctccccattttttgaccttgttagatattccttatcttgaatttgctatttctctcttctgtgcattcattcagtgacttttttttttttaaatttcagacagagactcaccctgtcccccaggctggagtgcagtggcacaatcttgggtcactgcaacctctgcctcccgggttcaagcgattcttgtgcctcagcctcctgagtagctgggagcacaggcacgcacactacacccagctaattattgtacttttagtaaagacaggttttgccatgttggccaggctggtctcaaactcctggcctcaagtgatctccctaccttggcctcccaaagtgctgtaaaggcgtgagccaccgtgccgggcccactccagtgacgatttattgagcatctgctcaatatcaggtttgttttaggcactgttttaggcactgaggaaggagcaaggaagaaaatagagggcttccttcagtggaaagagaaagataatacacatgccaaacagacagacgtgctctcagaagaaaactggaagtgggttagagagaggtgggggtatggaagaggtgacttctttagatggggtgatcgggaaaggccttcccagagagggtgacttttgagctgagtcttgaaagatgagaaggccactgtagcctggaggagtgttcccggcagagggactggcttgtgcaagagccctgaggcagaatcgagcttggtgtggtcaagggccaggaggaggctggtgtgcctggaacacagtgtcaggggaggatggttggccttggggtcaaggaggtaagcaggggcatggggctgttttttcagtgctgggccgcaggagagaattaatgcaccaactcagcaaacaggtgtcctcctacttccccctccgccctcctggccgggtttcgtgccaggcactgttctggaatataagagtgaatgagagatgtattgtgctccagaaagccagcttagtgggggagtttgtggatgagtaaactcatagaaggtgctggtgaggtgtgaatgaaggctcatcaggccgcgcagctgactcatctctgtactgaggtgtgtagggacttgggaaatgtgtcttgatttgcacggaactgtgctctgtgctgtcagccttcaccgtggtaactgaaactcagttctctgatgtaaagcctggcagtcccggcctgcttgggggcacctggacccctgccagggaaggggtcctcagacttgaggttgccagctcagatgtggggctgctgatactaggtatgagtgtctaggctcccagttatgggaaacaagaccaagagacagccatgggaaacccccttcttactgagctgcctgccctgaccctttctcccctgactgcggactctgattt

SEQ ID NO: 17561 - DNA, 2300 bp, Homo sapien
acgcattttacagtcacttaaaatgacgtgcaaatttactcccttctctctctttttttttttttttgtttgctgaaatgggatcatatgatagatatcattttgcaggtttgcagtcttaacgtcatctgtgttatccataaaaattcatgttatccttctttaacagtagagtagtaagagatacagtttcatcaaggtatgatatgaatgcctgtgtctgagggatacccacctgctcacatacatgcgcacacagtgacatcaggcaacttggtggttcaggtgactcagcacctgaacgaagatgagagcccgtgcccagaagaggccaggtgcccagctgtaacgcctggcacatggaggccctggcaaatacttactgggtgaaggaatgtaccaaagtcactgcaggatagaggtcagggatgccagacttgaaaacaggactctttcaatatttgtctgtctgtctttctgttttttgttttttttttttttctttggaagggaacaaaatccgtgaagtctctctgtttccttttgctaacctgatagtgctgaaggacccccgcatctttgcagtcagtgcctgaagatgatctgcccagggctgccccctgaggcttcctgggggaactttgtgtggtgggatttgtcccttcagtcactttgagttctctgctgaccttgactcttcatggcttcatgactaggactttgatttttcccttaggaaaacatacgtggatcgtttgtgtgtgcagccgtctgtgtgtgtaatctcctccttccttttccatattgttttcctaagggccatccctgcagggttatctaaataccatttcagattttgtcttttggttggatagtgtttgcggtcttaaagtttccaggaaataatgccttttctactagaggaagagaggggatagacatggatgtggtcacacagtacggcagctgcatttccaggttcctggtgtggctgaggtggccctgcgtgggtttctttctgttcccacctgagtcagatgccagccctctgcggctccgagcctgctgcggcgctgcatgcctgacctttggttcctcgtcccttccctgtctgtagatgttggagacagaacttgggcaatgcctgcatgtgtttgcccaaccactagatcttcatctagagcagcgctgttcaaaaccttctgtattgtccattcagtgtggcagcccttagccatatgtggcttggggacacttgaaatgtgtatagtgcagctgagaaactgaaattcgtgttttgttttatcgtaatgaattttaatttgaatagacatctggctatgactgcattgaccagggccctgtggtgagagctgggatgctgaagacaccttcctctgccccaggagcacacagactggggtgaaacaggaagtgagagccccagatgccctgatggctccgggatgggatctgttggagccagtgggccaactcatcctgggtagtcagggaaagacggatgtccgggaaggcaagagcacaccaggcggagggaagaatatctgcagagaccctgaggatgaggaaatcagagcgcttgtgaagcgcgtgaggaggagtctgtgaggaggctggcggggagccggggtggattcctgcagctctccctgtgtgcagtgtaggggttggggctcctcttaggggatattggaagtgtgtgtgagagaggggcaggaattccaaatgaacattagaattgtttaaaggaaaataaaactagcaagaaggctgcattcacatggggatgggctgagagtgacggggtgaggagcgctgcctcccacgtggctggagggtggaagggtcggggataggaaatgagatgggagggagctcagaggcggggccctgccccgctcccagtcatttggatttgcacactatggctgtttcaagcggccccctgtcccacaagttacgtctaaaagtctcagcttcatattctggcagcagctggggaaatgatttcagagcctgctggcatggagccattttttttttctttagcaatttcccggttggaagttgttgaaaggaagtggcaagcgctgcctgagcagttctagctgggagaggtgggtgctgcagagtctgggattccagggtgaaagccacaggttcccctgaataagctcttactgctggtggttcctgaactgaagatgcaggcggatctggtaaggggatttttgttgtgatcctgactggacatgtttctctttccgctctcctctacc

SEQ ID NO: 17562 - DNA, 2300 bp, Homo sapien
tgcaggcagacgggcacagttctccccatgggctccaccagggttggggtcaggccgcaccagccccagacttgtgcttgacccccaccaccctcgacagcttctgcaaggggcggacgttgcactcgtttgtgagggaccccaagacgtctctggacatcaacaagacgaggcaaatcgctcaggagatcatcaaggtgagggggtgcccagctgctgggggtgggtttctggccggttccagggctctcggctgttcctctcgccctgttactccctgttagggtggtttgggcagctttgcctctccttctagctcaggctcctcaagggtgggaccccatctcttcctccctgtctctgtctcattcattcagagctgggagctgattgtccacatgattaggcttgatggaattgacttggttgggaaggaacttggcaggctttagaggccagtttcaatcctggtcacaccctttgtgtgaccttgggtaggtttagcctctctaagcctcagttttctcccctgtaaaatggggatcttcatatatcctccctctctggattggtgtgaggttaaaaacgcgataatccatgctgtggggtacacaggagccctgggtctggtgtttgaagacagcttgaccttggatgagatcatgcctatgtcaggtcacccacgctccatgcacctgactcatcagtgttagttcaaatagagcattggttagaaatcacccactgccacctcttcgcttgataggtgaggaaaccagtcttcagagaagttgagcactgtgtccaaggccacagagtgagtgagaatctgagctgagatggagttcaaaccccagatttcttagtccagggctccttctactacagctcagacattaggagcactcaaagttggggaccccgctgtgggaatgcctctctgttcccccaccttgagcccttgtcctgcctgagagcacagaccagctgtgcatatcctgacagaaaaccccagctcatttaggccctttatgactgtacactgataaatctcactgtccctgaccccccggctccctgcccatcaccctgttcacacctcctaccttagccaaggttaacatggttgtttagaagcatggtaacattaaaagagcatagaccggtctgggatcagatctcagctctgcttcttcactgctgtgtggcttggagcaagtgactttccctctctgaacctcgatttcttcttctgtaaaatggggacaatatactgcatggaattgtgaagatcaaatatggggatttaggtaaatcatccagcccagggtggcacctccgtcatcgttgcacatcttcactcctcctgatgtgtcctccagggcatgggatatcttcatgccaagggcatcgtacacaaagatctcaaatctaagaacgtcttctatgacaacggcaaggtggtcatcacagacttcgggctgtttgggatctcaggcgtggtccgagagggacggtgagttggtcttgagtgtctgggtgggttgtgggtgctggatggggaagagcagggctgaggtctgggcactttcactgtttgttgctgagctgcagccctccctgcagggaagcccaggtcgctttggtcctgccctcgtagttctggttcagaatcagatttgggtcgcgtttggattctcaggccgacttccacggaaaccaggtccccacactcacatttgccctggctgttcacccgcttggccaaggaaccaggtcatttccccacgatgaggaagagtgtcaaattttatttccccaaatcttgaagggattggcatagggagaaaggcccctcccctcacatctaggggaacccaaaagggagcatggcagcaaggctgcaaggccagccccagccaagtttgagatccacaggcagatcagggttcctggttagagaggcgcctcattctccagcagagggagctgggcaccttcaccagcagctccctgtcaatatttatccattcttgccctgcttttctagaaacaaccggtcatgactcctttgtagaattcctcaaaagcaccggtgcctttcccaagtgcagggtcagtgttctgggtctgggtgtgttttctaagctgtgtgtgggtgttctgccggccctggggcagacctgtgccaggcaggcctctttgctgcctgctgaaaggcctgtgtccttgtcccggcttcctggtctccaggcgtgagaaccagctaaagctgtcccacgactggctgtgctatctgg

SEQ ID NO: 17563 - DNA, 2300 bp, Homo sapien
catcactgactgccctgccgaggccctctgtgctggaggtgtcactgcagatggaaggattccttcttgaggaagtctactactggcgaaggtgaatgggtctgggcgcaggatcagtgcagtccaggagtgactctaaaggtgctggtgtgtgggcactacgtgcggagctcagccccaagtccttttcatgcattagcccatttaatccccacagcatctctctaaggttcacattcatttgcctcattttatgggtgaggaaaggaagcttggagaaattaaggaacttattgaagatcacacaagaattaaatgacagggccaagattcaaacgtgggctatttgtactatctatagaattgtatgtctggcccacattttgttgaccactcatccattgatggacatgcgttgctttcacctcttggcttttgtgaatgatgctcctacaaacatgggtgttcacatgtctctttgagttcctgtttttggttatttgggggatatacccagaagtggaattgctggatcatatagtaattctatgttgagatttttgagtaacagccatgctgttttcacagagttccagtttacccacaatctagccaacagttgttatttcctggattttttttttttttttaatcacagccatcctaatgagtgtgaggtggcagactcacattttgaaaagatccctcagtctacagggcagagaacagagcctccgagacaggtctgcgactttgaatactagagctctgagaagaaacattcacgagggctgcttctcatctcctgaagaccagggttaaccactgcgaatggattgtggtgactgaagggtgccggcactgtgcctcaaagtgtctccctactgtgttgattggtctaaaaacacatcagcctttgggtatgaccttactggggcccctccaggcagggtgtggagcagaggaccctcctttataggctggactcaatagtgaggctgcttacctgtgactcacctccaaggctcaaggtgatgctaaggtgctgatttgctagaactctgagctgtgcctgtgtctccttgggctctgggagattttttcttttagcagtattttatggaaatattgtctaggtagagtaaaatgtacagatcctggttttctgttttgagttttgttttgagacagggtcctgctctgtcacccaagctggagtgcagcggcatggtcatagctcactgtggcctcaaccacccaggctcaagcaatcctcctgcctcagccttcctgtagccaggactacaggtgtgcaccacaatgccccactaatttttttgatttttagtagagacaaggtctcgccatgctgcccaggctggtctcgaactcctgggctcaagcaatcctcccgcctcagcctcccaatgtgctgaattacaggtgtcagccactgcacccagcctcagcctgttgttaatggatgtaaatacctgtgtgatcgccacccagaaccagatccagaacatttccagcctctcaaagactccttcctgcccctcccagtcagagacccccaagggtgacgccattctggcctgttgttcaacttgacttgaacaacacttcaagtcaagtttggatctggcttcttctgctcagttgcgaggcccattgatgtttcctgtggcctagctcctttttattgccgagggctactctgttgtatgaaaaccacaattcatttctcccttctcctttggtgaacatttgcactgtttccagcctggggcaatgatgagtaaagctgttaaaaacaggcacatatgttttcctttctcttgggtaattttttagaagtagaaaagccagaacatagaagtagatatttgactgtattacaactcaccaagcagtttttctttttattttttatttttcaattttttgagacagagtcttgctctattacccaggctggagtgcagtggcgtgatgagggttcactacagccttgacctcctggggtcaagtgagcctcccacctcagcctcccatgtagctgagaccacaggtgtgcaccaccacacctggctaatttgtttgttaaattatatgtagggacagggtcttccaacctttcccgagctggtctcaagctcctgggctgaagtgatcctcctgcctcagcctctcaaagtgctggtattataggcataagccaccacgccctgcccatttttctaagttggattattttacactccagtctgctgtgaatgagagttccagttgttgcg

SEQ ID NO: 17564 - DNA, 2300 bp, Homo sapien
aactcctgggctcaagcaatcctcccgcctcagcctcccaatgtgctgaattacaggtgtcagccactgcacccagcctcagcctgttgttaatggatgtaaatacctgtgtgatcgccacccagaaccagatccagaacatttccagcctctcaaagactccttcctgcccctcccagtcagagacccccaagggtgacgccattctggcctgttgttcaacttgacttgaacaacacttcaagtcaagtttggatctggcttcttctgctcagttgcgaggcccattgatgtttcctgtggcctagctcctttttattgccgagggctactctgttgtatgaaaaccacaattcatttctcccttctcctttggtgaacatttgcactgtttccagcctggggcaatgatgagtaaagctgttaaaaacaggcacatatgttttcctttctcttgggtaattttttagaagtagaaaagccagaacatagaagtagatatttgactgtattacaactcaccaagcagtttttctttttattttttatttttcaattttttgagacagagtcttgctctattacccaggctggagtgcagtggcgtgatgagggttcactacagccttgacctcctggggtcaagtgagcctcccacctcagcctcccatgtagctgagaccacaggtgtgcaccaccacacctggctaatttgtttgttaaattatatgtagggacagggtcttccaacctttcccgagctggtctcaagctcctgggctgaagtgatcctcctgcctcagcctctcaaagtgctggtattataggcataagccaccacgccctgcccatttttctaagttggattattttacactccagtctgctgtgaatgagagttccagttgttgcgtatcgcaatcaatttgtgattgcctacaaatgatgtgccgtgatgaaattgtccctggtgtccgagaggatcgcaaagaatttcccttcctttctctcctttctgctccccttgtactgtctactccttaaactggtacttgatccaggaacataatggggatggacagtgcagatggcacacatggcctcagtctattggagcatctcaaaggaattagtctgcaaattctagtgcatctaggtggagcacaggaaggaagagaggtgcagactcacgtatggccctggggcacctgccatcctctcgcacccgtacagcccttacctgccagcacttaccctacccagcttgagttctgggccttctcaccagcacatcgctgggacctggtcgacttcaggtaagtttatttcatggctccctcccccacgacctgcacatgccatatgttccttcccagccccatgtcacttgaaatgttctatcatgtccaagacttctctcctcatcctaaagtgcagaaaataaggatggagaagagaaggagaagagaatcaagagagattcattgagagggaggatcagaagctcctgggcaccccatactgtagaataaaaatattcattatggtgtttttcttgcaaaatattcccctctacataattatgtttttacatgaataatataaatttaaacaggagaaatactttttgaagagtctgagaatcttcataaagttcaggcggccacgaattagctgtgtgacctggggcatgccccttagactctgagcctcagcttctctgtatgtaaaatgggttgaagccgcccttccccacaagcaccctgtgcacaggcaatgcccagccccattattttctggactccgtggccaagcatgcttaggacacacagccacatacttctgggcagtgtcatctggcaacttgctgtcatgtcagtgtggtcaagcattgtagacctctatgaaccaaatatgcttcaggcttgggttgagcacaggagagggaggagggaaaggtcactggggctgggagtgcctacttccctctgtgagtgtcaccccagtccacccagtaccatacctttctctctctggacccacttccttttgctgccggctcctccccattgaataacagccaagttgctttggtttctatttctttgttaagtcgttccctctacaaaggacttcctagtgggtgtgaaaggcagcggtggccacagaggcggcggagagatggccttcagcggttcccaggctccctacctgagtccagtgagttccagggctatgggcacagggctgcctcagccagagggacacagctctggggctctgaggaagcaactcctggg

SEQ ID NO: 17565 - DNA, 2300 bp, Homo sapien
aaaataaataattaataaatgaaaccccaggtgagctaagactagaaagacaaacctactgcaggaaacaaccagaagaacgaaaagtccaactggagcctggtagagactcgggttgatgcactttgggtcacacacacgttcctgtaactggccccacactgaagaccagactcaggtcttcattttctagaaagagggtccaggagctcaggggtggtccccatcccagcctgggatgcctcccccagaacatgtgctctcctctggcaggtgatggtgaacgggatcctcttcgtgcagtacttccaccgcgtgcccttccaccgtgtggacaccatctccgtcaatggctctgtgcagctgtcctacatcagcttccaggtcagactgtccacctggcaccggtcccaggggctgggatgcagggcccagcgtagctgtgtctaagccctgctgggtgggcccaagccaatctcctacccaggtcactctggggacaacctctgcttccctgtcccagtacctgcccgccccttctcctctgtcactctgcccctccttctgtgttactgtctctgtccggaacacctgccttggtctcccagactcctcagctgcccctttctcttcatccctcagtttccatcctggtaaggagggcatattgttctagaaagagcccaggctcaagaaccaaactgaatccagttcaaattcccagctctgccattcatcatctgtgggatcttagacaagcaacttcacctctctcagccttggtttcttcatctgtagaatggtcattgcctgccccccatgggtggttgtgtggttcagtgaggagacagatatcagaggtcacacagtggcccccctgggcccacaccagggtctgtttgacctctgtgttttaacaactttgaatgtgttgccaacatctaaaaggtcaggagagtcaggtatggtggtggaggtctgcagtcctggctactcaagaggctgaggtgggagaattgcttgagcccaggaattagagttctgtctgggcaaaacagcaagaccctgtctccaaaaaactttgtttaaataataaaataaaataaataaaactaaataaggtcaggagataccaataccatgtgaaaaatgggaagattagggtatgctgggcccacattcccacagggcaccagcagctgggtgggagctgctgttacccttttggcattcgaggctgctccctgagatcagcgaagcacacagtaggccctcagcaaatctgggcttctcgccctttggtcctcatctctcattccctccttccctgactctctcccctgcgggtggtaggggagggaagagctggagggagaccgcacccctgcactgctcaccagagcctggctctttcccatcccatcttggcagggccctaacccccttgcctcatcgccctgcctgcctggtctctccctcttgcccctgcctctgcctttcggcttctccttggctctattaatgcttctcctcactgcccggtgccttttgttttaacagaacccccgcacagtccctgttcagcctgccttctccacggtgccgttctcccagcctgtctgtttcccacccaggcccagggggcgcagacaaaaagtgagttcaacacagaggccctgggtggccgagcagacagtaggaaggaccgagggtctgagaggctggccccagccagcaggccactcagggcctacaggccgcatcttgcccacccaagagttccctgtctctgtccgctgggcacccagagctggggacctgggggtcaccctggattcttcactccctcttctttacgtctctccaaggcacgaacgtgtctccctcctgaagccaccgatgtggtccaggcctctgggattcctcaccatgacgacaggggtccagttccccaccccctacacccaaccactgccacagtgaccttcttataagcaaatgtgatcacaccctctccctgcttaaaaatcttcacagcccccagcccttcaaataaagcccaaattctccagcagggtatatgaattcctccccagtctgccccaatccacgtccctgcctcacccccaacccacgaagctcacgcagcctctgcagctcactcaaggccctcttgggccaccatgcttttgcatatgctgtccctggtcccggaagcaccctctgccagcctgcctcgagcacatgcctaattgcccttccatgctctgcctaagtgccgctcctctgggagtcctccc

SEQ ID NO: 17566 - DNA, 2300 bp, Homo sapien
cttaagatgattgaggagaaattatatttccttcccagctggctaattccaaatgtgtcctcaagcctggtgcttggactcaaaccctgccacaggtcaagaatgccacaccaagcagacgctgtgttagaggggcacctgaggtgacatgtttgacagatcacataactgaataactgcattttctgaaggaaaatcaacgaagtgctttgaggccaagtagatgggattcttgaggattccatgaatagcaaatagtagtatccccctcagaggctcttgggtgggggcattaaatgtgttaatacatgtgtttgctgcaggtatagccagaatatgtgaaagcagctacagggaatagagtgtagcaaactcctaatcatccctcaaaaccctgccctggtgtcctctcccttgtaaactttccttgaacaaggcagaaccagctacatcagcaccataccatccctccatcactacagatatcactctgtactataattatccatttatttttctaggccttgcactccctaaggccaggattctgactctttccctgagtgctgtttacctgaactgaaccggcatgaaccaccacgcccggccatcttgtcactttctaaaatgcattgctcttcgtggcagatgctccataagccagagctctaagccgcagcattgagccgcagcattgagctgaagcctgaagggaagatggctttgatatgttaaaactcattccagtttactcctatttttcattcattcatccacacattcactcaacaaagatccttgagctctgatatccatgtcttttttgtggctcttagtttatctttgacaaagttaatatattatgctgaatttaacttgggaaagacaagaaggaaatgagtggacagtggtagcaaagtgttgggacggtgagatcaagggtgactttttttccctttgcttctcaacttctccctaatgtagttgttattttacttttatgatggaaaaatgcatatgtatgggaatactgtatttcaggcattataaggaatgaaattataggccgggcatggtggctaacccttgtaatcctagcactttgagaggctgaagtgggcagatcacttgagcttcagagttcgagaccagcatggacaacatggtgaaacccagtctctaccaaaaacacaaaaatattagctgggtgtggtggtgcatgcctgtagtcccagctactcaggaggctgaggtgggaggatcgcttgagcctgggaggcagaagttgcaatgagcagagatcgtgccactccgctccagtcttggtgacagaatgagactccatctcaaaaataaataaataaataaaataaatgaaatgaaattataagaaattaccactttttcatgtaagaagtgatcatttccattataagggaaggaatttaatcctacctgccattccaccaaagcttacctagtgctaaaggatgaggtgttagtaagaccaacatctcagaggcctctctgtgccaatagccttccttcctttcccttccaaaaacctcaagtgactagttcagaggcctgtctggaataatggcatcatctaatatcactggccttctggaacctgggcattttccagtgtgttccatactgtcaatattcccccagcttcctggactcctgtcacaagctggaaaagtgagaggatggacagggattaaccagagagctccctgctgaggaaaaaatctcccagatgctgaaagtgaggccatgtggcttggccaaataaaacctggctccgtggtgcctctatcttagcagccaccctgctgatgaactgccaccttggacttgggaccagaaagaggtgggttgggtgaagaggcaccacacagagtgatgtaacagcaagatcaggtcacccacaggccctggcagtcacagtcataaattagctaactgtacacaagctggggacactccctttggaaaccaaaaaaaaaaaaaaaaaaaagagacctttatgcaaaaacaactctctggatggcatggggtgagtataaatacttcttggctgccagtgtgttcataactttgtagcgagtcgaaaactgaggctccggccgcagagaactcagcctcattcctgctttaaaatctctcggccacctttgatgaggggactgggcagttctagacagtcccgaagttctcaaggcacaggtctcttcctggtttgactgtccttaccccggggaggcagtgcagccagctgcaaggtgagttgc

SEQ ID NO: 17567 - DNA, 2300 bp, Homo sapien
caagatcgatccactgcactccagcctgtatgacagagcgagaccctgtcttgaaaaaaatgaattaattaattaaaagaaaaagaaaataaactggtcaaggaggagggaattttctagacattaatgacggtttgggtggtaccttccagatgcattggaatttatttggttttctcctgatatttgctttcttttgctttttagccattttattgagatataattcacataccatccaattcacccatttgaagtgcacaattcacagatttttagtacagtcacagagttgtgcaaccaccacaacaatctaattttaaaatgcttttatcactcaaagagaaaaaaaccccatcgctattagcagtcattctcattcctccccacccctacccccagccgtccctagcccttggctaatctactttctttctccatagatttgcctgttatggacatctcatacaaatggaatcatgcactacatcttttgtcttttgtaactggcttctttcacttagcatgatgtttttgaggttcactcatgttgcagcacacgtaatacttcatttctttctcttgccaaacaatattccattgtgtggctacactacattttatttatccattctttagtggaaggacatttgtactgtttccttttttggtttttatgaataaatctataaacttttgtgtaaaagatttttgtgtgaacatgttttcattttccttgggtatatacgtaggaacagacttgctaggttaattagtaactctatatttaacattttaaggaactgccaaactattttccaaagtggccacaccactttacattccaaccaacagtggatgagggttccagtttctccacatcctcaccaacacttgttattatttcttttttattatagccattctactgggtgtgaagtggtaacacattgtggttttggtttgtgtttccctgatggctgagaagcatctcttctgtgcatattggccacttgtatatcctctttggtgaaatgcccgttcaggtcctttgcctattttggcatttggtttccatggcgtgtttgcccttttaatgggagtgttaagctgggaaggtggatagtgcttgattaatgcttgagttaacacgagtggatgagaagggctccctacatttggagaagcttttgtttggctatgaaggcctggggtgttttccgtgttccctgtgctctccctctgttcgcttttaagccagggttctgacccaggttgtgttctgacccaggttgtgttctgacccagctaagtatgcaagggaaaaaaataggggcttgtgccagagatagcatgaagtcaacactgcagcaaagatgaagacaaggataggatgtttgtttacctccaggcctggaggctaaggctggattggcaagttgtcctcttggacaattcctcttaccttctcttactcaagaactttaaagattagtcatgttaatagaaagatgatggtatcagaaaaacatgccaaggaattcacagtttctcagccagacttgttagcaacaaaagttataggtagtggtgtatctgtgtgtgtgtgtgtgtgtgtgtgtgtgtgtgtgtgtgtgtgtgtgaactaacgtctataaataggaaacaacttttagaaaaataatactttaaaagttgagacatgaaagaaacttctggattactgtgtgtaatcatagccgcctaaaactgatggggccacccatttccagaagccatacagatcaataaaagagcaaattaaaccattcataacccagtccagatggagatatagatgggattctccataaataggaggtgttcaatgtttgttgaattaaagaatgaatgggtaaatgaatgaatggcacactgcagaggaaatgggcacgccctacctttggggcccaactgcaacccatacagagccctagcacttctcacactgcatagtgtgtacgggattaaaggtctgtctaccactggacagtaagttccggaggcaagcactgtgacgtattcattcaacaaatgcttgtgaagctcatgctatgtgccagacactgtgctgggtgctggcaggacgagagtggtgaactaaaccaagtccttcctgtggagctcactgtctatggactgattcttccttcgtgtcctcatcatctgctcagtccagggatgcagtagacgctagtaagtgttcctcctcctttgctcaccagattttttttttgagacggagtctcgctttgtcatcc

SEQ ID NO: 17568 - DNA, 2300 bp, Homo sapien
aactaaggccagtcactagatctcttttagctccttcatctggaacataaggggcatctctgtacagaggagatagtagcttcattctgtttagttaacagtgagtgaagcccactgcgggccaggcgctcagcccagggagagccacaggcgaggtagcagatgagtccctggcagcaccatgagcggggcactgcagccccacagaggacagggtgagcacctctgtctccagagagggaccgtgaggaagggcttcctggaggaaggacactaagctgagcctggaaggatgaacaaggttcctcacacggagaagatgggaaggagtccacggccagggagctgcatgtgcactgaaaggcgccacatttggtggtttgaggggtctgggagcagttcctgtggctgactgggatgcacccaggacactgattccagagctcacgtggtgtcagtgtggaggagactggagtgacaggctaggtactgggacaccaggcagatgctgtggcagaggttcaggcaggagcctgatgaaagctttgcaagcccatatgttctagaacctaccatttaaaacaatctatactctcatagttcctttaaaaaagaagaggttaagctagagttgtgggttctttagagagagtgttaatacagagaagaatgtgggttctgtagacacaaaagagagcttgctgtataattccatttatacaaaactctggaaaatgcagcggttgcctggggatggggacgtcgggagggcgggagggagggattacaaagggtatgcggtaaattttggtgatgatagatatgttaactctcttgattatgacggtggcttctccggtgtgtacctgtggcagcacttatcaaattatatactttaagtatatgaagttcattatatatcaactatacctcaatacagcctttttttttttttttttttttttttttttttttttagaaaaaggctctggagccagactgccagagttcaaatccaagctccagctttattagctgtgtgatcttgggcaagttatcagacctctctgtgaccggttttcttatgtgtgcattaatcacatgtaaagtgaatagagacaaacaagtgctcattgtgattctctctctttttttttttttttgagttggagtcttgctttgtcacccaggctggagtgcagtcgtactatcttggctcactgccatttccacttctggggtttaagtgatcctcctgcctcagcctcccaagtagctgggattacaggcatgcaccactaagcctggctaatttttgtatttttagtagagacggggtttcaccgtgttggccatgctggtctcaaactcctgaccttaagtgatctgccctacttaaaggcgtgagccactacgcccagcccattgtgatttttatgataactcatagtgaaatgaaatcacgtgcccacgctgtggtgactctgtccagcaacttctctgcagagccccctagattcatgcttctcagactttaaaatgtgcctgcaaatctcctggcatccttgttaaaatgcaggtttgatctggtgggtctttggggtggggcccaagactacatttgtgatgagctcccgatgctgtgggttttgctggttcaggagcacactttgaatttcaaggctcaggcctgtaggcattctcccctctgtggcttggtgccctcgccagaccatggctgatgtcagagctggtttcctagtgattgcccctcagggtcttcctgcttttctaccctaccctgccggtgagggacacctactcatgcaccacttgaagttgagttccagaaagaagacgccagggatgaggctgtaagtctccctccacactcacctttggtcttgtgggcctgctctgggctagagcttctgttgaactgaatgcccaccccaccccaaggtgcaggctccatgggatgggacaggaggggcctctgcactgcaccaagcttgcttcccagagtactgggaactgggggtcagggctgagtactgaacttggcttgatgccctggaagtgatcctgcttgttttccagggacagagggtctcacggatggccccgctgccaggagcagaactggttcggaggccactgcagctctaccgatacttgctgcgctgttgccagcagctgccgaccaagggcatccagcagcattacaagcatgctgtcaggcaggtgcgagctggctctaccaggtctgggggctgcctctaatggcaggcttaggggcg

SEQ ID NO: 17569 - DNA, 2300 bp, Homo sapien
tgtccgactctgccttacagctggagtcatcagattgcattgtggaagaatttgtgaggatctgtccatcagttagtaccctttgagatacaagtgacaaaacaaaccccagctgctttggtgaaaggggattaattggcccagatcattgagaagtctaggggaaggacttccttcaggtagatggttttagggcccaaatgaattcttttttttttttttttttttttttttgagacagagtttcactttgtgtcatccgggctgagtgccgtggtgtgatcacagctcactgcagtcgaggctgaagtgatcctcccatcacagcctcttgagtagctgggactacaggcgcatgccaccatgcccagttaattttttattttttgtagagacagggtctccctgtgttgctcaggttggtctcaaactcctggcttcaagcaatccacccatcgcagcctgccaaagtgctgggattacaggcgtgagccatcacccctggcccaaatacgttatttgggcttgtttttttctcagggtctcagctctgccttctgctatgtggctatggtctcaggcttctagaggaggcaaggtggcttcactgagagaggatcaaatcctcccagcatcaagtttagtgggaaggagctagagtcctttcacgccacttctgcagaggtgttgcgatgcactctggttggactagcttttggcacgtgcccgtgtgtgagctagtccttatatccatgtggatgcagggctctgatagtcccactcagaccttctgggccaagacctggggaggggtgcaccccagatcacacattggggctgttactagaagggagaatagatggtgggggtcagacaaccacctatccactccagcatcagagcaagaatccagggaaccaggaggaattggctaacgtagctgaggagacacatttattgttgccgaggagataatgggatgtaaatggaatgaaggagcctctggaaccagctacttcctaagcttcccttcttagtttaagggcatctgatagatttagtttctggttctttttgcaaggtgaggggagggtttttttttttttcttatatgttcctttaaaactaaggccagtcactagatctcttttagctccttcatctggaacataaggggcatctctgtacagaggagatagtagcttcattctgtttagttaacagtgagtgaagcccactgcgggccaggcgctcagcccagggagagccacaggcgaggtagcagatgagtccctggcagcaccatgagcggggcactgcagccccacagaggacagggtgagcacctctgtctccagagagggaccgtgaggaagggcttcctggaggaaggacactaagctgagcctggaaggatgaacaaggttcctcacacggagaagatgggaaggagtccacggccagggagctgcatgtgcactgaaaggcgccacatttggtggtttgaggggtctgggagcagttcctgtggctgactgggatgcacccaggacactgattccagagctcacgtggtgtcagtgtggaggagactggagtgacaggctaggtactgggacaccaggcagatgctgtggcagaggttcaggcaggagcctgatgaaagctttgcaagcccatatgttctagaacctaccatttaaaacaatctatactctcatagttcctttaaaaaagaagaggttaagctagagttgtgggttctttagagagagtgttaatacagagaagaatgtgggttctgtagacacaaaagagagcttgctgtataattccatttatacaaaactctggaaaatgcagcggttgcctggggatggggacgtcgggagggcgggagggagggattacaaagggtatgcggtaaattttggtgatgatagatatgttaactctcttgattatgacggtggcttctccggtgtgtacctgtggcagcacttatcaaattatatactttaagtatatgaagttcattatatatcaactatacctcaatacagcctttttttttttttttttttttttttttttttttttagaaaaaggctctggagccagactgccagagttcaaatccaagctccagctttattagctgtgtgatcttgggcaagttatcagacctctctgtgaccggttttcttatgtgtgcattaatcacatgtaaagtgaatagagacaaacaagtgctcattgtgattctctctctttttttttttttttgagttggagtcttg

SEQ ID NO: 17570 - DNA, 2300 bp, Homo sapien
gcaaacgttatcatttctctttgaaatctaaaaacaggtttaaactggaaacgtcaggacttcttgtatctttccctacaaatactggttacaaatctgcagttgtcaggctaaatgacataatgtcagaaatcaagagaatgtggtgtatttcttaggaaagtcaataaactcccctgtgcgaacatgtcccctggacagtgggtgactaatttctcaagtaaaaggtctttctattttgtttatctgtaaatatcatgcactgtctgacataagggggttcatctgctaaaatttcagtgtataggaaaatgacatggtaaaaatggttggggttttatcagattatgagactggtgtcattttaagtgaatgtttggactagtaaaaattatttcattttactattgaagctgtaagaacctaaggttgctgtcaagttgaaaggttcaaattcaattattttcaaatctaggtttccattgtgacttggaaaaaaaattagagattattgttcaaatctctcctactttggatttttttttcttagtatttggatgtttataagaaattgttgtgaaagttaaaatcttgtgcgtttgtaaaattggaagaggcacaagtgattctgaaggtggagcctttcagaggtaaagcaaacagcttgcatcttcaatattttatgagatctaggtattagaaccatgtttctgatgcaggaatacagctatctaggaacaaaagggagatgagactacagaacagactgtgaaatttcttaaaattattaaatgatcctaagactgagcacaggagtggatgatgttactgcagattgttcttaataagggctttaaaagcttaatgatttattgattggctctgcattaatgacgtgcccttgattatgcatgtgtaaataagagggctgatttatgagggtacaattgtatctttcagatatatttgtccaagtctacatctttaaaataaatggaagcaattatctgaatatttcaagggagggaaccccaccttcccatcccccacccccgatttgagggaagtctagtatgttaggtgaagagaaaaaaaaagaaaagaggaagctctaaagggagttaggaacaaaacaaaacttccgttaagaaatatccctgcttctcttatcctaagagaagaaaaacagattcccaggtgccaccggggagcaatgttttacttaaaaaaaaaaaaagaaaaaggaaaaagaaaaacctgtaagaagttgtcctgttaaatcaacgacacatggagtctgaaggaaatcagccttttcgttacaaacaggtttaaaaagccctggagaagagagacgtgaacagaagcaatattatccactaacaacctaactcccgcttagacatcagctgagagatcagcagcatcattgaacaggggggtttgtcttaagataatgactcatcttgatttctttcaggatataaaacttgtatttaaatcaattcagagaagcacttgagctttaaacattagagagcagggagagcctatttaataaacagcattatttcattttcaaagaatgatactggcagtagctctaagtttaaattttgtattattttcctcaattataattatagatgggtctgaaaggaagcatgcttattactgtcatatttattcttttgacaggtgttatgggactgtaatttggtgaaatgattcaaaacgcagattcctatccaaacacaattcttgtcatcaacacgagaggttcaggaaaagtcctccagcaagcctttcagagatcttgaacaccccatattcatagcacaatccatattcaggaataaggaggagagagtgcctttagggcttatatccggcgtagcaacagccagaaggcagagtgggtgtttgaggtaacaggtaacgaaggctgttagtggggacagctttcaactgggtggggtcggatctaggaagaggcacccagtaggaccccgagtcccgcgcgcggccggcagagggcgctgggctcaccgtcgccgggcaggggcggtgccgctcagtccccggggcgcaggcgcactcgtcgccgcggcggcgtccggggctggcgttcccctggaggctggtgagccgcgctgcgcaggccgaggccgagggcgggggcgcgggggcagcggcggccggagccactgggtggcgggggcgggctagggatgtggaggcctcgggtgtcctcggatctattgaagacctaggggcgacccgcgccggcaccttttccc

SEQ ID NO: 17571 - DNA, 2300 bp, Homo sapien
catgtagttgactgaccagaacacccaatttcctggccaagccgataaatgatttcccttcattaacgttgcctttttttttttttctgggctgctacacttaaaactctatcatccctttctcttggggacagcatcaacaggataactcccttctacttttacttattctccacttccctccttttcactttcttctttctctccttctcctcttcacccctttgtctctcctctttcttcaaataatcctatttaataaagttgattatttcttaccgtctccattcctattaatggtggcatgtaattcttgtctctggacatctcaagacactgcagatatagtcagtggaaacagaattacactttgtgagcaaggtaattttaagtggatctttagtcaaatgctgtcaaaatgcaaaaaagaagaatgttcccaagcgcattcactcctttggtaatattgccacatacacatccagcatgcacttgaaatttttatgaaaaagaaattccattccaaaggtgattcatacaaaacattatgtgtatgtgtgtatgttatttacaatttgaaatcatgagacatagaacatattttcaagagataaaaaaagtggggacatattcagagataacatacatctgatcaccaatgtggtttcacatgtggtcactgttaataaattactacagaacacactagaaacagagaatgacatataccagtcagcaaagttggatttatggtgctgcagaaagtaacatagtatggaggaccaggaaggctgaaacccagcccataaattaatctccaagtgtatgttgtaaatagtcacaattgtaccctttttcctcttgtgttcccttttataaaaatattgaaatccttgctcatccctttcttttgcccagcaattaaagaaaaacaaactagatgtctgagatttcacataacctttcatacccaatatttttattgtcttaaatcttgagtagtcagcaagagttgtgttttgcaatacgctggggtaaggaaaatctgttcaccccattttccattttcgcccctggtgtcctcttctggcatattcacccatcaccccatggccctcaccctgtgttctggcaggatttgagacatgcaaattgcaagctggtaaatagcagctttgcatattttgaatagaagagaacaacgtggtaccactcattctgttctcagggaaatctgagataatagggagcaagatcgagggcagaccgagggtcttaagtattttcttaaaagtgtttattatgcttattaaacctattgtacactgatgaattaatttgaattatttacatggtcacccttggagacaataacctgatttaatcagaggatgcaaacgttatcatttctctttgaaatctaaaaacaggtttaaactggaaacgtcaggacttcttgtatctttccctacaaatactggttacaaatctgcagttgtcaggctaaatgacataatgtcagaaatcaagagaatgtggtgtatttcttaggaaagtcaataaactcccctgtgcgaacatgtcccctggacagtgggtgactaatttctcaagtaaaaggtctttctattttgtttatctgtaaatatcatgcactgtctgacataagggggttcatctgctaaaatttcagtgtataggaaaatgacatggtaaaaatggttggggttttatcagattatgagactggtgtcattttaagtgaatgtttggactagtaaaaattatttcattttactattgaagctgtaagaacctaaggttgctgtcaagttgaaaggttcaaattcaattattttcaaatctaggtttccattgtgacttggaaaaaaaattagagattattgttcaaatctctcctactttggatttttttttcttagtatttggatgtttataagaaattgttgtgaaagttaaaatcttgtgcgtttgtaaaattggaagaggcacaagtgattctgaaggtggagcctttcagaggtaaagcaaacagcttgcatcttcaatattttatgagatctaggtattagaaccatgtttctgatgcaggaatacagctatctaggaacaaaagggagatgagactacagaacagactgtgaaatttcttaaaattattaaatgatcctaagactgagcacaggagtggatgatgttactgcagattgttcttaataagggctttaaaagcttaatgatttattgattggctctgcattaatgacgtgcccttgatt

SEQ ID NO: 17572 - DNA, 2300 bp, Homo sapien
agaaagcccacaatggagccaacaccgaaaaagtggaggctagagatggagagagcaaaaatgggtcctgaggacattgctcagccccctggaagtctacaaggtctcaagcctcaccagaagcctataaggtctattccaggatcatttgattgctgaaacgataaactgttttttttttttttttgcttaatcctgtttgagttgggtttcagtcatttacaagtaaaacaaatcctaacttataaaaggcattcattatgttacaaaatttttttttagagacagggtcttgctctgtcacccaggctggagtgcagtggtgcagtcatggctcactgtaacctcaaactcttgggctcaagggatcctcctgcctcagcctcccaagcagctgagattacaggcacgtgccaccatgcacagctaattttttgtttattctttgtagagacaggtcttgctatattgcaggacttgtcttgaactcctggcctcagcaatctggaattcaatctgggaggccaatccttggcctcgcaaagcactgtgattacaggtgtgagctaccacatcctggccctcaacgaatttttgcatctttccttttccatttaatggacttgcccagtggcatagctagtaagtggcagcatcaatatttgaacacagttctggctcaggagcccatgcatatcatgttccctgcctataggaacttggactctagttaagctcccagacagagacaaatgaaacaggtgggtgatgagtcaaggcgatgacagtgggccattgggcaagttaccagcatagtccttctggagtgccttcaccctgcactctcatccccagaacctttgaaaggtctgggagaagcacagatgcagattcgcagacatgccagctggctctgcatgtttctatgcacggagctgatgcttcctctgctcatttaaaggagaaagcttgcccagagcagaggctgaatgaaacagacacatccacaccactggaccctgattcaccatgtgacctctttggctgagtcatctcctctcctaaaatgagctttctcatctgcagaatgaaggtgaagcttgacaaatgaggtgcaaatgagatctcataaatagttagatcagaaagttgctgctggatagccctacctgagcaactgcaggacttgatctctcctctccagcatatctgagagtcatcgagtttgtgaataagtccagtcctacatcatctccactgctctggaaagaccctctgctcctccaactcaaggccttgtgtggcctgcactgtcaccactgaccagactgcccaactgtagcactgcctgcctctgggtattagcatgctgtactgctgccttggacctctgatgagaaagggaggtcccttccccagtcctgttctggtggagagattcagtaggaagttgcctgcttttcgtgccctggtaaacttgtaaggaaagagggacagactgtgagcaattgggagggttggtgtggccctgggtcagcaagtttggccactttcaggacaactctctgcctagggaagtacaccaagctactcgcaggaggacgaattacaagcgtgggaaagatactattgttacaggcagcacattcgaacaaaatcagcctggtaagacagaattctgccagggagttgctcatccagttttgctcactctgggcaatggaatcctccccctaataatcagctaggacctaccctgtccagaaaataaagatgactaaaagatggtgatcattaatattttaaaactggctctccagaaaaaaatgtttattataacttttgtatcatttgtttattataaatttttagatattttacagagagaaaggatgttgctattgactgaatgtttgtatctgctgccccctcaaccaattcttatgttgaagccctatcccccgatgtggctatattcagagatgaggactttaaggaagtaattaaggttaaataaggttataagggtgaggccctaatctgaaaggattagtgtccttataaggagagactccagagagctgggtctctctgcccatgtgcaagcgtatgcacactgaggaaaggctacttgaggacaaaagagaaagcggcccatctaccagctgggaagagaaccctcaccacaaaccaaattggctgaaaccttgatcttggacttctggtctccagaattgtgagaaaataactttttcttgtttaagctacccaatccatggtataatatttcgttatggccg

SEQ ID NO: 17573 - DNA, 2300 bp, Homo sapien
ggtggcatgtgcctgtagtcccacctacttgggaggctgaggtgggaggatcatctgagcccaagaggtggaggctgcagtgggctgtaatcatgccactgcactccagcctgggcaacagagaccatgtctcaaaaaaaaaaaaaaaaaaaagaagacttgatgactgatagattggaagggacaatgtggacaggcaaaggagggatcgaagatgacttccaagtttttgagtaaactatacagtttcagtagggataaggttctgtaagcttattatttcacattttaaaggaagggtaaattcagataaatgaagtgatggaaagatgctattttagtaagatttcaatgacagaaacttacttgatagaaaatatgggagaggctggaggcggtggctcacgcctgtaatctcagcactttgggaggccaaggtgggaggtgggaggatctcttgagcctaggaatttgagaccaacctgggcaacatattaagaccctgtttctaaaaaattaaagaatcagccgggcatggtgatgcacatctgtaatcccagctactcgggaagctgaggcgggaagattgcttgagccgggagttggaggttgcagtgagctaggactgtgccactgcagtctagcctgggtgacagaatgtgaccctgttaagaaagaaagatagaggaaaattattatttttgtggtcaagtttactttttttgttttaatttgcaccaacagctttatcatttgtcgacagtggagttctgaatgccagagattcctcctctttttgccaagatcaggattaactatggagaggaccggccgtagactacgaactgtcagtctactgagtttctgtcagtcttttgagtttcctttgtcttcttgttgagtgaccttggaccttgagtttctgaagctcaacattccctttttcttcccctattttttaccccacactttacatcttaagtgggatattggacatctcggatcagtggaccagtgatgatttggactccgccttcttcgtctaggtcccgcccactttaagaccccaccccttccctaagccccgccccttgaagaggttgtctcgatatgacagcaaattctccacaatcctgtcctataggagatctaaagggtgggacttacatcaaccttttttttccatttgttttttcaagtgtctatttggcccaggttccatcccacttcattttcaacccaaggattggttactctgttctttgtctctggctcatgattggttctttcgttccgcccctctcttccagcttttgcaggcgggattaccacgcagcttcctgctcctgccaaaaaaaaaaaaataaataataaaagaagaagaagaaaagaggagagaggcgaaagaaaaatgtcacaaagatctttgctttttaattggctttaagccttgtcggtcaagccaaactctgcctttgattggtctttctatctgcccatcccggatcgggggcgggatttccccggaagacccacaccttgttgccactggccgaacagtgcgcctgtctgaagctcctggcccaggattggaggcggtggcggacaggtgggcgtggattggctagggcagccggtccgtgcaaggcgggggcggggcctcggcggctggttgcgcgtgtccgacgctggctccgctctatccggctttgctaggggaggtgagtccggccgcggcggaaccggcggctgaggaggcggcggctgaggagaaggcggccgcggcggctgaggagaaagcggccgcggggacggaagccgggtgggggggagggggggagacggagcagccttgagccctgcggggccgttgcgcgggggacccacccgctctcccccccaaccctcctcagcagaagcagccggcggcgggggcaggagtcagcccgcttccgaccgtaccccgcccgcctcccggggctcctgttctttggccccgggaccctaaccttctcccggggcggttccctccgtctgggcgtccgagcgctgcccacatctttcattcctccctgcacctccttcccttcacttttgccccggctctctttctcctctctgtcctgctgtcgcctcctctcctcactccagcctccttccctggcttattctgcccaggaaagtttggaacccccgccccccctccccaatcaggtcaacctgactaggagtagggggagatgtaggaaggcctgagagttcggggggggggaagctggaagctggtttcccagaaaatt

SEQ ID NO: 17574 - DNA, 2300 bp, Homo sapien
tcttttgagtttcctttgtcttcttgttgagtgaccttggaccttgagtttctgaagctcaacattccctttttcttcccctattttttaccccacactttacatcttaagtgggatattggacatctcggatcagtggaccagtgatgatttggactccgccttcttcgtctaggtcccgcccactttaagaccccaccccttccctaagccccgccccttgaagaggttgtctcgatatgacagcaaattctccacaatcctgtcctataggagatctaaagggtgggacttacatcaaccttttttttccatttgttttttcaagtgtctatttggcccaggttccatcccacttcattttcaacccaaggattggttactctgttctttgtctctggctcatgattggttctttcgttccgcccctctcttccagcttttgcaggcgggattaccacgcagcttcctgctcctgccaaaaaaaaaaaaataaataataaaagaagaagaagaaaagaggagagaggcgaaagaaaaatgtcacaaagatctttgctttttaattggctttaagccttgtcggtcaagccaaactctgcctttgattggtctttctatctgcccatcccggatcgggggcgggatttccccggaagacccacaccttgttgccactggccgaacagtgcgcctgtctgaagctcctggcccaggattggaggcggtggcggacaggtgggcgtggattggctagggcagccggtccgtgcaaggcgggggcggggcctcggcggctggttgcgcgtgtccgacgctggctccgctctatccggctttgctaggggaggtgagtccggccgcggcggaaccggcggctgaggaggcggcggctgaggagaaggcggccgcggcggctgaggagaaagcggccgcggggacggaagccgggtgggggggagggggggagacggagcagccttgagccctgcggggccgttgcgcgggggacccacccgctctcccccccaaccctcctcagcagaagcagccggcggcgggggcaggagtcagcccgcttccgaccgtaccccgcccgcctcccggggctcctgttctttggccccgggaccctaaccttctcccggggcggttccctccgtctgggcgtccgagcgctgcccacatctttcattcctccctgcacctccttcccttcacttttgccccggctctctttctcctctctgtcctgctgtcgcctcctctcctcactccagcctccttccctggcttattctgcccaggaaagtttggaacccccgccccccctccccaatcaggtcaacctgactaggagtagggggagatgtaggaaggcctgagagttcggggggggggaagctggaagctggtttcccagaaaatttccccccatcttctccatttagggtggtgggaattttttttaatcctgtttttgaggaggtggtaggtgtttagaaaaggatgtgggaatggaaggggtagatgagtcaaccctctttcaagattccaagggtggtgtgttacctgatccttttcgtgtgtggagttcagggggtcgggaggtttggcctttattcccacattcaaagttggaacctcccccaaattaagaatggagttttagtacccacttgtggcaggaatcctggggggaaggggtccttttttcctttttcttttcttttttcccttttttttccttttggcaacccacacccttccacacacgctcaccccaaaattaaacaccaagatcctctaacttgtttggattgactgatgaagacataaagctctatgttttttgaggtggagtgagtggtttttcttcatttttaaatggccaaatgacagcttgacccagtttgctttccaatcaaagggcatttattttgaatgtctctttgtggcgcaagagccaacgcaaaaatgatggcggcttacaatggcggtacatctgcagcagcagcaggtcaccaccaccaccatcaccaccaccttccacacctccctcctcctcacctgcaccaccaccaccaccctcaacaccatcttcatccggggtcggctgccgctgtacaccctgtacagcagcacacctcttcggcagctgcggcagccgcagcagcggctgcagctgcagccatgttaaaccctgggcaacaacagccatatttcccatcaccggcaccggggcaggctcctggaccagctgcagcagccccagctcaggtacaggctgccgcagctgc

SEQ ID NO: 17575 - DNA, 2300 bp, Homo sapien
gtctcactgtcttgaactcctggactcaagtaatcttcccatcttggtctcatgagtaactagggctatgggcatgtaacaccaagcctggctaatttttttattttaaaatattttgtgtagagacgagatctctctgtattgcccaggctgctctcagacttctggcctcaagtgatcctcctgcctcttttcccaaagtgttgggattatataggcttgagccactgcacctggtagttagcagactatttattgaaggcctgtatactaggctttgagtcctgagggtagactgggaacaaaattaatatcatatgaagcaggtaagacagacatttaacacattattttttaaaaaaagtttttcagggatggggtctcattatgttgcctaggctgtccttgaactcctaggctcaagcagtcctcttgactcagcctcccaagtagctgggactacaggtatatgccactgggcctggcttaaacaaatcattttaaatgtgcagtcttttaagatagtctacctagattcacattctgctgttttttattggccatgtgcctttcggcaaattgctttactgctttgtgtctcagctttctcttctataacataggggttataatggtacctatcttaggttcttatgaaaattaaatgtgataatgtgtataaaatgctacagtggcttgcctgtagtcaacactcaataaatattagctgttttaattgttatctcttagcactttccatctttgttttatggagaaaaacagtgattaattagaaaatcctaatttaacctagtccaaattataaggtcaaggaagcttccttgacataattcctacccgggagaaacttatacttgaatatttataaacaaattgcaataaagatatataaatacagataagtacagaatggttactgtgggaagatatagatgggataccaagggcctcagtttgtacaattctgatgtgacaatgtttacattatgttatgaatggtacccccctgcagttggcagtgtagtttttttctaggcagtgtaggcctgattaggggagtgatatttgagttaaattttgatgatgacaggggatgagggagaagggcagctcaagcagagggaatttcatgtacaaagtcagtgaataagagatggcagtgtttggggacctggaattggttcattatggttagaatgtaggatgaatgtgatcgctaagagatgagaacaagaggttggattatgaaggaccctttttgctttattaataccttgagattttatctgaatctgggaagctattgaatgacttaaatgattaaaatgatcagatttatttttagaaggtggctcaggcaatactaagaagaatggtttggagtaggaacaggtctagaagctgggagaaggtagttgtagtagtctaggtgaatgttcctcctagtgtggacccaaactttattacaaattggcagtgataaataaaaacatttctccttatcccataacttgcttgaggctcattactagatatttagaaactttcatggcagtttgacatggttcatggtatataacctttgttgggccttcagtgttctctagcaagtcttagacttgtctcaagtcagctcatttctccactgctcacacagctatttctaaccactaccactttcctcaagttcctactccacctcttcctcagtttctacagatgacttcattcccctatttcacagagaagataaagccaagggatgcaggaactgggtaacttcctgttacacccacagacgaagttatgtcaacgtagctttcctttacttttcagtctccagatcctgttctcttccagtttttccagaggctttactccactattatcttctttcaggtgttcaacctctgcccctctccctttcctcttaccctgtaaacttactgaaacctcatccctaaattcaaccctcatcctctagattaccagtctaacctctttctttcccttcgcagccaaggtccttgaaaatgtagttgtccatcactgtctctgcctcttcatctttcatttattcacagtccactgtgcagtcatttctacatataccatataccatacagcccaaactgctctgacaaatacatgacctgttattaactagcagttaagtaccaaatccagtgggcacatttcagtccttacgatttatgttgcatgtactaatagtttgttcttgttcattgtattaatatatcacaactttaaaaccctct

SEQ ID NO: 17576 - DNA, 2300 bp, Homo sapien
cccggccgcccctactgggaagtgaggagcccctctgcccggccaccaccccgtctgggaggtgtgcccaacagctcattgagaacgggccaggatgacaatggcggctttgtggaatggaaaggcgggaaaggtggggaaaagattgagaaatcggatggttgccctgtctgtgtagaaagaagtagacatgggagacttttcattttgttctgcactaagaaaaattcctctgccttgggatcctgttgatctgtgaccttacccccaaccctgtgctctctgaaacatgtgctgtgtccactcagggttaaaaggattaagggtggtgcaagatgtgctttgttaaacagatgcttgaaggcagcatgctcgttaagagtcatcaccactccctaatctcaagtaatcagggacacaaacactgcggaaggccgcagggtcctctgcctaggaaaaccagagacctttgttcacttgtttatctgctgaccttccctccactattgtcccatgaccctgccaaatccccctctgtgagaaacacccaagaattatcaataaaaaaataaatttaaaaaaaaaaaaaaaaaagagtgactgagagagccctgaactctccctctcaggagagctctaaaaatagcacccacagccatctgtcctggggctggaggggctggctcagaaccagcggcctggacaagttggccccttcagcccccatgggttgatgggacatctggaagtactggaggtctggccaggccagggagaggaagctggaagggctttatggagagaccttcccacagccctctctcctactgggcaggtgggtttgagggggttggcattctggaggcccttcccctactcagcctctcatagtgggtggtgggccccagacttaggcttccggtccctgctcccaggcctgcctccggcaccacatggctactccaggtgctgaggctttctgcccctcacaattgagaggtcctcttcctggggtctgcctcaccctccttttcctgtttgaatcatgggtgactttggctgcttcatcagggcttcaatttcctcatctggaaaatggagataaactcagctcattgttttgtgatgtccgaaattatgtactacccggtgcacagtaggtgcttaataaacatgagtcctttccttcaaaggatctgggcttcagagcccagtggagactgccatgggctggggacagtggcatgtgcttgggaaggcttggcatcactcaggcccagaagacaccagtgccctgattgacacctgcataggggtggggacattgcctggggagagggctctatgccacacatggctggaccagggtctttgtgtgccaggctggatacacaggtagctgactcagctgcttctggttgggggactggcttctgcctcctcctgcctcttttcccaactctttaatggagagagaacataacggagtgttcagagaggcctctcccccaggatatcataaactgcaggccaggagcccaaggtcaggtgctcccacccctgcctccaggagaaagactttcccccagaggtcctgtcactcctcagcccttctccaaggtattactgagcagaggctgaaaagagttgtgttttggaaagagtggtcacagatcccacaggctggaagaaatgtgtctaccctcccaccccccactcccaccatggactggctagggaagacagaatctcattcctggtcctaggggctgccccaggagtctaatccaaccacttcacttcctcaggaggctggacctgcccctgcggggctgtgggctgaacacagggttcaggctaggtaccccatccagtgggaccccaaatctgagcatggcagctgccccctgagctcctatgaggtggagacgtcacacagtggctgagcgtaagctcaaggatctggtgcgggtggaaggaggaagaagggcgcaccccctgctggctccccctccccgtgggactccctttcctttccaggcggggatataagccccgaaaggaaagccctgagcagaggaggcctcagcttgacctgtcccagtgcgcccttgaaactttcctcgccttccacctcctgctcatctgcttcacaagctgtcgctgtgagtggctggagctcaagcatggtctggtactaggaaatccaggctgttttgtggggaaactgaggctgggatggtggaagctgggggtgagtggtgggaaactggattggagggggccattggaggtgggaa

SEQ ID NO: 17577 - DNA, 2300 bp, Homo sapien
cagccaatggcggagccaggatttggacccaggtctatctgactctaagctcaccctgccagatccatggagtttcacctctggccccctcttccccaacagtacccccaccaacttcttggtgtcctgatctgggacagcagaacgtcagcactgagaagtccttttctccctacttgggtgtcaccgtgtcattcagacacagttaccactccttggcctgagcaggggagggagacttggggttgggaagagacactgggcaggggaaacctgggggcttctggtggggatgggttagtggggttgagaatctaagccagaattggagacctaggtagctatgagatcttgaacaagcctctttacctctgtgagcctcaggtttctcagcaaaaaattgggaaattataccaatactttgacagtcccacttagaaaaaaaaacaatccaggtttggagttagactttggagttagattttgttccaaaccccggatctcccactgactagctgtgtggtctggagtcagttacttgacatttctgtgcagattttggaacctgaatctgtaaagtgggttgttgtggggatttagtgaggtgactgagctgggagcactttggaaaaggtgaggctttacaaatgatgctggtttttagcactccgctggaatgggggctctaggatggctaccagaaactggtaccccctcaacctttcccctgaacctaggcacattagttctcattctgcatcctatgcacccaccaaacggctttctccaaacctggcaccccacttctttccaccttgcctgaggacctgaagcctcttccctgttcccaccttgttctagttccaaactgcaaaggatggcctgagtttccattcttcatcctggaggctccagctgcagcctcaatcttctgccccgagagaatccatttgatttggtttgatccttgggagatgggagggccagctccaaggcctgtgaccaaaacctttcagtcaccctgaagtcccataaccccatctttcttgaaccaagcctgctctggtgcccaaaaggaaggggtctcagcaatgggggcccacaggagacttttgctgtgatccagttttattgactatgctgctagtctggcacccccagcactcccgtccccctcccatctctggcccagtagtggcgttgcgagtaccagggagacagtgggaggagggagtaagggctgcggagtgggagaggctgacaggagacggggactctaggggactgaggactgaaaaagcggcccagctgagggcagggacacgtccttgcttggtccagtgaccgtttactctggactctgggtaagtgggctcagcctgcttggggatctggagaactcccccaggctggggtctgggatggagggaaggagttcgtgctttgcagggccaggggccttcaaagccctaaggtcctgcttgggtattgctctgcatctggacacacctgtcacactaggagagccatcagatgactgcaagtgtgtgtgcacactcgtgtgcatggctgtgaactggaatgtgtccctgtgtgagtggctgtgccggtctgtgcaggatgtcttctccagaacccatatctgtctctactgttgggtggagggccagacccacaagaccatggatttctgtcctttgcttccccagttcattccatgtcccacaccctgtgggtgacctggtgtgcccttatttcccactagctactgctgcctcagagccatgaggacctggatgtcatgagacatgtgtctccaggactcatgtctccattttctctgctacacttctctaacttgcgaggccctggctgctgggctgctcacaggacaggctgtccgtgcctccagcacactgtctaggaggtggagtggtcagctcggagtggcccttttctctgccctctcgtccccaggcttggagaaatggatgatgggctaaacggctgggtagatgggccctgcttccggggcataggaaaatcttcagcatgggctcttccacctccacctccacctcccctctgctagctcctcagatggctgccgcatgccgctgcctctccctcctgctcctgtccacctgtgtggctctgttgctgtagccactgctgggtgcccggggagccccgttggagccattgtacccaggggacaataccacaccggagcagatggcccagtacacagctgagctccgtagatacatcaacatgctgaccaagcctaggcatgtgcc

SEQ ID NO: 17578 - DNA, 2300 bp, Homo sapien
cccaaagtgctagaattacaggcgtgagccactgtgcctcgtctattcttttatcattaaattgtatagacctgtagagtgaaagaattgatattcggctgtacattggtgttctataatataataaggtttgagctaatctcagtatttgaatatttattatttagtaatttagaagtactttgcaattaacacctttaaattaacttaaaattttaaatgtagtagaaattaaaatgccaagaagcaggtgttatttaaaaaaaatcattggacaaaatattgaggttaatttaagacagactttcaggattaatagctattttaaattttttaaaaatcatttgttgatgagtgctttttcttattcctgaaataactactcataagtccttttttatttttttatttttaatttttatttttttttggtctttggaaaacatactcctgtcccttgctattccatttttctccttttttccccctttcttcatttggatagactttgccatacaattttatttttattatttttatgtggtaaaatacacgtaataaaatttatcactttaactgttttaaagtatataattcaagccacgtgtagtggagcccgtagttccggctagtcaggaggctgagcctgggatccttgagcccaggagtttgaagacagcctgggcaacatagcgagacccccttctcttaaagcaaaagtatatagtttagtggcattaagtacattaacaatattgtatgaccatcaccaccaccatcttgttctagaacttgttcatcattgccacttaatgttagcacctaattgttccctagtgtttggctgccatattaagtattaggtttgtaaaggataaacaagacttagttcttgtcctcgaggacttcagagtctagtgagagaaacttaacatttatgatacaatgtggcaaattacatgctagagttccccatcactgaattttatttattcaattagaatttttttatatatttaccaatgcatatatttaatgaatcaggcatacaatgctcacccattcagcaatttcagtgcttttcctgtttgccttgaaaatttcatccaggaattcacaaaggaatactcgatgaagccacatcatcaaatggatttttccccagggaagtccagtttttttcctttttttttttattatactttaagttctggggtacatgtgcaattcctcaattagaattttaattttaccttgagaaagcaaagtaactttttgttaatattccggttatcgtatcattccacacactgaattcatttaggctagaccaaaagactgaagtctttagtcttttgacttaggtcattgtgggactcacaaatcctcatgccctatactgtattgcaagaagggaaccagaaaattgacattttgatttagaaccaaattatgagctattccttcctaatgaagcagggagatctgtgaaaactatgattagagagaacttcttagttgtctgcaactatcatttgttgaaactgtttttacttattttagttgcagtgacaacttgcttatgatcaaatacagtattatatgggtatgtttatctctctaggcagatcatcttgatgaatagttgctttggaaactgtcaagagattgtttttaatttcttgaaaagcctgggagtgcattttacaaacctcttgtaagacagaaaagttctctaagtccccactcgacccaggaaggattttcttcattattaaaaatttaatgcaatattgcttataaaagtaaaacagcgtggctttttccatctatagaagggctaaatatggcaaatattttctattaaaaggttggggtggagttgagagaagctttttcatattatatacacaggccttctataaacggccagtaaatcttcccaaagggtggtgggcatttccaacgggccaaacatggcctgtcattctactatttctctcttccagcagcaaggtctagtagcactaagaccaaccgcccgatggccgctaactgttctaccggtcgtcgttcggaactccgttctccttctaggccagttaaggcctttgtccgttgaggtcaggactaggtggtctcagccaatggggacagagcggtcacggggaccgggtttgcgcggctccgaggcctaaccaggcagccgagcctgcctgcgtcccgaggccgccttcccgggacctctgcaccctcaggtcctccgttgggtggtgttcgggcggccgccaggcttcccg

SEQ ID NO: 17579 - DNA, 2300 bp, Homo sapien
actctcatcccatgctcaccttccttctggttactcccccgtgtgcagtggcattttcgccaccaccaccctgggtggccttcccttgacctcatctccaaagaccttcccctccactccatttcagccgcacactcccacgggcagaacctcttcctgaccccaggaattcaggtattgcacgccctcctcataagctcccacccttccggcccagtgactcccatcacgctggcacgtgttcctcagcaggcctccactgtctccctgtcttacagccccctttggcctcacctctccctctccccctacctagcttgaactgcaaccttctgcacctcaatcactcttcttcagctcttcaaagccacctttcgcttttctgaacccaaactctgtaggggtccaacagccttcttctgggtagaccccgcactagagaaatgcaaagcacacagcctaagagattggggcctccgggtcagcggccccccacctcagctgggccttcaacactgccataatccctctgtcctagcccacagcgccccaagggaaggggaagctgggcggagcgcagtgcacccacctaacccaccccaatccttccattccctccgcctcctccagggctttgagccgcatttcctgctcttctcgagtaggggtaacctctcccactgtcaaaactaaactagctcaagtctttctcacctgcaaaataaactctcgagtgcatctctctccagctactgccccatgtcttctccccttcgtgaccagctgtctacacttcctgcctccatttccccactttcttactccctggctcctgcccccacgacacaactgttccccacagggccacaggcgggcatcactcagtgttgacaggctgcccctccctgtgacatagccccctgctagtacgctcctatctcagtcccctcctcccatgacctgaggctggagctcccccaggatctctcccaggccctctgctcgccatcaaaggcggatgcctcacaagcttacgactccagacaggctcacccaactgcctcctccacccaacgctgcagcccactcaaggtccacgtagtccaagctgcattccttcctcgcactcccttgccctgtgtcccctcttagcaaatggcagcctcggcgatcctgccccgagacaggcctgcgcccagcgtggagatgaacatcagtatttgctgaacgtgtaaacgaatccttgaccttccctcatgctccacagccggtgaggattcctgtccattttactgcctcctacgtccctcgagtcctcccctctgcttctttgttcaccgcggccagctgcctccccagacccgcaaccccggctgggccgggaacctgcaccgcggcgctcgtgccccgctctgcgacccctgctccgtgacggccgcactgcaccggggtaccgcggcccagcacaggcgctggtcactagtacacgaactagctaggactacaggtgcacaccaccacacctggctaattttttattttttgtagagataatgtcttactaagttacccaggctggtcttctgggctcaagccatcctcctgcctcgggctcccaaagtgcagacattacaggcatgacccaccgtgcacagcgtcagctttatttttttaatgctgacttactgcagaaggcccaagggccagtgcagttttcatactgctgttgtagtggcgaacggagccacgagggaagggagcgccgccggcagctgccgggacaccaggataccacgcggccagcaccgaaacgctaggctcgcgctcacaaccgcaatctacactgagtagccgcgcgccgaacggcgtgactaagccccgcccacacggcgctcctggcggccaatggaaatggcttacgagacgccttctccacgcgctatacttatacggaccaatgggtgcgccctgtggggagtgccgccccctgtccacgagcctcctcttctcgccagccaatggaagcggtctgcctagccctcgcgggggcaaggcggcgaccgaggcgcgtgggtctgggaaggcgcgcggatttggcccctcttctcacatcagcgggtccaggcccaaccgacagactatgggggctccggcaaccaggcgctgcgtggagtggctgctgggcctctacttcctcagccacatccccatcaccctgttcatggacctgcaggcggtgctgccgcgcgagctctacccagtcgaggtgaggggcgcccctcttatcccggcccgctgag

SEQ ID NO: 17580 - DNA, 2300 bp, Homo sapien
tccactgtctccctgtcttacagccccctttggcctcacctctccctctccccctacctagcttgaactgcaaccttctgcacctcaatcactcttcttcagctcttcaaagccacctttcgcttttctgaacccaaactctgtaggggtccaacagccttcttctgggtagaccccgcactagagaaatgcaaagcacacagcctaagagattggggcctccgggtcagcggccccccacctcagctgggccttcaacactgccataatccctctgtcctagcccacagcgccccaagggaaggggaagctgggcggagcgcagtgcacccacctaacccaccccaatccttccattccctccgcctcctccagggctttgagccgcatttcctgctcttctcgagtaggggtaacctctcccactgtcaaaactaaactagctcaagtctttctcacctgcaaaataaactctcgagtgcatctctctccagctactgccccatgtcttctccccttcgtgaccagctgtctacacttcctgcctccatttccccactttcttactccctggctcctgcccccacgacacaactgttccccacagggccacaggcgggcatcactcagtgttgacaggctgcccctccctgtgacatagccccctgctagtacgctcctatctcagtcccctcctcccatgacctgaggctggagctcccccaggatctctcccaggccctctgctcgccatcaaaggcggatgcctcacaagcttacgactccagacaggctcacccaactgcctcctccacccaacgctgcagcccactcaaggtccacgtagtccaagctgcattccttcctcgcactcccttgccctgtgtcccctcttagcaaatggcagcctcggcgatcctgccccgagacaggcctgcgcccagcgtggagatgaacatcagtatttgctgaacgtgtaaacgaatccttgaccttccctcatgctccacagccggtgaggattcctgtccattttactgcctcctacgtccctcgagtcctcccctctgcttctttgttcaccgcggccagctgcctccccagacccgcaaccccggctgggccgggaacctgcaccgcggcgctcgtgccccgctctgcgacccctgctccgtgacggccgcactgcaccggggtaccgcggcccagcacaggcgctggtcactagtacacgaactagctaggactacaggtgcacaccaccacacctggctaattttttattttttgtagagataatgtcttactaagttacccaggctggtcttctgggctcaagccatcctcctgcctcgggctcccaaagtgcagacattacaggcatgacccaccgtgcacagcgtcagctttatttttttaatgctgacttactgcagaaggcccaagggccagtgcagttttcatactgctgttgtagtggcgaacggagccacgagggaagggagcgccgccggcagctgccgggacaccaggataccacgcggccagcaccgaaacgctaggctcgcgctcacaaccgcaatctacactgagtagccgcgcgccgaacggcgtgactaagccccgcccacacggcgctcctggcggccaatggaaatggcttacgagacgccttctccacgcgctatacttatacggaccaatgggtgcgccctgtggggagtgccgccccctgtccacgagcctcctcttctcgccagccaatggaagcggtctgcctagccctcgcgggggcaaggcggcgaccgaggcgcgtgggtctgggaaggcgcgcggatttggcccctcttctcacatcagcgggtccaggcccaaccgacagactatgggggctccggcaaccaggcgctgcgtggagtggctgctgggcctctacttcctcagccacatccccatcaccctgttcatggacctgcaggcggtgctgccgcgcgagctctacccagtcgaggtgaggggcgcccctcttatcccggcccgctgaggctctcccggcgctgcgtccacagggccttcacctcctccgcgctcgcgcactctgggttccagttgcctctctcgggtcctgcccatgcctcccccgctcctaacccaactttagttcggtgttttcctcgggctttgtctctatcccagccccttctcccaagcggcgggggcgaacgctttgtttcctttaaagtcacttcttccctgggtttaaggtttcccgcgattccacctctggccggttgtcagtg

SEQ ID NO: 17581 - DNA, 2300 bp, Homo sapien
ttgttcatctgtagcttccttaaaatagggctttttaaaaagatctggccagtgcagtagctcatgcctgtaatcccagcactttgggagactgaggtgggaggatcacttgggcacaggagtctgaaaccagcctgggcaatgtggcaaaataccgtctctacaaaagatttctaagatagccagacctggtgacaggtgcctgtagtcccagctacttgggagggtaagctgggaggatcgcttaagcccaggaggtggaggctgcagtgagccgtgttcacaccactgcactccagcctgggcaacagagtgagaccctgtctcaaaaaaaaaaccaaaaaatctgtctttcgcagctacaggtcattaatctgaccagctgctccagaaagattgaagtaacatgagggagcaaatatctgcttcaacttccacccccttccctgagagcatgcatttattcagaaacatccactcagtccctgctctggggacagactagtgaaaacaatgcctctggacagatggtaaagaaataatcacaaatcgtgatattactataaggaaaagtacatggtgctgtgtgaagtgctgcaggaggacacagttcatggggggcggacttggaggggagggccaacagaggccttctgaaaaaaatgacacttaaacagacctaaagactgtccaaaagtatgtcaagtgaaaggggaagcaaggcattgcaggcagaaggaaacacgtatgtgaagatcctgaggcaacaggaaatttgatgcattccgagaacagagactgagcaagagaagggaacagaatgaggctagacagggagacaacagctggatcaccgaaggctctgaaagacgcagtcatgagcttggattttatcagaagggtaatgggacagccagcgggttctcagcagaccaacaaaatcagacttagaaagatcactcttgctcagcctgagagaaccgattggagggaacaagagagggcaaagccccaagtaccttcttgttcatcactctaaccctagcacctagcatggtgcccacacataactggcactcagtaaatgtttgtggaatgaatgaccgtggaaacaggagactattgcagtaaccaaggctggcagccgaacacaagtgttccgagttgagatgttttgtaagtcgaggtgatggggcttagcaatggactgactgaatgtgggggtttggggataagagaaaaacaagtcaggcatgactcccatgaatctggcttggcccacctatctgattggaagggctggcttaaagagataggtaagatggaagaagaggtgcagggaaagagttcacagattatctaccaactcccatcacacgcgtgtctgagcatctgagcaacacctggcccaagagctgggactaagctccctgagcatgaggcggtggcatactttctgcgccccggctctcccagatgcatgcgaggcactgcgagccgactctttactatgtaaactccccgaacttatccgagccgcagtttcctcgtaagatcgtggcaagcatcaacgcatcaaactccaggcctaagctgggtgtgaaagcgcccccctgagagtggggcggaattcccacgtctctccccgcccggtactgcctttcctcaggacgcgggcctgtcaggctcctctcgcccctggtccgcccgcgtcccccgacccgaggtcagcctacctgccggccccgcggcggcagcgcgctgcagcccaggctgatgtagacaggcagcttctcctgggtcagcgacagccggtacccagccagcctgccacggccgctgccacggatacagagcctgtttacctatgacgtcactaccttcctgactccggaagcacttacagcccccattccacagagcctgctgggaaacagaggcccgaggggaggcccggcctacaagacccagaagccttagcgccggcaaggcggccagaagtagctctgctctctccgcgaagaccctcgggggattccgcctccaccctttcccggatagagcgctatgcatgcagggacttgtagtctcaggctccccagccggctgggctgggcagcactccgggcggagtcgacgagcgcaggatgtgagctcacagcttgggactgctgaggggcaggcggctgcaggctaggggcggctcggagtccgctggccacccagctgagaggagaggcgcccccggggacggtgagagccgggcccgccgatgccctcggggaagggatggacggccc

SEQ ID NO: 17582 - DNA, 2300 bp, Homo sapien
atagtgagagtttgtttctacaaataaaaaaaaattagccagatatggtggctcatgcctgtggtcccagctgctcgggaggctgaggtgggatgactgcttgagcctgggaaagtcagcctgggtgacatagggaaatctcatctcaacaatgacaaaattaaaacaagtttgaggatcagaaatacggtcataatggctggtgcacagacagtagggggaagttggtttgatgtcaagtcagggaaggcaggcgttagatgataacaaaggtggatttcatactaattgctatatagtatatgaatcaattggagggttgcaagcaggggagtgatatgatctgacttgcttgtagtgtattttgaaaagataacttgctgctgggtagagaatgaattgtaaaggtgcaagagagaaagtgggaagaccagaggaagcagtagtctaggcaagaagagatgatggcagcctggaccacattggtaataatggagacagaaaaaaagtggaatgatttcaccgaatgctcatcacatgcaggagtttacagttgctcatgccttgtaagtgcaacccagaagcagggcactggtttcccaagtttaccgctgtgttcccctaatggtgctcagcacaatgccatgcacattttaagtatttaacatacgtcagtttgttagactgaaattgtccctgaaaagatttaggtaagtccctgggaagaatgtccaaggaagtggacagccagcgtgggtgctgtgtgaagcagtgaattcctttggcggcttgtctgggagactctttcatttgccacaggggttgggtatgggaggtgagccctcaccaggaggttgccaatgactaagaaacactagaatggtatgagatcaccttcccttttcccgcccacctcaaaggaataaatccacctctctaacaggtattagcaagttccctgtgtattttgtgtctagtcctagttttcccaggatcagagaaagcacacatacatgttctgccaatgcaaaggagctcaaaggataggcctgccaagagaggtcggcggatccagagctaatctcttcctttcctacaaagcaattgctttgagcccctggatgacgtcaatcacattccgcccagaccaatgggttccaggaattctgtggcaggtgacgccccagaaagtaattccagtgagaatgaagtttccactgatagccacagtgctcttccttccgcactttgtgtgtggatatttggggatgcccggggctaagggcggatccgtggctcacgcaacgaagctaatgggaacccaagcacaacaaagggcaaacagccgcggaggtggaaagaggaggggtctaaaaggaagaaggacccagaaatccgtcagacacggaggacggcgggaggaaagctgagggctagagtggcggatctagcagaaaccctaggtgtaaaggttaagcgtcacccaaaaagtcctgggaaatgtggccggtgtgggctcttctctagcccggaccactcctcactaccgagaaacccacaccggttctcacgcccaccctccgtgggagatcggagctctccatctcccctacgccgcccgcgccttttcccccaggacccggccgggctcgctctactccagcaggggccgtccatcccttccccgagggcatcggcgggcccggctctcaccgtccccgggggcgcctctcctctcagctgggtggccagcggactccgagccgcccctagcctgcagccgcctgcccctcagcagtcccaagctgtgagctcacatcctgcgctcgtcgactccgcccggagtgctgcccagcccagccggctggggagcctgagactacaagtccctgcatgcatagcgctctatccgggaaagggtggaggcggaatcccccgagggtcttcgcggagagagcagagctacttctggccgccttgccggcgctaaggcttctgggtcttgtaggccgggcctcccctcgggcctctgtttcccagcaggctctgtggaatgggggctgtaagtgcttccggagtcaggaaggtagtgacgtcataggtaaacaggctctgtatccgtggcagcggccgtggcaggctggctgggtaccggctgtcgctgacccaggagaagctgcctgtctacatcagcctgggctgcagcgcgctgccgccgcggggccggcaggtaggctgacctcgggtcgggggacgcgggcggaccaggggcgagaggagcctgacaggcccgcgtcctg

SEQ ID NO: 17583 - DNA, 2300 bp, Homo sapien
ttgcagtgagccgagaccatgccattgcactccagcctgggcaacaagactgaaactccgtctcacaaaaaataaataaataaaataaataaataaaataaaaaatgaatacaaatttgattctggaatggcaccaaacatcaaggtggaatgaatggaacaccataccatgcaggcctgtgacctaatctgacttttttcagaagcagagcactctatgaaaatgaaagatgacccagcccaatactcacctgcccggtctcatattttccattctgttttggcacctcaaacacaccaactgtctccaacactttgccctctggtcggtttctgagtaggaaggaaaagaacaagcaacagaaaagctgagaaggtaatggtagttatccataagaaaaagctcctaggatactgaggggccagggcgatgacagcagagaagggtttggggtagtgggaccagctggagcaggaaaggctttcctcctccttggtgaaaacctccacagtctcccagtgttagatgtgaccgctcccatactactgtcttctctcttcactgggcattcttcatatcatgccctcacactctgctcaaatgtacccctgcccttgtttcttccctaacccaccctcctgacctcccacagcactttaactgtcttgctcactttttcaatttttttagaaggggagtatctttttttcttcttttcttacattttctatatcacaagtcatcaaacaatatcctgctccctttacatttcagttgtgtccatgtcttatctttattaaatactgtaaattccctgggagcaatgcctgagtctgattagctggtactgccccctcagagcctagtgtacaagaggtgctcaaaaaatatttgtcctgtattataattccatgtccatctccccctctaacctgtagcccttacattgcccttgaaaagcttaaacatctctagatttcctacggcacatcgctctctcaataccgtttttgttcatattctcacaggggtcttaaattgcaaatagctatcatctctccccaatgttcagtgtctaatatcagccactaaaatgtcagtcaccactctgaacagggctgctctttctaggggcccttcaaataaaggctgtttttactgttttgaagatgtgaactttatgcttcctcccactgatccaccagcccatttgatccgcctgtcccatccgtggaaacagtttccacaccatccccatggcctcaaacccccttccccaagtcacagatagaaaatcgatctccccaaagtcacttggaaacctggggcctacgagggtccacacccaagagtctcgtttcccacctctagcatctttctgaggcagaccttcaccaaatccaaaggctgagggttcaagccaatgccctagggctgaattaaaaagcttccctctgacatcggtgctggggaccccagccggggaagtaggattcacttggggagggtaacctgttcccccccagggccagccctgtacaaccagggctctgggccgcgctggcttccctgctcctggcacatgtcccagacagcgcaggtcggctccctgctcgggaccctctcccgggtcaaactccagtcaccctcagcaggcccgggcccctggcctccgcactggctaggaacacgctctctgggctccaggcccagttcctcgcgccccctggctccgtccctcaccgggacgagaggtgcctccgcgtcgtcgtggtcgacgctggcgagaaggctccagctccggccgccgcacagagcggctttgccaccgggccccagtcagcgaccgggaccaccagcggctgcccacggccaggggccgccgggctgtacaggctgccatgtcccgcccgagcgcccgcccggctgctgacacagagcccgacccgcggccgggcggttccgccccagtcccacactgccccgcgcggcgtcccggccctcttggcccgcctggtcccaccccggagctcagagcaacttccggtgcgcttagcgttacttccggcgcgcggcgggcggaagtccgggttggggtcacctgaccggagagccggctagatatggcgtcctctttgcttgcgggcgagcgattggtgcgtgctttgggccccggcggggagctggagccagagcggctaccccgaaagctgcgggccgagcttgaggccgcgctggggaagaagcacaagggcggtgatagctccagtggcccccaacgcttggtttctttccgtct

SEQ ID NO: 17584 - DNA, 2300 bp, Homo sapien
catgagcgccgtgcccggctaactcccacttctatgacgtttaaaacttggtcaccatctcagcccagagtctcagtgaatgagatgggaactgtgttgtttgtatgcagacttcctatggtccctgaacagtatagaaaccaagtttccatgttttttctaaactctgtatcttcttccactgcagggccctactctgaggggctacctagaccacgtactgaagagcatgtccttacctgacaagtgacgttgcgggtgatccgtttatattcctcattggccagctgtatcttaatcttctccagccgggcaactagttctgggttctgaagcagaaaaatcaaatgagaagaatgatattcccagcttgttagaaagcacatcacaatcattggttccaggggtaaagcactgctaaaggtatcaggagacccacatactagtcgtaactccagtgctttgaaactgttttttttttttttgatctcaattttccaaacagctgatggggaggacaatatctggctcccccagatcccaaagatttcaaaaacaatttttcaagcctaaaagttgatttataagttcagtgtatcatggataagcccaactcagtcaataaccactctcacaaacatatcccttacatacccgtggaggcttcacaacctctgggagatagatttcactgccttctaggagctcatggaggtatagtttggaatctgagaagaaaaggtttcacaaacacaatgatccacgagctgaggttgaagggttaagatcaagaggggtgtagcccttctttctaccaaaataaaacagggccatctctacattaatccatttccaggatcattttcaattgaaaagaattttggataattccatgtaggtatctcccagtgctgcgcaggtgactttagctgtcagctctcaattatcctgccagtgttataactaacaagtaagccatttacttgtgcctttgggttagatcagttctgtggccacaacagctcttccctaaataagtttaggtcatagtgatgctaaatgctcagaggacactaatactaggcaatctctttctaaggtcctttctagttctaataattgagcagtctaccctttgcacttctggctggtctatgttacttctggcaaaataccttatgtgctagtttgtcctgttccttccctttacacataagggaactgaggcccagcgaggagaaatgactccttcaaaggattagtgacagagctaggactggaactcacatgctactctcaggccagatctttcaacacagcttttgccatcctatattaaaaaaacaaacaaacaaaacaaagtatcagatttcaccactcttgcttttgaggtggaaagaaatccggattcctacaagctcactatgctaagctgattcctaaagtggagaaaaagaagagacaaaacctgtgatatttgtatttggtaaaaacctagactttctcaagggtgaattgggcctaggtgtgcctggaagtgaagagggggctctcaaaagagcagaaactgcacaagcaaatttgtcatccacgagaaattcccatgggagttaagaaagtgggtggccctgggatttatggagtgactcttgacttgtctagatgagtgctccgtagaagaaggggaatgatgggaaaagacctcaggagggaatcgatctggacacaaggaggggaccccggactggagactggggctcacccctttctctcagatgctggtgcagatcccggatgagacggaaagaaaccaagcgttgggggccactggagctatcaccgcccttgtgcttcttccccagcgcggcctcaagctcggcccgcagctttcggggtagccgctctggctccagctccccgccggggcccaaagcacgcaccaatcgctcgcccgcaagcaaagaggacgccatatctagccggctctccggtcaggtgaccccaacccggacttccgcccgccgcgcgccggaagtaacgctaagcgcaccggaagttgctctgagctccggggtgggaccaggcgggccaagagggccgggacgccgcgcggggcagtgtgggactggggcggaaccgcccggccgcgggtcgggctctgtgtcagcagccgggcgggcgctcgggcgggacatggcagcctgtacagcccggcggcccctggccgtgggcagccgctggtggtcccggtcgctgactggggcccggtggcaaagccgctctgtgcggcggccggagct

SEQ ID NO: 17585 - DNA, 2300 bp, Homo sapien
gatggtgtgagagcagggacgctcctggggcagacccgcatccccagtacctgccctggattcacctcggaaggcaaagagggaaccgttcttgaggtcggtgaaggcgtcgaagggcttcccactgcacagctcctcctctgctgggggctgaggtctccctggatgaagggtctcaggccttgagtctatcccctcaggcttagaggcgcccacctcaggcgcaggggcctcttcctcaggtttcagaacaggtgtctgctcaggattccctttggactgggcctggaggtcagaggtcagggaggggccccccacctgttcatggacagtggcattgtttttctcctcgccatcgtcatagaccgtgtactcatcctccggcatagtgaacacatccccgcgagtcactgcagagagtggatggtagtgagtctccagcagcagggggcaccccagcccacccacctgggctctgaacacaccttggggcttgcactcagccgtatagtctgtgcagcagctctggtagtaagagcagagctcgtcacactggcacttcttgtccacgttgaagccctcagtgcagcggcccttgcatgactctatgaggaaggagtgtcagtcggtgccaccaagcccagaccaccctcgccctccctacattgacccagatggccaccaacactcccctgtaccttggtcagccagagcaacccatgccagcagggccagtatgagaaggggtctcaggggtgccatggcagggcttctagctcagtgcctggcaagctgggctctggtctccctgaagtctccgctctgatgcctgaggaagggagggagaggcagagacagggaaggagggcactggagaagaggaactgccttttctgctgctctgtttgctcaacctccagcccatcccctctgccccctccagcggctgctgcagcaaaggtcacattcctggaacactgggcctgggcgagctgggagataagacctttgccaagctcagaatcattaggtcatcggaaggggaattagcaccgtggatctggagggcagaaagaaggctcattgggcaacagctttatctctctgagtcttagttcattttcagtaaaataggattaacaaagccttgcttcatggggtgttgggagattacatgaactggaccagacaaaatgcccagtagctggagcagccacaaattccttctccaaacatagctattgatccatgattgtttgatcagacacatccctggctgggtgctcattcgccattatttatttagggcaggaaaaagggagtgggaggagagattgtaagcactctggggaattttattttttagcataaaagaacaaagtttcatttctgggttcttctcttgggtgcatcaatctccccaggctggaaatttgggtaaatatcaacccactggactggatttaatttctgagtcttttctgagcaggccactccctgtccccaggctcagtctccccatctgtaaagagtgggcttgttcaacacacttttagactctcgagagaaatatgatccctctacctggaaaatgcccactggcatgaaacacctgattttgtgcccaatttcaggtgtccacagaacttctgaaatcctcccatcacctgaaaaaagtgatcctgagattttagctgactttttctgttctgtaatcagaggggactgtgatttgggccaatttcttcctcatgggcttcagtggagtcagctgtggaatggaacatcaattcccaccccataggcatgttgtgaggtttcgctaagaaacagccataaaagggccttaagagttatgatgattgttttaaccatttagtagggagggggcatccagcggtgttgctcccacgtaccgatgtcacgtggggcggggaggcggggcggagaacggagagcgtcctctcattctccacccccttcctccaagtccagcgcagggggaggtggctgcgactgactgaggggctagggaaggctggccaggggcgtgggcgtggctggggacggcttgggggtggggctgcgcaggaggctggaggagccccgcgggacccagaggcggggcgtcggcccggggaccactgctcctccggggcgtggctgcaggaggctggaggagccccgcgggacccagaggcggggcgtcggccggggaccgctgctcctccggggcgtggctgctgccgagcatctcccagctcagccgagcccgtgcccaggccacgctttgttccagc

SEQ ID NO: 17586 - DNA, 2300 bp, Homo sapien
taagagcagagctcgtcacactggcacttcttgtccacgttgaagccctcagtgcagcggcccttgcatgactctatgaggaaggagtgtcagtcggtgccaccaagcccagaccaccctcgccctccctacattgacccagatggccaccaacactcccctgtaccttggtcagccagagcaacccatgccagcagggccagtatgagaaggggtctcaggggtgccatggcagggcttctagctcagtgcctggcaagctgggctctggtctccctgaagtctccgctctgatgcctgaggaagggagggagaggcagagacagggaaggagggcactggagaagaggaactgccttttctgctgctctgtttgctcaacctccagcccatcccctctgccccctccagcggctgctgcagcaaaggtcacattcctggaacactgggcctgggcgagctgggagataagacctttgccaagctcagaatcattaggtcatcggaaggggaattagcaccgtggatctggagggcagaaagaaggctcattgggcaacagctttatctctctgagtcttagttcattttcagtaaaataggattaacaaagccttgcttcatggggtgttgggagattacatgaactggaccagacaaaatgcccagtagctggagcagccacaaattccttctccaaacatagctattgatccatgattgtttgatcagacacatccctggctgggtgctcattcgccattatttatttagggcaggaaaaagggagtgggaggagagattgtaagcactctggggaattttattttttagcataaaagaacaaagtttcatttctgggttcttctcttgggtgcatcaatctccccaggctggaaatttgggtaaatatcaacccactggactggatttaatttctgagtcttttctgagcaggccactccctgtccccaggctcagtctccccatctgtaaagagtgggcttgttcaacacacttttagactctcgagagaaatatgatccctctacctggaaaatgcccactggcatgaaacacctgattttgtgcccaatttcaggtgtccacagaacttctgaaatcctcccatcacctgaaaaaagtgatcctgagattttagctgactttttctgttctgtaatcagaggggactgtgatttgggccaatttcttcctcatgggcttcagtggagtcagctgtggaatggaacatcaattcccaccccataggcatgttgtgaggtttcgctaagaaacagccataaaagggccttaagagttatgatgattgttttaaccatttagtagggagggggcatccagcggtgttgctcccacgtaccgatgtcacgtggggcggggaggcggggcggagaacggagagcgtcctctcattctccacccccttcctccaagtccagcgcagggggaggtggctgcgactgactgaggggctagggaaggctggccaggggcgtgggcgtggctggggacggcttgggggtggggctgcgcaggaggctggaggagccccgcgggacccagaggcggggcgtcggcccggggaccactgctcctccggggcgtggctgcaggaggctggaggagccccgcgggacccagaggcggggcgtcggccggggaccgctgctcctccggggcgtggctgctgccgagcatctcccagctcagccgagcccgtgcccaggccacgctttgttccagccgccgcctcctctaccctacggcgtccggagccatccctcgcctgctcgctctctcctttcgcccactccctgcatctgggcctgcatcacctttgccaaccgctcccccgatcctgccgacactcctcccccaaacttctgaccggcacccttgcctggtacccttctctccattcctccccctccatcttctttccccgacccctctcgggtccctcttttcccaaaacccgggtctctccgcgtggccccgcctccaggccggggatgtcccccgcggccccgcgcccatggtcctgacgctgcttctctccgcctacaagctgtgtcgcttcttcgccatgtcgggcccacggcggggcgccgagcggctggcggtgcctgggccagatgggggcggtggcacgggcccatggtgggctgcgggtggcccgggcccgcgaaagtgtcgccgggggcaggcaccgaggtgcaggacgccctggagcgcgcgctgccggagctgcagcaggccttgtccgcgctgaagca

SEQ ID NO: 17587 - DNA, 2300 bp, Homo sapien
atgccatctccatccatagagccagggacggactcctgtcctgtaactccattcctcaccccactagccctgggagcaaatcttagttcactgtgatccactgagcaagtcactaaactttcccaaggctcagtttccttatctgtgaaacagacaggctgacccctaacagagatgtagtgcaggcagtcagagaggtgagggaggcaaaggcacggcgcaaggcacacgggaacgcaggcgcttaactgtccacaccacgcggcgctctcccaaccccggcctggcgcgctcaccggttctcagccaccaggatctgctccagcaggcgcgcggcctgcacacgcgtctccaactccggcgcctgcagcagccgcaacagcaggtcgaggccgccatcgaggcggatggcgtcgcacagaccctgggctacctcgcggcccacggccgcagcagccaggcctcctccaccagttggaagacctcggccaggccggcgcccacggcccgcgcgccgcccgcctgcttcagcgcggacaaggcctgctgcagctccggcagcgcgcgctccagggcgtcctgcacctcggtgcctgcccccggcgacactttcgcgggcccgggccacccgcagcccaccatgggcccgtgccaccgcccccatctggcccaggcaccgccagccgctcggcgccccgccgtgggcccgacatggcgaagaagcgacacagcttgtaggcggagagaagcagcgtcaggaccatgggcgcggggccgcgggggacatccccggcctggaggcggggccacgcggagagacccgggttttgggaaaagagggacccgagaggggtcggggaaagaagatggagggggaggaatggagagaagggtaccaggcaagggtgccggtcagaagtttgggggaggagtgtcggcaggatcgggggagcggttggcaaaggtgatgcaggcccagatgcagggagtgggcgaaaggagagagcgagcaggcgagggatggctccggacgccgtagggtagaggaggcggcggctggaacaaagcgtggcctgggcacgggctcggctgagctgggagatgctcggcagcagccacgccccggaggagcagcggtccccggccgacgccccgcctctgggtcccgcggggctcctccagcctcctgcagccacgccccggaggagcagtggtccccgggccgacgccccgcctctgggtcccgcggggctcctccagcctcctgcgcagccccacccccaagccgtccccagccacgcccacgcccctggccagccttccctagcccctcagtcagtcgcagccacctccccctgcgctggacttggaggaagggggtggagaatgagaggacgctctccgttctccgccccgcctccccgccccacgtgacatcggtacgtgggagcaacaccgctggatgccccctccctactaaatggttaaaacaatcatcataactcttaaggcccttttatggctgtttcttagcgaaacctcacaacatgcctatggggtgggaattgatgttccattccacagctgactccactgaagcccatgaggaagaaattggcccaaatcacagtcccctctgattacagaacagaaaaagtcagctaaaatctcaggatcacttttttcaggtgatgggaggatttcagaagttctgtggacacctgaaattgggcacaaaatcaggtgtttcatgccagtgggcattttccaggtagagggatcatatttctctcgagagtctaaaagtgtgttgaacaagcccactctttacagatggggagactgagcctggggacagggagtggcctgctcagaaaagactcagaaattaaatccagtccagtgggttgatatttacccaaatttccagcctggggagattgatgcacccaagagaagaacccagaaatgaaactttgttcttttatgctaaaaaataaaattccccagagtgcttacaatctctcctcccactccctttttcctgccctaaataaataatggcgaatgagcacccagccagggatgtgtctgatcaaacaatcatggatcaatagctatgtttggagaaggaatttgtggctgctccagctactgggcattttgtctggtccagttcatgtaatctcccaacaccccatgaagcaaggctttgttaatcctattttactgaaaatgaactaagactcagagagataaagctgttgcccaatgagccttctttctgccctccagatcca

SEQ ID NO: 17588 - DNA, 2300 bp, Homo sapien
ttaacttgctgtgtgaccttgagcacctggcttcccctctctaggcctctatctgggcctcatttttatcttctggaaaattcagtaaattggaccacagcagcagttcttaccctagatgtgggatagttttagcaccacaagtttgtggattgtactttttggaaacagagatctactatattgcctaggctggcatcaaactctcaggctccaagcgatcctctctgcctcagcctcccaagtagctgggactacaagcacgcaccacaatcccccagctgggctttgtttttaaaatgttacaggttgaagattctccctacaatatcactctctcttctttgcatttttttgtggaggcttggaggttggtgatagctggtgcacagagatgtggtgcataccccatgacccaccttgtctgtaccccagctgtcatctgggggtgctcaaaggagtgtgtcttacagatgattgtcacccatcatgtatgtccctgcagatcaaaaagagactgctggctgggtgaggtggttcatgcctgtaatcccagcactttgggaggccgaggcaggtggatcacttgaggtcaggagttcaagaccagcctggacaacatggtgaaactctgtccctactaaaaatacaaaaattagctgggcatggtggcaggtgcctgtaatcccagctactcgggaggctgaggcagaagaatcacaggaacctgggaggcagaggttacagtgagctggaatcgcaccactgcactccagcctgggctacaaagtgaggctccatctcaaaaaagaaaaagaaaaaggagactgctatgttaggggggtctctggggcctctttcaacatccagtgttctaggaacttctgattcttctctctgcactccagagctgggtcagggaggacctgctctacaaggcaggtcattttgcttagggaaaagggtcttaaaggaagtagggagtgaggaccccaaggattggatctgggccgcaaccatgatcaccagcctgtcacccctttcccatcgaggccaagtgagtgtagttcaacaaagacatctcgagtcccactctgtgtccttcatcgtgccagatgcaggtttccagtagtgactaagacatgtcctcagcttatactccagtggaagttgcatcgtcaaccagtgacagtggcattcagagtgtggtataagacctcattggaggtgtgggccaggatgtgggggaatcaaagcaggctgcatgaaggaggtgctaatcaatttggattctggtggatgagtaggatttccgtggagtgggaggattcccatgagcagactggaagaactaagggtttggaaacatagtgggccaagacccagaggtgtgaaagccttggaatgtgtgcatgtgcgtgtgtgtgtgaagtgtaagttagtggaaggtgaggtgaactgggagtgatgggcagctgcactgtgccctgcctggcgctatgctgagagctcaactttattccagggccggtggatgctgtagaagggatataaaggagggataggcccctccgcccccaacccatccgagtcaggacctggtcaagaattgagagaacttcaggagggggaatccgcaggaccccatgacttagtggctgaaggtggggccagggcagatggagagactttgggttgtgagaagagacaaggagagggactgggcacgtgtgggagcacctggagagctggtgggacctacagccctctccccactccctccctaggtgttcagcgacatcggcgccatccagagcctgaaacgcctggtttcctactctaccaatggcactaagtcggcgctggccaagcgcgcgctgcgcctgctgggcgaggaggtgccacggcccatcctgccctccgtgcccagctggaaggaggccgaggttcagacgtggctgcagcagatcggtttctccaagtactgcgagagcttccgggtagagtcgcgtgggatacgcctcccccgagtcagagcgggcgccctgtgcacagggactgcgttccctccccgcctcgcaatcccgcggcgccagggtcgcttttgggggcggggagcctgtacgcagccaccgttagggtcactcggctctgatctaggtcccatccgcctcctccacgccatctccagttccttcccttgcatcttgtgctcgaggtccaagggcggagtagcgaagcccttcctgacacccgactcctcccccaggagcagcaggtggatggcgacctgcttctgc

SEQ ID NO: 17589 - DNA, 2300 bp, Homo sapien
gagtttgagaagtggactgtggccaaccacatagggtctcacaggccacatgaaggagtttggactttattctaagaccatgcaaagtcttgaagaattttaagtagggggtgacaggacctaatttgtcagatgtgcattttgcaaatattagctacatgaaagggcaatgtggagagtgaattagagaagacaagcgtggatgaggaaagacctggtgggggcttaaagataatggggattggaagagggtggtagtggggtggaggtagggaaaaatagtggatttgagaaataagtaaggagtacaattggcagggcgcatgatggatcaacctgtacgcaggagtgtgatgtttttcttctgacaccaaattgtttggggtttttcccacactaaccactaattctccagcttgccaacaccaactgggtatcccgcaattcaattcaattctgaaatgtcagtcacgaggcccaggcccccaggctgccacatttctgtttgatttggctacaaattcgggggtgcccatgacaccccgagattcaatttgccagaatgactcacagaactcaggaaagcactttacttactattagttgtttattatgtcaaccttaaataatgagattcagaaaataagactaagtatagagtttctttgagtgcaaagtttgagaatagccacccagtaagcattgactccaaaggcatggggtgagcattccaaactggagaagttaaggtttcacttccacaggcaaagagagaggaattttagcaggattacaacattttccatacaagaccagtgcgtatgttacagtgctttgattggttatagattgctacattccaaggaagatgactttattaccccctgagaaagggtggtgatctaagtggggatctaagggagtcttatctctggtgccatttggtcttcctaagtaattacagaaaaaaaaaaaataggtggaagttgcagctgcatgccccatgactcaggctgcagagaccaattcctgtcaaggctcagaataacttaaagttccaagagctttaggtttgatttaacaaagcttgaataatagtaataaataatattattaatctcaaaatcctgggctcaagtgatcctcctgcctcagcctcccaaagtgttgggattacaggcgtgacccaccatgcccagctgaattatttaatttcacagttataaaggacacagctcaagaatagccaaatggaagagatacataggatctctacgtatggagggtggaggtgtggatgccatgccttctaccaccttcccagcacctacacctgtttatcaacctggaggctcttcaaaaccccttgtttgggggtttttatggaggttccattatgtaggcatgattgattaaatcattggccattggtgattgaactcaatctccagcacctctctggaggctgggaggtggggctgaaagttccaatcctctagtcatgccctggtctccctggtgaccagccctcttcctgaaactatctaggctacccccatagcaccccccgggcccccagtggggaatcatctctttagcatacaaagacactcatcactcaagagattccaagggttttagcagctctgtgccaggaactctgggcaaaggaaaaatatttattttttattacactacaagggttaaggtagacatcaaggtggacatcaggactggtgtcctgccctgggcccagcctcgggccagtgggcctcccagcacctgcctggctacaagggtccctagatgggtacaggggtatcttcctcctttcctttctttctccaggagattgtgactgctttaagctgcggcaagaacattgtgcccatcattgatggcttcgagtggcctgagccccaggtcctgcctgaggacatgcaggctgtgcttactttcaacggtatcaagtgagccccagggccctgggaccaggggggtagggtacaaatcaccatgacaggcagagtgtgggcaaacagctgactagcagctccctctgcccagctgtctgaaccacattggctcctgtgcccacaggtggtcccacgaataccaggaggccaccattgagaagatcatccgcttcctgcagggccgctcctcccgggactcatctgcaggctctgacaccagtttggagggtgctgcacccatgggtccaacctaaccagtccccagttccccagccctgctgtgacttccatttccatcgtcctttctgaaggaacagctcctga

SEQ ID NO: 17590 - DNA, 2300 bp, Homo sapien
ctcagccacccgagtacctgggactacaggtatctgctactacgcctggctaatttttgtgtattttttgtagagacagggttttaccatgttgcccagattggtctcgaactcctgggttcaagcgatccatgcgcctcagcctccaaaagtgctgggattacaggtgtgagccaccactcccagacgtgacagcctgttaatagcaataatagcactttgaatataccagacactgcttttccacaactttttgagacatgttttgttagcaactccattttacagatgaaaaaacagaggctcagggtggtaagtggcatgccgaaggtagtggcagagcctaggtgctccaacccaggcagctgggctcagcccactccgatcctctccagctgcctctctgttacagcgcagaacatcagcagcatcaggagtcatgtgctcttccagctctgccttgagtacccgatgacctcgtttcctcagcggtagatagcgatggttaatattggctagcctgtagagttatcgggagaccaacgcacaaaaagggtttaataccgtgcccagcacatagtaagtggtcaatacatgttaattgttgatattcttgttatctgtggtgtgtctgggccgggagggagggctgcagggcggtgtctacgcacactttacaggtgaggtcatcccgcgggctgggggtgccgggcccctcgctggcccacgcccagccaggtgcacccgcggcgagagtccggtggcctcaggtcacaggcccctccccgccggacatttaaggagggacgccgggcgcaggcgcagacagcgcaagccccacgccacgcgtcgctggtcccaggcagcgagtcgctcgcgcgccccgccgcccgcctggcgacagctccgccgcgcacgcacatggaggggagcgcgagccccccggaaaagccccgcgcccgccctgcggctgccgtgctgtgccggggcccggtagagccgctggtcttcctggccaactttgccttggtcctgcagggcccgctcaccacgcagtatctgtggcaccgcttcagcgccgacctcggctacaatggcacccgccaaagggggggctgcagcaaccgcagcgcggaccccaccatgcaggtagcggggcggcgaggagcctggcaggtggagggccctggtctggagcgtgggggcagcggaggggcggggcctgcgtaatggtagtggcgggtaactggagggagggtgcattttggatggtgggcgggaccagagcaaaggggcctgaccgagaacctcagcgggtgggatgcgaaaagctgagctaaagtctggccttgcaggttaacaaaaggggggggaaaggaaagggaatggggccttggtccatgtccttccccctctccactggcagattttgaaagctgtgctaagattctctgaggtttagggctccaaaggaagtcctcatccctgtagctcccgggatggcgaggatttggggattgtggaacccagagtgaggaaccgcaccctggtcattgtgcccctacaggaagtggagacccttacctcccactggaccctctacatgaacgtgggcggcttcctggtggggctcttctcgtccaccctgctgggagcttggagcgacagtgtgggccgccgcccgctgctagtgctggcctcgctgggcctgctgctccaggccctagtgtccgtttttgtggtgcagctgcagctccacgtcggctacttcgtgctgggtcgcatcctttgtgccctcctcggcgacttcggtggccttctggctgctagctttgcgtccgtggcagatgtcagctccagtcgcagccgcaccttccggatggccctgctggaagccagcatcggggtggctgggatgctggcaagcctcctcgggggccactggctccgggcccagggttatgccaaccccttctggctggccttggccttgctgatagccatgactctctatgcagctttctgctttggtgagaccttaaaggagccaaagtccacccggctcttcacgttccgtcaccaccgatccattgtccagctctatgtggctcccgccccagagaagtccaggaaacatttagccctctactcactggccatcttcgtggtgatcactgtgcactttggggcccaggacatcttaaccctttatgaactaagcacacccctctgctgggactccaaactaatcggctatggttctgcagctcagcatctcccctacctcaccagcctgctgg

SEQ ID NO: 17591 - DNA, 2300 bp, Homo sapien
tagggctctcataaggacttggctctcactgagcgaaatggaaagcccaggatggttttgagcaggccagtgacctgattgcagctgttttcaaggagttagaaaagacctctaccctagtgggtactgcaggctctggctctgggatgagccacaccctgtcccattcctgatgagggaccttggcctctcctagccttagttctttatctaagaaataattccaaggatttagccaagtacccctccctcactgcagctgacctaactgggccaagcttttgtgtaagtggtagggaggagttggaaggggagggaggagagtggagccaatccagaggcttgaatgtttaatgtggaatttcctctctctaggggaccacaggtgggggcagcttgcagggggaggttattcagttcactagtatctagccagcacctacccatcctgagtctcggactcctggctcaggggaggtggggtagctaacaagctccaacaggcccaggcacagtcacagtggccagaattggagccatccatcctcccaagaatcaggcctgtcaggacctgcctccagaaacccactcagctgctctgttctcagggaaggtggcctttcctgattctgctccccctacctccagcccctgaattagcacccttggagttcaaaactattttccacggttggaattttgtatcaattagtaggattctttgactatttttcctctcccaccattctagaaactaacgggcctggtgagggctttgtctatttcctttcctgttgtggtcccggagtcccccagcacagtgcctggcacgtaaggggcactcagtaaatgagctgaatgaatgaaagataggggagtaaggaaggtaatgctgttcctttttacaggcaataaaacagaggcccagacagggtctgacctcctcagcagcagagcaggtgactgccttctggcctaattcctataatgggagccacccaggagcataggttcacacccaaggacctcccaggccctcccccatcttctctaagggaactgcagagccaggccctgcctgaccccagaaacaagactagtttcccaggaaaagatcctagggcaggagtggagcaagtgacagcttgttttttattttatttttattttatattttttgagacagggtcttgctctgtcacccaggctggagtgcagtggtgcgatctcagcccactgcaacctctgcctcctgggctcaattgatcctcccacctcagccacccgagtacctgggactacaggtatctgctactacgcctggctaatttttgtgtattttttgtagagacagggttttaccatgttgcccagattggtctcgaactcctgggttcaagcgatccatgcgcctcagcctccaaaagtgctgggattacaggtgtgagccaccactcccagacgtgacagcctgttaatagcaataatagcactttgaatataccagacactgcttttccacaactttttgagacatgttttgttagcaactccattttacagatgaaaaaacagaggctcagggtggtaagtggcatgccgaaggtagtggcagagcctaggtgctccaacccaggcagctgggctcagcccactccgatcctctccagctgcctctctgttacagcgcagaacatcagcagcatcaggagtcatgtgctcttccagctctgccttgagtacccgatgacctcgtttcctcagcggtagatagcgatggttaatattggctagcctgtagagttatcgggagaccaacgcacaaaaagggtttaataccgtgcccagcacatagtaagtggtcaatacatgttaattgttgatattcttgttatctgtggtgtgtctgggccgggagggagggctgcagggcggtgtctacgcacactttacaggtgaggtcatcccgcgggctgggggtgccgggcccctcgctggcccacgcccagccaggtgcacccgcggcgagagtccggtggcctcaggtcacaggcccctccccgccggacatttaaggagggacgccgggcgcaggcgcagacagcgcaagccccacgccacgcgtcgctggtcccaggcagcgagtcgctcgcgcgccccgccgcccgcctggcgacagctccgccgcgcacgcacatggaggggagcgcgagccccccggaaaagccccgcgcccgccctgcggctgccgtgctgtgccggggcccggtagagccgctggtcttcctggccaactttgc

SEQ ID NO: 17592 - DNA, 2300 bp, Homo sapien
gcatgagccaattcccataacacatctctttatacatgtatacatttgtataaatagacgtgtgtgtgtgtgtgtgtgtgtgtttatagtctgtttctctggagaacgctgacaatacagcttctcaggagtaatcataaaggaggtctggtacctaatgctgagcactgttggtgtagacagtcgtagcagtggggtctgtgctagagaagccttgtggtctggtttgagtattgttaatggtagcagaggctctaagcctgaactctggctgtcccagggatttttcaaaagacttaatcaattattttctgctaaaactagttacagtaaagtatgttatttgctattaggaatgctaactgggccaggcatggtggctcacgcctgtaatcctaacactttgggaggccgaggctggcggattacgaggtcaggagttcaagaccagcctggccaacatgaggaaaccccttctctactaaaaatacacaaattagccagacgtggtggtaggtgcctgtaatctcagctactcgggaggctgaggcaggagaatcactcgaacctaggagacagaggttgcagtgagccaagatcatgccattgcactccaccctgggcaacaagagcaagactccatctgaaaaacaaaaaaaaaaaacaaaaaaaagaatgctaactgatacacactgagagttttgattgttgttgttgtttttaattacaaaaatagaatcacggtcagagtcagtggcttacgccgtaatcccagcattttgagaggccggggcaggaagattacttgaggtcagggatttgagacaagcctgagaaacatagcaagatctcctgtctcctcaaaaaaaaaaaaaaaaatgttggctaggcatggtggctcacgcctgtaattccagcactttgggaggccaagatgggcaatcatgaggtcaggagattgagaccatcctggctaacacggtgaaaccccgtctctactaaaaatacaaaaattagccgggcatggtggcacgtgcctgtagtcctagttactcaggaggctggggcaggagaatcacttgaactcaggaagtagaggttgcaatgagccaagattgcaccactgtactccagcctgggcaacaaagcaagactctgtctcaaaaataaataataaataaatactgaaaaaattagccaggcatggtggtgtgcacctgtaatcccaactacttgggagggtgaggcaggaggattgcttgagctcaggagttcaaggctgccatgagccatgatcatgccactgcattccagcctgggtgagagaggaagaccttgtctcaaaaaaaaaaaaaaaaaaaagcaatcattttgctgcattcatttaagagtgtactgatgtactgtgaagattcctccatgtaccttcatataggccgttctttttaatggctgcataatatttcattgtacagatacttcataatttatatatgtaatccttaactattaaaaataaagttttaatgaatattcttgtacaaaaaaagtttggacatttgaataagtctgcaggatagatttcctagaaggaagattcctgagtcaaaggaatttgcatttaaaattgggataaatctctccctccccctccccctcccccgctccctctccccatggtctccctctccctctccctctccccaccgtctccctctgatgccgagcggaagctggactgtactgctgccatctcggctcactgcaacctccctgcctgattctcctgcctcagcctgccgagtgcctgcgattgcaggcgtgcgccgccacgcctgactgcttttcgtatttttttggtggagacggggtttcgctgtgttggccgggctggtctccagctcctaaccgcgagtgatccgccagcctcggcctcctgaggtgccgggattgcagatggagtctcgttcactcagtgctcaatggtgcccaggctggagtgcagtggcgtgatctcggctcgctacaacctccacctcccagccgcctgccttggcctcccaaagtgccgagattgtagcctctgcccggccgccaccccgtctgggaagtgaggagcgtctctgcctggccgcccatcttctgggatgtgaggagcccctctgcctgtctgcccagtctggaaagtgaggagcgtctttgcccgcccgccatcccatctaggaagtgaggagcgcctcttcccggccgccatctcatctaggaagtgaggagcgtctctgcccggccgcccatcgtct

SEQ ID NO: 17593 - DNA, 2300 bp, Homo sapien
tgtgtgactctagacgagtaacctcactgccctgagcctacatcacagaattggtatggagagttaggtaaactgggatgcagattttacacatggtgaagctgggcctggtttttttttttttttttttttttgtggctccttaaaagcctcaggccatgggagaggcttccaccaaggtgagatagaatcggggcattgtcctgagtgtctgaaaccctttgtctctccctgtccttcctggctcttgcttactttgccctgggcaggtggcaggccactgtgtgggagtgaaggagccatgcctgaaggggggctggggtggctagcctgtactctgttactgtagcatcccaccagcctggcctcgctccaggagccctcgaactggatccctctgacctctaggaccgccctgcagaaagcaccaggggcctttctctaaaagatccactggctccaggagtgtctcggtggcataacagcccaggccatgctatggtacacctaaaactatagttatcagctcttaatcctgtcccccgcaaatccacattccaaccacgcagaaccttctgttctctaaacgtccccacgcttctgcatctcttcccagactgtcttcgctgcctgaaacattctccctgataccccgcctccttatcctagcacacacggatcatcatactctgataacctcagaaacatgcattgaccttcaactgcgtgcagtcagggtgaggaggggtgagggcgccaggagactgagggtctggccagagataagacccacaatttcttccaaactacaacttgctccgttcaacatacatacacacacacacgcatgcacttgccaccctccaggccttcgttcactcttccctctccttgtgccccttcccctatcacctcgtgccaagtaagactgagctctcaagccttcgctcagatgccatctcttccaggagcccttgcctggtgcctttcacccagagcttctgccctggtttggacctccctcaggatacccataatgcatgtgtgaattctggctggctccatgtcctttggcctcagttcccccatctgttaaatggaatagtaacacctaacccatggtgtagttaccgagttgatgaagtacagtaactgacttgtactaagtgctgagcaaatgtcagtctttaccaccagcagcagcagcagcattttaatctctgtatctttagcactgagcacagggctgaatacataattggtactaaatacttgcttggtggagggatggatggatggatggttggatggatggatggatggatggatggatgatggataaatgagagatctagtatgtttccaaaataagagacaatctttgctggggggcgagggggctaggaagagcctgaaagaaactaaccttcatcgtacacctgccatgcatcaaagctcaacatatataagttgtctaatttgagcctcacaatagcaagatattactgcagaataaggaagtggctaattctgagaggttaagtcggtggatcagtgtcacacaagatgtagtcaggaccagggactttgatggtcctcgatacctggaaggaggaggaggaggacttgctccaggccttagctactgtcaatcttagactgaaaattcctagggcatctctgtgggcagggcagggccaccccacccaggctgtcacataaagtgctcagctgagaacctagctttggagaacagcagaaaggaaaggccgggccagcggaggtggcttgggggctgcctgtggagggtggctgggggactctccttccttctccagctcctccagcaccaccctcagcagcctccaagaacagaaggagttaacgctgggattaacttcttgaaggaacctgaagttttttaatccttgttctttcctccttccttctccctctcccttcctgatctttactccgcctgtgggtccctcctccttactctcacctccccaactccaaaaacactctgattgccagactgggtcaatggttaacactcaactggctttatataagcctgccacctgcctgcttggctgcatctttggtccttctgttacccagctcctggaggcagtggctgtagcagcccttgctgctccacaccatggccacctgctggcaggccctgtgggcctatcgctcctacctgatcgtgttcttcgtgcccattctcctgctgcctctgcccatcctcgtccccagtaaggtaaggacttggtgttctgagcacagataac

SEQ ID NO: 17594 - DNA, 2300 bp, Homo sapien
caaccccagcctgggtaccacggggccaatgaggccacctctccctcccagagctccggaaagagcatggcctgggcacagcacagctgccctgctctggcttgagggggtcttgggtagaaggagtgagtgtacacctcatgcttttcttgatgcctggcctcccagcctagcctaccccaactttgacacccacccaatgaagaaaccataagcagagtgcagagtctgcagtcggacagaccagagttcttgcccctgggcgacttgggcaagtcacataaccccgctgagcctcagcatcctcatctggaaggtggagtcaataatgctccttcctctcattgttctaatagatcaatgagaaaaccatccaaattgttcacacagtggccagcccagagcagaccctcagcaaactgtagcatttatcagaggccacttgggcaaagagaagtacatttaagaggaattgctcttgcaggtggtaaaggaaggcaaaaagctgaggatagtaagagtgagaggccgggcacagtggctaggctgtaatcccagcactttgggaggccaaagcaggcagatcatctgaggtcaggagttggagaccagcctggccaaaatagtgaaatcccttctctactaaaaatacaaaaattagccaggcatggtggcatgtgcctgtagtcccagctactcttgaggctgaggcaggaaaatcacttgaactcaggaggtggaggttgaagtgagccgagagcatgccaccgcactccagcctaggcaacagagggagactccgtctccaaaaaaacaaataaataaaaataaaaacaaaaatacaaaaaatagccaggtgtggtggtacaagcctgtagtcccagctactcttgaggctgaggcaggagagttgcttgaacccgggaggcagaggttgcagtaagccaagatgatgccactgcactccagcctgggtgacagagagagactccatctcaaaaaaaaaaaaaaagtgagaaccacactcacaataatattcataatgagaactggcatttatggggcacggactgtgcaccaggcactgtgctgaatgctttctgcgcatgattttgtttgacactcacaacatctgtgtgaggtggggcctgtcactctcccagttagatgatgacgctgaagttcagagagctttgctggcactgcttgagaggaagggccaaccccggctttgaggcctgagtcctcttaaccaccccactgtgttagggacagggttcccctatgattgcagaaggtctgagcagaaaaagccctccgatatcatgtacccaaggctctaggtcttcatggggaaactgaagatcagaaaggggcagtggcctgcacaaagtcacaggttagagtttggaggacacaggtggaacagcacttgccaggcgctgcagtgtgggtggtgacatcgtcagggcccgctgggctcacagggcctccaggcaaccgggggcctttgggtccccagttacacactgtggtcacatcagccaggctgacctgagggtcactgcaggaccagcctctgctgagggctggctcacctgcatggagggggttgctcccaccccaagcatgagtctgacccacgcaccagctcactctcccctcaggaccaccgacttgcccagtcactgaatggagaccacctgctgtggtcaccttgccaggcccttctctgtagacacaggagaccgatcttgaggagccagaggcagagcccagctgggagccggggtttcactggtcagtcggtcagtctctgcagctgcagcctgagatcagccaagcccctcctgaggctcctacctggctcactttgccctttctccacaggggtctgatctctctgctctgcttttccaaactatttctctttctctctctcgctctctggttctctctctctctctctctctctctctctctctctctctcatcagatggctgactggaggcagggtcccagcccaaggatggggttggggtggaggtggcgaacctgggttggtccccactggatgctggtcctcactctcatggcagacggctttctttgaggccaggactgggtgatggtgtcgctacccccgccgcagtctgacgtcacgctgccgggccccaccagactggagggcgagcgccaaggggacctcatgcaggcaccgggcctcccaggctcccctgccccacagagtgtaagtacccggcatctgggcctgggtttaggccaaggcctgcggctg

SEQ ID NO: 17595 - DNA, 2300 bp, Homo sapien
acatagcacacttgtgcactgagaggagggagcattatgggaaagtccctgccttccacacctctctctagtccctgtgggacagccctagcccctgctgtcatgaaggggccaggcattggtcacctgtgggaccttctccctcactcccctccctcctagttggctttgtctgtcaggtgcagtctggcgggagtccaggaggcagcagctcaggacatggtgctgtgtgtgtgtgtgtgtgtgtgtgtgtgtgtgtgtgtcagaggttccagaaagttccagatttggaatcaaacagtcctgaattcaaatccttgtttttgcacttattgtctggagagctttggataaggtattgaatctctctgagcctcagtttttcatttgttcaaatggcactgatgatgtctcccttacaagatggttgtgaggagtaaatgtgatcagcatgtaaagtgtctggcgtgtagtaggctcttaataaacactggctgaatatgaattggaatgatacaaagtctgagctctactctttctgcattcacgcgtaagtaacagtttcctggtgtttgtcctcctgtgcccacaggtccactttgcttccacgtggccatgtgcccttcctagctggattgcccaaggctgttagcatctgctttttacctgagatactaattcatcaggtcaaaaaaaaaaaaaaaaaaaaaaaaaaagtcttgagcaccagctgcagggagccttctgctaggtacaggggtcctacagagaacaaagtaggcaggaccagtgctttcacagagctgagctttcagggggaagagtcagcggacaaataaaaataatttcacataatgcattagaaagacaaaaacaggctggtcagatggtgactgagggggaaggacttcagactgggtgtgagggaggccctttgagcagatgacatttgagctgtgactaggagaaaagaggccatctggggaagaccatccaagcagagaccctgagcctggaactcacgggcagaaaggctggaacacaatgagtaagcggagaggtagtcaggaccccactagtaccagtacaagaaagtgttagaaaaacagaatgaagcccagggcaggataccccgactcccatcccccgcgcccgtcgcatttcgggagggttgggccgggcggcgggcgggatcagcgcagggcccaccccaggggcggggccggggcggggcagtacctggggccccggccgggggcggggctgcggatgctcccacttcccccggctccagccggcgcaggcagcggcggcagcagcaggcgagcctcggccccgcaaggccatgaaggtgaagaagggcggcggtggggccgggacggcgacggagtccgctccggggccctcgggccagagcgtggcccccataccacagccgcctgcggaatccgaatctgggtccgagtcggagccggacgcaggcccagggcccaggccggggccgctgcagaggaagcagccgatcgggccggaggacgtgctggggctgcagcggatcaccggtggtgagcacccgcgagggagcgccgcccgcgggtgggaaggggagagggtgcgaggggccctcccggcgcgccaagccctggcccccgccccctttcccgcctcccctcccccaccgagtcccctctcctgtgtcccctgctctcccttctgccgccaggtctgagatctctgtgtacccccttcccttgatctctctctgtgcctccttcttctccctttcgagatttattccttccttttccaggggcccgtccccttttcccagcgtggaggtacgtgcggcagcagctgcaaccatagccctgtagctgtggagtctccagagcgctttgaggcccgtccctgcactaatgaagagaggggctgagtgcagcctgtcctcagcccccacgctggaggctaggtggaggctgagttacttgggaggcattcagactcttcatgtctccccaaccattaataccctcaccctgatcctccaggaagacttgggccattttcttccccgggaaagaaactgagcaggcagctttagtgtgttggctgtggttcctctcatggggagtggcataatgtccctccaagcctggactagcacctgtcctcttctgggggctctgtcatcaagggaggcttggtctccactgtggttaagagtttctgagctggactgcctgggttggagttccaactctgccatataattgtctgtgtgaccttgggcaagtaacctc

SEQ ID NO: 17596 - DNA, 2300 bp, Homo sapien
catctttagtgtcccagccttcctctagacggcagtaccagcccccaagcaggagtgcagatgagagtgcgaggtttcaagctgaccctaggaaaataaaccatatccctgtagaaagacttccatagatcctggatgaactccaggcatcttccttggtagatggaaggcacagtaaggcccagcaccctttccaccaatgcctaggacttactggtataccctcttgtcccttctccttcctaggtgtacaaggctgtagctgccgtccagaagtcggcagaagagttggcgtctgggcacctggcatctgcctttgtcgccagccaggaagctgtgacatcctctgagcttgccttctttgacccgtcactcctccacctcctttatttccctgatgaccagaagtttgccatctacatcccactcttcctgcctatggctgtgcccatcctcctgtccctggtcaagatcttcctggagacccgcaagtcctggagaaagcctgagaagacagactgagcagggcagcacctccataggaagccttcctttctggccaaggtgggcggtgttagattgtgaggcacgtacatggggcctgccggaatgacttaaatatttgtctccagtctccactgttggctctccagcaaccaaagtacaacactccaagatgggttcatcttttcttcctttcccattcacctggctcaatcctcctccaccaccaggggcctcaaaaggcacatcatccgggtctccttatcttgtttgataaggctgctgcctgtctccctctgtggcaaggactgtttgttcttttgccccatttctcaacatagcacacttgtgcactgagaggagggagcattatgggaaagtccctgccttccacacctctctctagtccctgtgggacagccctagcccctgctgtcatgaaggggccaggcattggtcacctgtgggaccttctccctcactcccctccctcctagttggctttgtctgtcaggtgcagtctggcgggagtccaggaggcagcagctcaggacatggtgctgtgtgtgtgtgtgtgtgtgtgtgtgtgtgtgtgtgtcagaggttccagaaagttccagatttggaatcaaacagtcctgaattcaaatccttgtttttgcacttattgtctggagagctttggataaggtattgaatctctctgagcctcagtttttcatttgttcaaatggcactgatgatgtctcccttacaagatggttgtgaggagtaaatgtgatcagcatgtaaagtgtctggcgtgtagtaggctcttaataaacactggctgaatatgaattggaatgatacaaagtctgagctctactctttctgcattcacgcgtaagtaacagtttcctggtgtttgtcctcctgtgcccacaggtccactttgcttccacgtggccatgtgcccttcctagctggattgcccaaggctgttagcatctgctttttacctgagatactaattcatcaggtcaaaaaaaaaaaaaaaaaaaaaaaaaaagtcttgagcaccagctgcagggagccttctgctaggtacaggggtcctacagagaacaaagtaggcaggaccagtgctttcacagagctgagctttcagggggaagagtcagcggacaaataaaaataatttcacataatgcattagaaagacaaaaacaggctggtcagatggtgactgagggggaaggacttcagactgggtgtgagggaggccctttgagcagatgacatttgagctgtgactaggagaaaagaggccatctggggaagaccatccaagcagagaccctgagcctggaactcacgggcagaaaggctggaacacaatgagtaagcggagaggtagtcaggaccccactagtaccagtacaagaaagtgttagaaaaacagaatgaagcccagggcaggataccccgactcccatcccccgcgcccgtcgcatttcgggagggttgggccgggcggcgggcgggatcagcgcagggcccaccccaggggcggggccggggcggggcagtacctggggccccggccgggggcggggctgcggatgctcccacttcccccggctccagccggcgcaggcagcggcggcagcagcaggcgagcctcggccccgcaaggccatgaaggtgaagaagggcggcggtggggccgggacggcgacggagtccgctccggggccctcgggccagagcgtggcccccataccacagccgcctgcggaatccgaatctgggtc

SEQ ID NO: 17597 - DNA, 2300 bp, Homo sapien
gctgggattacaggtgtgagtgatggagcccagcagagccattcttaaggaatttagtttttagaaaaatgcttcctgaaatttgttattgtagtaacaataaagatgtgaagggccaggtgcggcggctcacgcctgtaatcccagcactttgggaggctgaggcaggcggatcacgaggttaggagatcaagaccatcctggccaacatggtgaaaccccatctctacaaagataaaaattagctgggcatggtggcgcgtacctttagtcccagctactcgggaggctgaggcaggagaattgcttgaacccgggaggtggagtttgcagtgagccaagattgtgccactgcactccagcctggcaacagagtgagactccatctcaaaaaaaaaagatgtgaagaatgtagctttctgtatcacgctgtctccttgtagggaaaacacgtgggagaaatttttatcaggtcttcctagtgggagtaattgcttctgaataactggcttgatttgatcttgtagacactgaattatgctgttctttgtttctctctttgtgtagactgttaggaaacctggtaaaatacgtgatttttaaagcacgtatttagtttattcagtttacccttggctttgctattttcttctgcaattattttctctcagccctgattttgtctcttatatgttgccttgtcctgattgtgtcttttttaaggcacctcaaatcttttttgggagaaagtagaatataaatctaaacaaagtaaccactccctgtttgctctacagattctttactatgcaatgttgggggtgaatccccgctttgactcagcttcctccagctactatttggacatgcacagcctcccccatgtcatcaacccagtggagtcccggctgggtgagcacctaaggatgagggtctttcttttctgccaggctagggagggaccctgacggctcagctgggtaggggacaggagttggaggtggattatatacagtgatggttcccaggttgggttggtccgaggagactgtggagattgaggctcctttttttctttttttgagacaaggccttgctctgttgcccagtctaaagtgcagtggcacagtcatagctcactgcagcctccaactcctggactcaagtggtcttcccacctcagcctctcgagtagctagaactataggtatgtgccactacacttggctaattttcaaaattttttttagagacaggatctcattatgttgcccatgctggtcttgaactcccctcaagtgatcttcccaccccagccccctaaaatgctgggattataggcgtgagccactatgcctgagccctaggttcctttttcatgatgctctgttgatatctccatcttcacacctatcatatccaaaagcatttattaaacgtgattcctagcactttttacaaatgaatgactaggctgggtctatctccctaaaagccatctaggagagaggctgtcacacacataggaaagacaacagcaaaagtacttgagggcagaatttgaattgacagttctgctgattgaggttgaataaccttgaagctagtattagagtttttcatttttcgggtggaaactaggaagaggaggtgtgactaagaactgtaacacaggcaaaccaaagtgagtatatctaattgtggaatctcagataccagaggcaggctagtgtggcccaaggattgtgagggggtggcatgtgaggccttagaaaattcctccgttcatttattcattcagcaaacattgactgagggactaccttatgacagtgctgagtagagaaaagaagggcatttcaggcaaagggaactgtgagcttagatgcagacaagtgagagagcttaggcattcaggaagctcagagtagtttagtgtggctgaaatgtgagtgagtgaccaaagatgaagccggttaggcaggcaggagccaggtcataaaggaccatgttaaggagtttgaactttaacctgatatgggtggctagtgattgagggatattaagcagggaactgacataaggtcagatttctggtttgcataaaactatctgtagtaatatgggtacattgtgggagtggccaagaaagctgtcgtagacagtcaaggggcctttgaggagggagaattcgggggtgttttggagctaaggactatgtttccatcggtatggcacatctcgggagaacattctgaagccctttactagagacaccctggacaggaggatatcctaat

SEQ ID NO: 17598 - DNA, 2300 bp, Homo sapien
caccaccatgcctagctaatttttgtatttttagtagagacggggtttcaccatgttgaccaggctggtcttgaaatcccaacctcaaatgatctgcctgcctcggcctcccaaagtgctgggattacagcgtgagccaccacacccggccgatatttgtattttcagtagagatggggtttctccatgatggccaggctggtcttgaagtgctggcctcaagtgatccgtctgcctcagtctcccaaagtgctgggattacagacatgagccacagcgcccggcagctttttcttactcagtgttcctcatcccagttttgtcctccttttggttccatgatggaaagcagccccattccagaggagaaacaagttcagctcagctgggagtacaggctgcccctcttctttgatccacaagagcctctgacttccctgactcctgtttctgtaggctatgagatcaccttcagtttactcaacccagaccccaagtcccatgatgtctactgggacattgagggggctgtccggcgctatgtgcaacctttcctgaatgccctcggtgccgctggcaacttctctgtggactctcaggtgagaccgggagcaagttgaggagtccttttcaatgtctatacatatttacaagtgcagtctgttcctccatctcttagagcttgctgatttgctaggaatttcctgtgtgtatatgtatgtgagtgtcataagggtgggtactgggggtgcgtgtgtgcccttgtctgtgtccatccatccattgagggcagattctggtgtctttacttccttggcatcctattgagagagtttgtcagtgcttgttaacaaaccaccttcctatagctccctctagacctgtactcaccaattgtgcttagatgttaatgccatgacccatctttttttttttttttttttttttgagacagagtcttgttctattaccaggctggagtgcagtggtgtgatcccagctcactgcaacctccgcctcccaggttcaagcgattctcctgactcagcctcctgagtagctgggattacaggtgcgtgccaccatgcccagctgatttttgtattttagtagagacgggttttcaccacattggccaggatggtcttgatctttgcccagctgatttttgtattttagtagagatggggtttcaccacgttggccaggatggtctcgatcttttgacctcgtgatccacctgccttggcctcccaaagtgctgggattacaggtgtgagtgatggagcccagcagagccattcttaaggaatttagtttttagaaaaatgcttcctgaaatttgttattgtagtaacaataaagatgtgaagggccaggtgcggcggctcacgcctgtaatcccagcactttgggaggctgaggcaggcggatcacgaggttaggagatcaagaccatcctggccaacatggtgaaaccccatctctacaaagataaaaattagctgggcatggtggcgcgtacctttagtcccagctactcgggaggctgaggcaggagaattgcttgaacccgggaggtggagtttgcagtgagccaagattgtgccactgcactccagcctggcaacagagtgagactccatctcaaaaaaaaaagatgtgaagaatgtagctttctgtatcacgctgtctccttgtagggaaaacacgtgggagaaatttttatcaggtcttcctagtgggagtaattgcttctgaataactggcttgatttgatcttgtagacactgaattatgctgttctttgtttctctctttgtgtagactgttaggaaacctggtaaaatacgtgatttttaaagcacgtatttagtttattcagtttacccttggctttgctattttcttctgcaattattttctctcagccctgattttgtctcttatatgttgccttgtcctgattgtgtcttttttaaggcacctcaaatcttttttgggagaaagtagaatataaatctaaacaaagtaaccactccctgtttgctctacagattctttactatgcaatgttgggggtgaatccccgctttgactcagcttcctccagctactatttggacatgcacagcctcccccatgtcatcaacccagtggagtcccggctgggtgagcacctaaggatgagggtctttcttttctgccaggctagggagggaccctgacggctcagctgggtaggggacaggagttggaggtggattatatacagtgatggttcccaggttgggttggtc

SEQ ID NO: 17599 - DNA, 2300 bp, Homo sapien
tcaagttatggaggaagggcacatgcagtcaccatccccagctcaggctcttgctctcttgatgtccaagtctggagtggggcaatgaggaagactgcaagtcttctagggactgccacatcagtggcactgggctgcagctacagaagtatggagtgaggccaaactggcaactcctgaaggcagatttgtgcaaggctcaaagcagggaggcagcaagacaggctgggataagagtgggtgggagtctctcccatctcgcagtgttaagcccagctgggacctggtaccttccactagggtgagccacaccagtaagggcaagcgagcacctggactcccgcccaaagaggaaaaccaaggctctgcgggctgccagggctgagcagggcatctaggaggttgccaagggctatggcccattttcatttggggtagaagtgggcacaaagggagccaattggagggtctgggtaaggacagctctggtgaggcctgatgctgaactttaaccactgggctgggttgtgaggtaggctgagaacctgggtctaagcagataaaaagaagagataacaagctgcgtgtgttctgtgtcaactggggaggctacaaatgctccaccctgtgtggcctgactttataataacaaaaatagcttgcacatagcaccaaccctgttctaatcactttatatgtactgacacatttcatacaactctataaagtaggtactattactatcatccctattttaatagagaaaacaggcacagataggcacagaacgatcttctcacgatcactcacctaataagtgatgaagccaggatttgaaccgcagtgatcagcatctagagtctgggctcatgacttttcaagatttttaagtgaagtattctgagttttccaagttggaaatgaattaaaacgtattttaaaatagcgagagagccaattgtgctaaaacatactagcttgctacctccgtgtttgaggctttgaggagagggcaccctaagaggagttctacgataaggataataagaccgtgacagttgacgttgagggctttccgtgtgccaggctccttacaagaacggcctcatttatgtaaatatctccattttcagatgagcctcggagctgcctgtagttgcccagctagtatttaaggactgcagaggttgcgctcttgattgcggggctagaagtgtgttctacagggaagcggggaacttcgttccagcagcgccgaaacccgcacggcccctaggctgtccctccgcgcccgggtgacttcctttcagatccccagcgaagctcccagcggagccctcccacccctcgcccgcttgctcccgtctgcgggtctggagtagcgctcgcgattggccccgatcaccgccgcggtcctgccccctcgttgcagagattccgattgggtgaggctcacgaagctctgcccccacggtggccggagcagccggaagctagcatggcggccgccggggctgcggctacacacctaggtgcggtgggcttcgggtggggggcctgcagctagctgatggcaagggaggaatagcaggggtggggattgtggtgtgcgagaggtcccgcggacggggggctcgggggtctcttcagacgagattcccttcaggcttgggccgggtcccttcgcacggagatcccaatgaacgcgggcccctggaggccggtggttggggcttctccgcgtcggggatggggccggtaccctagcccgtttccagcgcctcagtcggttccccatgccctcagaggtggcccggggcaagcgcgccgccctcttcttcgctgcggtggccatcgtgctggggctaccgctctggtggaagaccacggagacctaccgggcctcgttgccttactcccagatcagtggcctgaatgcccttcaggtgagactgctgtgcgggagggtcgggggacagcccccccggcaaggtggagactcagtgacggccctgatgctccttcctgtagctccgcctcatggtgcctgtcactgtcgtgtttacgcgggagtcagtgcccctggacgaccaggagaagctgcccttcaccgttgtgcatgaaagagagattcctctgaaatgtgagttactggggatcagggctgcttttcgcctctgagctcagttcagagctgagttgggtgggaggagcgggggtgtaccataaacgcagttaaaaacttactgttgaaagacctctgaatgaacagtgtgtttggtcagaaaaaaactactttc

SEQ ID NO: 17600 - DNA, 2300 bp, Homo sapien
caggtgaatgggcttgcagcccagggcaagtatgaaggcagtggagaagatggtggagcagcagcacagtcactctacattgccaaccatgcctactgagtatccactccataccacagcccttggcccagccatctgcacccacttttgcttgtagtcatggccagggccaaatagctatgcagagcagagatgccttcacctggcaccaacttgtcttcctttctctcttcccttcccctctctcattgctgcacctgggaccataggatgggaggatagggagcccctcatgactgagggcagaagaaattgctagaagtcagaacaggatggctgggtctccccctacctcttccagctcccacaattttcccatgatgaggtagcttctccctgggctctccttcttgcctgccctgtctcctgggatcagagggtagtacagaagccctgactcatgccttgagtacataccatacagcaaataaatggtagcaaaacattctactttgcctgtctgttttacacatcaaattcccacctcccagtttctgatctctgctaattctatctctgggccctctgactctggaggtggagagggtgggatttgagtcttactgggcttcaagttatggaggaagggcacatgcagtcaccatccccagctcaggctcttgctctcttgatgtccaagtctggagtggggcaatgaggaagactgcaagtcttctagggactgccacatcagtggcactgggctgcagctacagaagtatggagtgaggccaaactggcaactcctgaaggcagatttgtgcaaggctcaaagcagggaggcagcaagacaggctgggataagagtgggtgggagtctctcccatctcgcagtgttaagcccagctgggacctggtaccttccactagggtgagccacaccagtaagggcaagcgagcacctggactcccgcccaaagaggaaaaccaaggctctgcgggctgccagggctgagcagggcatctaggaggttgccaagggctatggcccattttcatttggggtagaagtgggcacaaagggagccaattggagggtctgggtaaggacagctctggtgaggcctgatgctgaactttaaccactgggctgggttgtgaggtaggctgagaacctgggtctaagcagataaaaagaagagataacaagctgcgtgtgttctgtgtcaactggggaggctacaaatgctccaccctgtgtggcctgactttataataacaaaaatagcttgcacatagcaccaaccctgttctaatcactttatatgtactgacacatttcatacaactctataaagtaggtactattactatcatccctattttaatagagaaaacaggcacagataggcacagaacgatcttctcacgatcactcacctaataagtgatgaagccaggatttgaaccgcagtgatcagcatctagagtctgggctcatgacttttcaagatttttaagtgaagtattctgagttttccaagttggaaatgaattaaaacgtattttaaaatagcgagagagccaattgtgctaaaacatactagcttgctacctccgtgtttgaggctttgaggagagggcaccctaagaggagttctacgataaggataataagaccgtgacagttgacgttgagggctttccgtgtgccaggctccttacaagaacggcctcatttatgtaaatatctccattttcagatgagcctcggagctgcctgtagttgcccagctagtatttaaggactgcagaggttgcgctcttgattgcggggctagaagtgtgttctacagggaagcggggaacttcgttccagcagcgccgaaacccgcacggcccctaggctgtccctccgcgcccgggtgacttcctttcagatccccagcgaagctcccagcggagccctcccacccctcgcccgcttgctcccgtctgcgggtctggagtagcgctcgcgattggccccgatcaccgccgcggtcctgccccctcgttgcagagattccgattgggtgaggctcacgaagctctgcccccacggtggccggagcagccggaagctagcatggcggccgccggggctgcggctacacacctaggtgcggtgggcttcgggtggggggcctgcagctagctgatggcaagggaggaatagcaggggtggggattgtggtgtgcgagaggtcccgcggacggggggctcgggggtctcttcagacgagattcccttcaggctt

SEQ ID NO: 17601 - DNA, 2300 bp, Homo sapien
cactgccctagttttgcccttcctggggtcagacatttcacatgtcagctatgggctgacctgtcttcccaggctgactcaggagagaagtcaggaactctagcagagctctcccaacactgaaatgtgccttgcctggcttggccctggggaaagaattggcgtgatatcaattggtcccatgtgggctaagcatgggtcaggcactctctcctacctcctggcaagggctgtgaagagaccagctcttcatgtgtcttctcacctccctttccctcacagaatgaaaaggagctccaggaagtgatacagcagcagaatgagaagatcctagaacagatagacaagagtggcgagctcatagtatgttcaccatcatgcccaggcctttgccttctgtgttactggtcagccaggatcccaagtatgagaaatggtttgcttttgttcaccacatgttgtctatccttatgtcctattggacacctctccattctcattcccagagccttagagaggaggtgacccaccttacccgctcacttcggcgtgcggagacagagaccaaagtgctccaggaggccctggcaggccagctggactccaactgccagcctatggccaccaattggatccaggagaaagtgtggctctctcaggaggtgactcagagttaacagaggagctggacagcaggtggggaccccaggctgtacccctgttgatctggacatatttctaggtggacaaactgagagtgatgttcctggagatgaaaaatgagaaggaaaaactcatgatcaagttccagagccatgtaagaatgtccatgccattccagggccatttcctaccatcgttaacaaatgccccgccatgtttcccctgtcctaccaagtttgctcttttatgcataggacttataaaatctgtttgctttctagagaaatatcctagaggagaaccttcggcgctctgacaaggagttagaaaaactagatgacattgttcagcatatttataaggtataggcaggagggaggtgatatcactaatgaacctggtacaaggcctggccccaggaggtactaatgagcacagatctggttcccagcctgtgctgagagctgggcctgaatcactattgcaggcttctctgtggtgtctgttttctcccctctaattcagcggctgcctcctggggctgggagccctgggccttaagtctgtggtcctgagctgcgttttctgcctctcttcccagaccctgctctctattccagaggtggtgaggggatgcaaagaactacagggattgctggaatttctgagctaagaaactgaaagccagaatctgcttcacctctttttacctgcaatacccccttaccccaataccaagaccaactggcatagagccaactgagataaatgctatttaaataaagtgtatttaatgaatttctccaagcttacggaatcttactttttgggtgagagggggcggatgatgaagtcagggaagaagcagcttgggcctcctgcctgggcaccctccatagatccctctccacctcctgctgcatccaaagccaaggctgcctgcccttcctcccttcctctgctttcaccaaaactctgggcactggactgcttgttccctggctcaccgcctggaggaaacagaaaggcttcattctcttactttccccagccccctcgggggtataccctggcaaatatgggggtgaggacagagaagctcagttcattacttcctgccctgaacttgggcaccttgaagatgcttctgccccacctactcaacctgttgttactgttctggtgcctcctcttcaccagactaagcttaatccccagcatccagcaagtgcccggcacgtggtaaagggattgtggcagaaatgaacgcaaggtcatggccaggctccccgaggtgggagggcagtccctaacagccacggatgcctggcggggcgctcactccacctcgccgccccgcctctgagggcgtggtcttgccccggacaccagtcctggggagggggtgtggtcagggcggggcatgcaggccacgcccccggaggagtcacgtagctctgcgacatccgcagcctcatttaccagagggagccagggctgcagcctcatctgtttgcggatcagaacccgagctgtgcttgtggctgcggctgctaactggctgcgcacaggtaaggccaggcaaggcgggagccactcaacatctccgcttcatttccttggctcttcccctgcca

SEQ ID NO: 17602 - DNA, 2300 bp, Homo sapien
aatcataataaattctataagctctatagagctaatttccacctagtacttatttatttttcatcttaagctgtactgtctaatatgatagccactagccacatgtagctattgaaattaaaattaaaaattcaggccgggcacagtggctcacgcctataatcccagcactttggaaggcggaggcgggcagatcacctgaggtcaggagttcgagaccagcctgaccaacatggagaaacccgtctttactgaaaatacaaaaattagctgggtgtggtggcacatgccggaggctgagacagaagaatcgcttgaacccgggaggcagaggttgcggtgagccgagatcgcgccattggactccaacctgggcaacaagagcgaaactccatctcaaaaaaaaattaattaaattaaattaaattaaatattcaattattcaggccaggcacagtggctcacacctgtaatcccagcactttgggaggccgaggcgggcggaccacttgaggtcaggagtttgagaccagcctggccaacattgtgaaaccctgtctctactaaaaatacaaaaaattagccaggcgtggtggtgtgcacctgtaatcccagttactcaggagcctgaggcaggagaatcgcttgagccctggaggcggagattgcagtgagccaagatcacgccactgcactccagcctgggtgacagagcaagactccgtctcaaaaacaaaaaaattcaattcttcagtcacctcagccacgttttaagtgctcaataaccatgtgactagtagttaccatgctggacagcacagattatcaaatatttccctcatcccagaaagttctattggacagtaggtattttgcaactctttcaagaaagactgctatgctatcatcatacttctgttactcaggatgtcatctgtctatacactcttctttcctcctcatacctattttattgatatcccatctccttccaaaaataattcatatgcatgaaaatgaatagatacgattaatgaaataacaaagtcatggtcaaaaaagaggaagcaaaacttcctatacagctataacagtagctgtatgtgatgatccagtttggccttgagctttctagaaggcagagcaagagggaaaatatggtaaactacatagttctcattatcagaaagaaaaggatagcaatttcttcaggaagacaatttttccaggcagttagtcctaaagcctttcttggaggaatcttatacaggagtcaagctgcttccttgacaagttttgacagcaactgaaatgcagtttctacatggctacgtctctcaaaacgtttaacaaaagtacaaatcagtgagggcaattctgcaaggagctagtttaaactaaggtgattcaagtaccctaccttccagtggtgtaacttgatcccaggagagttctaactacctcctagagtaaatggatattgcctcaatcttgcaggtgactgacctttccgtaagtgaccccatgttggaggaagagcactaatcagggtggtaggatttctcaatagtttgataaaggtcgaagggaggaggaggaggtaataaaaactaacagctaaacagagattcaagttctcactggatttcctttaaccaccctagggcacctctctgttggcctgaatagctgtaaatggatgtcaccgacgtagaagacttcattatcgttattaattattgtagccctggccctctgttcccctgagctctcaccctgggcaaacagcccagtcgagaagctgtccaggcgaatctcacctgcagccccagcttgcacagtgatggggtcagcgaggagcaagcgggggatctttttccagagttggtgagggcaccgggctgcagggtaagttcacggagaggagttctcatagatggttttccctgagaaagaaaccaagaaagagggcgagtgtgaggaagcctgggttctgccagcccgcccctcctccctccctaagaagcccaaaatgcgattagaagagtacgctcgcaccctagtcgcgcaggagcagcaaggcgaacaaagactccacaagcccccaaccccgggctcgacccaactttccaggacagtagacacggccggtgcccccgcgacagcagcccggcccagttctctccgccagagatctcccgcttaccgtctggggcgaaggcgacaggctgaggctcagttttttcactcgccacatcttcaaccagaaggcaggcctatcacgtctcagaccaagtcga

SEQ ID NO: 17603 - DNA, 2300 bp, Homo sapien
tgagctcaggagttcaagactagcctggctaacatggtgaaacctgtctctactaaaaatacaaaaattagccaggcgtggtggcacatgcctgtaatcccagctccttgggaggctgaggcagaaggatcgcttgagcctaggaggtggaggttgcagggaggtgagatcgtgccactgcactccagcctgggcaacagcgccagaccatgtttcaaaaaaaaaaaaaattagattaaaaaaaaaagtttaaaaaggctgggtggggtcgttcatgactgtactcccaacactttgggaggctgagatgggaggatcgcttgagcctaggaattcaataccagcctgggcaatatggcaagagactgtctttataaaaaattagccaggcgtggtggcacatgccggtagtcccagctactcaggaggctgaggcaggaggattgcttgaacctaggagttcaaggctgcagtgagccatgattgcaccactgcactcctgcctgggtgataaagcaagaccctgtctcaaaagaaaattaattttaatgtattttatttaacccaatattcctaaaatatttcaatatgtaaacagtattaaaaaaaaaaaatatatatatatatatttttttttttttttgagacaaggtcttgctttgtcgcccaggctagagtgcagtgggatgatcatagctcacagcagccttgaactaggttcaagcgatcctcccaagctgggattataggtgtgtgcccccaaccctgccacccctggcttaacttttttttttttttgagacggagtctagctctgtcacccaggctggagtgtagtggtgccatctcagctcactgcaacctccgcctcccaggttcaagagattcttcctgcctcagcctcccaagtagctgggattacaggcgtgtgccaccacacctggctaatttttgtatttttagtagaaacggggtttcgccgtgttgggcaggctggtctcgaactcctgacctcaggtgatccgcctgcctcggcctcccgaagtgcgggattataggcgtgagccaccgtgcccggcccaaattttttttttgtagacataggtctcactatattgccgaggcaggtctcgaactcctgggcttaaaggatcctcctgcctctgtctcctccgtgctgggattacaggcatgagccaccgcacctggcgatattttgcattctttttttcatacgacgtgtttgaaatccagtttgtacagtgttttacatttatagcacattcccactgggactagtcacatctgaagtgctcaaaagccactatggctagggctaacgtactggacaacacaatgctagaggagcccgtccctgaggacgctgcagtttataacatcatagttcctcctctttggactgctgctttccccctatgtattaagacttgcagagtgtaaacagggcgccgtgagtgtgcaaagcacacacaccttcgcaaacggctcactctgaatactgacctttcggctgtcctaccttcaacaggtttcccgtgcataggagatccaagacagcagaaggcaggagctggcgggacagggaggaagagcggctctgccgtttactatctgtgtgacgctgagcaaattacacacggtctctctgactcagctccttcctgtcacaaatggggatatttatagtatttctcactacgtaggtccttatgcgcattaaatgagctactacacggcattcggcatagcgccaggcacacactcaatgttcaatacatgtaggcggttagcccagtaaactggtagccggcctgagtaagtcccaggaaaagcccagaaactctggagacattacagcccaggtcgagaaccacggcccgggccgtcccggacgcgggcccaccaagcctagggaagccgctcggcaccgcttcggcttctagactccctggccggctctttcccgtcaaggctgcggctggagaggactgagggagacctagggagaggattcctcttctccatccacggagacaacttggatatgaacaccatggatgtgaggaggtccgctggaagcaggagggatggactcctggactctccagctacctgcgtggtcctccccggtgtgaggacagaagaccggtcctgggccgggcccgcatccagccctaccgccggtgtctgaggtgagggctccgtcagcggaaaacgctcgacaacggaggggcaggcagggccgggggcgtggtcaacgcgggccccgccccccgggc

SEQ ID NO: 17604 - DNA, 2300 bp, Homo sapien
cacttgaggtcaggagtttgagatcagcctggccaacatggtgaaccctgtctctactaaaaaatacaaaaattagctgggcataatggtgtgcatttgtaatcccagctactcgggaggctgaggcatgaaaatcacttcaacccaggagacggaggttgcagtgagctgagaacgcaccactgcactccagcctgggcaacagagtgagactctgtctcaaaaaaaaaaaaaaaattcatattgcttctgacaagcctattaaacacatcaatagcaccctgggagcccatgaagtattattattgctcaagaaaggaaacatggcagagaaacaagcagaagcagctctggctgacagcctgagggtaaagagcactggagaagtaaagaaaaggaaaaggtcaccaccctgatctgacatgttgaattgagaggtaggttgtatgatagggaaggaatagggccagctgtggctgccagtagcagaatgtccaggttggaactctggtctaaagcctaggagagcagaacggtaagaggctacaaaataaaaacaaactggattatcaaggtggtcatactgagtaggcagggatggagatcttcaggctcccagccgggccccaatttacagtagagaggctcaagcagggatagggtagagcaagaaggactccagatcacagtcaaagtcgtcaaagggcatggtctccgctgaactgggctgggtagcttgtgtctccgtgacaaagttcactggctgcttctgtaggagctctgggtcgaaggccacaccccgaaagaaagggtggacctggaagtgatgcagataacgtagacgatggagggggttctggcataagagctgaaggaaaatagagcatgaaggatgagtgactaggacaggacaggcctgaacagaaaggatggaaaagaagaaagaagttcatggagctgtggagggtaggaataagaaccctgaagagtagatgatttgtaaaagagggagaaatagaggctaatttggggcaaaggtgggaataaggagctgtgcttgtgagttttcagatgagtgtacagtgttccactctctcagaagggacctctctgttctagatggggaggagatttgggggaccaggaacttaggaatgtgactcagtacagcttagatggcaagtagttaggtagttaagttggagccccctcaaaaaaactgatgagaggaatggggaaaaatcactttaatgaaggcaggagagcattaatggtttcgtagccaagaaggaaagcagtgctcatccttacctcatggagcaggagtgagaggccctggttaagagaagctgggatctcagagtcactgtgggtcacacttgccaacatggccacatgatctctctctgcagccactggaaactgagttaagaggtagggagtggaggtaggggtaggggttcattccttagtaggaatacggcaagatttcctaaggtcttccttcttcccaccacaaggcaaagctcttctctgcccaaaactactactattctctcacctttccagtcgccagagagaaaagcaagacacccagggaccaccaatcagcagcatggttgtaaggtcctccacttaggacctctggggctacagatttcaaagatactcatcacagacatcctttagctatcctcctgcccaatgcttacccatcagctttaacctctctcacccatgtactgaagagtgccacagatagtgtaggcttgagctccctggggcacgtggcgggacagaccaaagtctgtcagtttcagatggcctatgaaagaaggtaaggcaactgcaccactgttccacccatcatcagccatgatttattcccaaaccaaagtacctctcatcctggggctaaggaaggaaaaagacttacctcgttcatctagaagaatattctccatctgaaagatcacaggtgagaagtaattcttcctcttcctttcaactctctttcatcatgtatacaccccagctgaaggtgatgccctactcagcactcaaatctatactcagagagcccttccccaaatccttggcacccatgggggccccaatgtctacagttctcagctccctaacttcttggacttgttggcacttcttattgagactctttctcagacaaagggaaaaaagcacttaactctaccttcacatctcgatgcatgatgcccaagtcatggagataacctgtggataacaagtatggggtatgctgcagcttttctgtcctttcc

SEQ ID NO: 17605 - DNA, 2300 bp, Homo sapien
aagtccattctagggataaaagaagagggagatgtttggggtcctgagtttcttctgatggattcagggctcacactccttgcctgcctttcttagcaccctgtggatgacattgacaagatgaaagagcgagctgccatgaacaactccttcatctacataaagattccacaggttccactgtgtgtcagctacaaggtctgcacctctcaagcactttgtagaacagggtgggaagggaaccagataagatcagagattctatacagggagacagctaggttgtttgtgatgctgagctgtgggtgataaatctgctgttccctctgctcccctcaagagtcagcatcattacgaggctgaggtaaggggaaatcagtatctgtaggttactattgtaggacttggcactcaagtggctggctgggactcaaaatggcagctgatgtattccccacccctctttttttctttcccctccccctcctcttacagggtgagaagaacagtgtggactggggtgaccttaacctggtgctgccctgtctggagtaccacaacaacacatggacatggctagactttgccatggctgtcaaaagggacagccgcaaagccctggttgcccaggtatcccgccagggctcatggctgtttggctaatggggctggcaggcagatcctcttttcaggagcctttcattttagaatccatgaataaatatccttgggaaggggcaggtgcatgaagtgagtggcttctatgcctaccctctccatgacctcactcagattattaaattcagtgtttactgagtgtttcgtatagcaccattgattttagggaactgagagctaacacaacctaaagtttagaaggggttataattagactgtaagcttcttgaaagcagagaccattgtatgtgaattgccccattgtgccttggatgtgtttaataaatctttattgtcttggttcattttgatttattctgcctgcccactaatatttacattttcttttactcctctccaatctgccaggtaatcaaagagaagctaaggctgaagtctgcaacaggctctgaggtccggggaaagctagaaactaaatcggacctgaacatgcaacagcaggaagaggaggagaaagcccggctcctcattggtttaagtgtgggcgacaagaaccctggcaagaagtccatctttggcaggcgcaaatgatttggcgattcgagtggctgcagtacaggatctgactctggctcaggctccagggacttgtggggtgggaggggcttcccgttatccacgaggatttgtgggtgtcagagcccataggcatcactcttcagcacctggtctgttcgctgcagggcatggtggacagtaatgctgagttctgtctcacactgatcaggctcagggccagagaggcaacaagagagcaagacccagggaatgggcccagggcaggaccctattcccttggggtcaagtgaaagggtagggggatagtcctgatcaagtgtgataaatttttatagacatatataaatatatatatattatatatatatttctaagtgtaactgtccttcctctgtgccaggaaacgggagggggctgatcctctgatcctcactccactgtcatgtttgaaagaggtattggtgttctggagtgggggtcaacccctccccagtctctgtgctaagttcacttgggaggatggcagtaggagccagggctggccatgggtcccctacccttccccgtaggatataccctggagaatggcaaaatgatttaaagagaaaaaaaaagatattttaaatttgatgctcatttttgtgtgtgtgtgttgagtgcatgcattcaatctgtgtattcctccctcatcaacccagaacatcctgcagctgccactctgagggtggccccttccttcctctgccctgaagctgtatcacagaaatttctagtcctagtgtgactctggccccatgctgatgggtttctgcagactggaagaggcggggctcgtgtcacgcagcatcagggagaggaattgcttatataactgggacagcagatttagcagagagaggaggcagaggctgggaatgggagcagtaagctgtcggcaggggcagcacacccagcagggggaacacacccgggtggctgtccctcacaaggtaggctgtggggctctggcagcctactgaggggaggagagggagacatgggcttgagtcctgggaagttcctggttaggagcatggaagtga

SEQ ID NO: 17606 - DNA, 2300 bp, Homo sapien
aatgagatattttgcccatgacatgattagatttgaacctttctcattgtttttctggctcgagacctgtgggcctggcaaagtgtgcatgtaactcagttgggttggagaatttgggtagactggggcaagagaatgagacaagtatgtcctctatcctgggagatatggttcaagctattccatgcagtggaggtccagatagtaagtgtaactacttgaaacatggagatctgtcacccaattgtccaggacaagccactcttttcccaggagctaaagttgcctgcatctctttcttcaggtgaagaatatcgaggagcaccggcagcgtagtctggactctgtgcaggagctgatggagagtgggcaggcagtgggcggcatggttaccacaaccacaggtcagccctccccctcctctgcatcaaatgattaggagcagatgtgcatcccaaagggacctcatttccctacctattcttaacgtcagtgtatgctggagtaggaccattttgtgctaggctgggttgaaagcagtgtttctggagtttctgagacatagctgggaggctctcacattatctttattgagaatgtctttttcttatctctttcccacctcttcccagattggaaccagccagctgaggcacagcaagcccagcaagtccagcggatcatttcgcgttgcaactgccgaatgtactatattagttacagccatgacattgatcctgaactagcaactcagattaagccacctgaagttcttgagaaccaggaaaaggaagatctcctaaagaagcaggaaggtattcagggcttgaaaggcttttaggaagggactagagaaattgtgaaagtagttatttccttggtggttttgagacagtagagttattaaaaatccactgtgcactggcattaacatttcactttgctctactttttgtaagttctgctatgagaaaataacctctattcttggagggagctgggatgaatgggcattgtttatgattctgaagtaaacatgtttctgcccatgagcaactctcaccctttctgtggggttgactagtggggtggttccaaatgtgggttaagagatggagtagatatttaggtagaaacttgagccttttatttagctgctaacaattatctaggggctgtggataccttcacccttatccaccatgagctggaaatttccaccaacccagctcagtatgccatgatcctggacattgtcaacaacctgctgctccatgtagaacctaagcggaaggtgagcatgggcccttgtagaatgctggttagcctcacaggaacacccagactttgtgctttatttgggcttctgtaacaaaagccatgcttcacactgaaaaagggccttgtggttggtagattctcttagtcggcagtgacaattgaaattccacttacttaggaaaggcctgaatatctctcagaccgtagggcttgtttgcctgattgttttctcctagtcatttctctactcagtcacctagacacctctaaaaacatttactattccctgcttccacctccatcccatcctgttgggcctgacctattgtgaaatccacattgccacattttctgcattgacctactactgttgctattaccagtgacagataaaggttagctttctagaagagaccccccccatttctttctcctttctctatttcactttactacaagacttgtctacttaaaaatcatattcatttccctttccattcctttaggaacatagtgagaagaagcaacgggtcaggttccagcttgagatctctagcaatccagaggagcaacgcagcagcatactgcatttgcaggaggctgtgcggcagcatgtggcccaaatacgacagctggagaagcagatgtattctatcatgaaggtagtcactgcagatagatagtttgagaaccaggaagtctcctagaacgagggcggtctctcagtttctatcctggttccctagtctttgcaggatgacagcaagaatgagaatctgcttgacctgaaccagaagcttcagttgcagctaaaccaggagaaggccaacctgcagctggaaagtgaagaactgaatatcctcatcaggtgccccagcattctttccttgcccttttccagtgccccagctagaggcagttctctttcttgcccatgttttgactgtctttaggtctagtgtgcattatcaaaggctgatgtaggagtaggttcagacatctcttcctgaataagaaaa

SEQ ID NO: 17607 - DNA, 2300 bp, Homo sapien
cccttaagatctctccagaaagaaatagacaaatcataaaatcaacattttaggctatgagatggctgggagtagggccggtaatagtcaagggagaaggaaggaagtgacaggaatcttggttcaataaacagattggataagatgaaccagagtagggatacgtgttgcacggcacccctccttgacttggacagaggttttcagtgaattgggccttcccagagcattcggaggacataccctgggggaaggctgcagatgacgaggaagatgacgcaaatacagtgcttgagaggtaagtatgaccttgaaacagcagcgctggagctcttggggagatgtgaaatcactgaagagaggaatagataagggaggaaacaatcagaggagtgaaagcaacttcgggcaacacacaggtgaaagatgaaatggtgttttatctgagggagccaaaaagagaggctctgagtaaaatcttgaaggatatatatggagattaggacgtgggagcgaaggggtatgaaaagagacatgacctcctccataatacttattttgaaaccgtcaggatttccttagcttgtgctgtatcagtagatcatcattcagatactgatccttagcacagtaacgctgagggacctttgtcctgttctctcattttacagagaaggaagcaggcaaaactatgtattgtctattttatgtaattatgtttgcttcccagataaactacacagaaggaagcaggcaaaactgactatgtattgtctactttatgtaattatgtttgcttcccagataaactattttttgctaaagggcaagaacaatattcactacttctgcagtatctcctcctctcctccatcagggcccagttcgtgccataagtagatggaccagaacagtgttcaaacagtaaatgaagtaaaaactcattggccaggaaccgtgacacgcgtctttagtccaagctactcaggaggctgaggcaggaggatcccttgagcctgcaggagttcgagaccagactgggcaacgtagcgagtccttgtctcaaagaaaaaaaaaacaaaacctcattagtttcctctgtggatggaatgaggcgagatttttgaggccttttaattacctcctagtttctgcctcagtaattttcaaacaggatcttgaataagatgggagtgctaccacgtctgaccaggggtgtaacttccgcagaaccctgagtccaggcctaagtggctaggcggactccaactcccctcaaagtgagctccccggaccgaaatgagtcagccaggtccaccgccagcccaggtagtgggcccggactccgacccccgcgggtccccgagccccgcggttccgggcaccgtggtgtgcgcccggggcgtgtttcagctcttggtccgctccccctcgccctcctcccggaaccacgcccgctcctcgcgcacgcagcccgtcggccctgcagcgtcgtaggacagggcgggactggggtgggaggccgttggttggctggcgggctgcggaaggcggggctcgtgtgcgcaccagcgcgtcctcgctcagcgttgctcctgcgcgcgcagctggtcggcccgcggcggtgctgcgcggatccggcgtcggggcccggcatggcgggggccggggccaagccgggccggacccggacctaaatgcctctgttcttctccgcgctgttggtcttgctgctagttgcgcttagcgccctctttctaggccggtgagggttcccggccgcgccggcggcggcggcggcggcgggagggagggggcggagaggaggaagaaagactgaggagggggcgcgcgccttactgaggcgcgtgaggcagagtgggtagggtggagggagggggcgcgcggcgaggggagggatcgtgaggaggcgcgtggcccgagctcccagggatgggctgcgagttggggagactgaggaagcgggcggggtctgaggaaatgctgaggccaggaactgaataggagtgtgaggaaggggcctggttcagtggcttccctttccccctccacccacccctgcatgtccctttcgccaagcgcgatgggcacctgcagcatcggtctggggagaacagcattcgagctgccgggtctgacctcaaagtgccttctcgtggatacctgtctggagggtgggagcaggagacagacagaccctctggggagtgtgatggcacatgtgacagagccgcctccgctttgactcttgctggggtcttctctctctgcctctggga

SEQ ID NO: 17608 - DNA, 2300 bp, Homo sapien
aggaatccagctgtttctgactcaggtttttttaagtgcactacgattgtgtttagcttttggaaaacaaatcctgttttttggacaaacgtagatatatctctctaaaaaggtggatagaaaactacttttgtcctctgcctacctgatttcctcctttcctgtgtcaattgcagaaaatttgctcctgtagcttccaatcatggtattggtgaacggagatggctgccatctgctggaatttcagtgactagcaggctttttttatttttagaaacttccgggttttgttctttttttttctatttgttttgttaatgttgaacatttagagacaccatttctgtgccaaacatggcccgtgacgttaaaagacttggtctcttttacaagggcttgtggtctcaataaatggaggccatgaattagttgagccccactgttgcctcaaccaccccccacccccgactccctgcctttattccacttcacttgtgttgatcccttaagatctctccagaaagaaatagacaaatcataaaatcaacattttaggctatgagatggctgggagtagggccggtaatagtcaagggagaaggaaggaagtgacaggaatcttggttcaataaacagattggataagatgaaccagagtagggatacgtgttgcacggcacccctccttgacttggacagaggttttcagtgaattgggccttcccagagcattcggaggacataccctgggggaaggctgcagatgacgaggaagatgacgcaaatacagtgcttgagaggtaagtatgaccttgaaacagcagcgctggagctcttggggagatgtgaaatcactgaagagaggaatagataagggaggaaacaatcagaggagtgaaagcaacttcgggcaacacacaggtgaaagatgaaatggtgttttatctgagggagccaaaaagagaggctctgagtaaaatcttgaaggatatatatggagattaggacgtgggagcgaaggggtatgaaaagagacatgacctcctccataatacttattttgaaaccgtcaggatttccttagcttgtgctgtatcagtagatcatcattcagatactgatccttagcacagtaacgctgagggacctttgtcctgttctctcattttacagagaaggaagcaggcaaaactatgtattgtctattttatgtaattatgtttgcttcccagataaactacacagaaggaagcaggcaaaactgactatgtattgtctactttatgtaattatgtttgcttcccagataaactattttttgctaaagggcaagaacaatattcactacttctgcagtatctcctcctctcctccatcagggcccagttcgtgccataagtagatggaccagaacagtgttcaaacagtaaatgaagtaaaaactcattggccaggaaccgtgacacgcgtctttagtccaagctactcaggaggctgaggcaggaggatcccttgagcctgcaggagttcgagaccagactgggcaacgtagcgagtccttgtctcaaagaaaaaaaaaacaaaacctcattagtttcctctgtggatggaatgaggcgagatttttgaggccttttaattacctcctagtttctgcctcagtaattttcaaacaggatcttgaataagatgggagtgctaccacgtctgaccaggggtgtaacttccgcagaaccctgagtccaggcctaagtggctaggcggactccaactcccctcaaagtgagctccccggaccgaaatgagtcagccaggtccaccgccagcccaggtagtgggcccggactccgacccccgcgggtccccgagccccgcggttccgggcaccgtggtgtgcgcccggggcgtgtttcagctcttggtccgctccccctcgccctcctcccggaaccacgcccgctcctcgcgcacgcagcccgtcggccctgcagcgtcgtaggacagggcgggactggggtgggaggccgttggttggctggcgggctgcggaaggcggggctcgtgtgcgcaccagcgcgtcctcgctcagcgttgctcctgcgcgcgcagctggtcggcccgcggcggtgctgcgcggatccggcgtcggggcccggcatggcgggggccggggccaagccgggccggacccggacctaaatgcctctgttcttctccgcgctgttggtcttgctgctagttgcgcttagcgccctctttctaggccggtgagggttcccggccgcgccggcggcggcggc

SEQ ID NO: 17609 - DNA, 2300 bp, Homo sapien
gcatggcggcgtgtgcctgcaatcccaggcactcggcaggccgtggcaggagaatcacgggagccccaggcagggaggttgcagcgagccgagatcacggcagtacagtccagcctcggcaacagagggagaccgtggaaagagagaagagacaagagagggagacggagagggctacctgtagttcttaaacaattgttgagggtcaggacaaaagcatttgtatttttaacaagtttctccagttattcaaattaatcccagatagagaatcacagttcattctgggcaatttcatctacaaccctgacatcttcaaccacagtctgtacaagatgttatatttaatgttgtatctcaggctcagcacagatcccttttctgagctccggactgaacctggttcccaaatctggctgtccatcagaaccacctgaagagctttttaaacctacagattgctactgccaagcctctgtccacctccactctaattcagtagatccaaagtaggaaaccaaaacaaagtaaaaaataagcctgacaacatggtaggtgttcactgaatgggtgctagaattattaagacatcgcagtgatgataactcatgtccttgcctagtctgactgatcagatgggttttgggaatcatgaaccagactagcccacctgacagaactctttcctccctcagcaaacagcatcatcagtcattcaagacaaaaatctaccagctatcttagatgcctctcacatctcactagctgaccttcattctttttttttaactttatctttttttttcaggcagataagactttctttttttagtctgtttttattatattgtaattttcttgactgattatcaccaccgaatctcctgtatgtagtacaattctagccatgtagtaggaactcattaagacctatgctgaatgaatccacaaataatttattactaaacattttaatttcaaacgctaaaaaaaaaaaaaaaaaaaagcagttttctctgcaattcctgtcactgctccaagtttcttacaagaaggaggttaaggtttgggtagaagggggccaaagatggaaactgaggagcaagtgtaagatgcagaagagctggaagacaaagggttgtagtcaacgagtgagctcttggagtttaaagtttcacagacagtacttactgtaactttaaaatttcagacacagcacttactgtaattttcttgtctctaaagcaggctttgaacctggatagatttggatagaaccccgactttgtcatttgctaactgcaaggctttgaataaacgatttaatttctctgcgtctgtttcctcatctgtgaaatgaggataacaatactgtccaccttacaacaatgttaataatcggaaaaaggacataggtaacgtgcctggcctgtagctcaccaaatattaggtggtgttgcgattaagatgccttagaacaattcagttctccgactctctagacctgaggaaccttcccagggaacccctaactttcccagaccacactgtcagatattctataggccccgcccctccagagcctccgagtcctccctagcccacccgagcccggtccccagcattacctgacccatagcgcacgtcgtgtgagtgcagtcggacgttgtggcgcgtattgagtagcttcaccacggagccgcaagtaacgacacccaggctggacgctcccacagcgctccacaaaccccccaacaacagcagaggtactacagccatcctaactgtatcgcggagccccaaatcttcgaagaaaactcggcccctccccggaaccggaagctaatggcgaaaccacggagagaaggaagtgaagaagcccgagtctgatctttatggtttatttgactagagcggcctgagaaaccggctgagcctggttacttacgatactctcgctctgttccaggggctcagtgacagctgccttcctgagccgcttcggttacctttcgcacccacgagacgaaagcttccgagagcgggagagagaacaagaaatggcccgcccactcccggtgacagggagccggaaatgacgtagcacgttgacgcagcagcggcggcggtggcggcggaggggccgtgcggtgggtccgtactatcttttcccagtctcggttcgacgactccattttcctcggtgggggcttagcgcactggaggagcggcgggcttcagacaggtaaagttccgactggagagcgtgtttctcgcaggagtcaggtggggaaccgggc

SEQ ID NO: 17610 - DNA, 2300 bp, Homo sapien
gaccttgataagagcaacttcaatggagtgggcaaagtagatgtggtggcacttgattactagaagctgcctcaggaggactgcttgagctcaggagttccaggtggcagtgagctatgatggggccactgcactccaacctgggcaacagagcaagaccctgtctccacaaaaaaaaaaaaaaaaatggagtgggcagaagagaagccagattggtataaaatgaagagtgaatgaaagttgagaaagctgagttggtacaggtagaaatctatgaatggaaatttaaaaaattggcatggtaattggagagggatgtgaaggataccagaacataatttgtatgctgatgggaacagtttcagggagagacaggatttggtgactgattttattgggaaatagtggacaggaaggaagacaaggattacaggcaggactgatggtagtgccatttattaaggtcaagaatatagaatcagggcaaacgtatttgcctacaaagatcatgtttccaccacactaggtaggctttcagaggaagaactgtaaaatttgactaagcctctccagacggtaccactttctgatgtaattaatctcctgatgaagttaaaacctcctagagttgcaaggctatgctaatccaatctagcagccacacaagccaagtgaataaaaatgtacttgtactggtgaaagggacattactcgtaaaaaagggctctaaattcacagctgatggaagagcagttatgtttctgtaatcaaaacactgaagacttacaaactggtaacttccagataaacagtggaaccagacatttttccgaagaaattaatcaaattcaatattgtttacactccctaatgctcattaatgatgtagcttcatacacccttgttacttttgatattacagtgaatttccacggaagtattttcagagatcttagccctctgaaataagtatcagttcttgcaacaacccaggaaaattaacttctccagctggttcaaaggagtgcctgaggagaaaggtagaaactagaagatggagttttgacttaataactaattttgatgttcatgataggcctctggcaaacgtttgaggaaatgaatctatagagaatggacgggctttaggacttctacaagaccttcgatctttagaaagggatgaaggatgcaaccatctacaaaaagttctatttgtattattcagcaatatgtaaagagctggaatttggcatcgccctctagcctgatggccgagctgctgaaagctccacaggattcatatccccagaacaaacaactcgatcacctgatcctggctcagaagccccaggtcccttccatccccaatccttttgcgtggcccagttttaaaaacctgcggagagaaggacgggatgccaggaagcctgttgattcaacgtgccacccgattcacgggttccgggtgtcactgggctgggaaaagctttcggactctgagcaactacagcgctttcctcccccttccccccatagagcagggaaggccaggctcccccttcttcccgcatacggctccccactgcctcttcccttacgtgaccaggccctaggagcccggttccccacctgactcctgcgagaaacacgctctccagtcggaactttacctgtctgaagcccgccgctcctccagtgcgctaagcccccaccgaggaaaatggagtcgtcgaaccgagactgggaaaagatagtacggacccaccgcacggcccctccgccgccaccgccgccgctgctgcgtcaacgtgctacgtcatttccggctccctgtcaccgggagtgggcgggccatttcttgttctctctcccgctctcggaagctttcgtctcgtgggtgcgaaaggtaaccgaagcggctcaggaaggcagctgtcactgagcccctggaacagagcgagagtatcgtaagtaaccaggctcagccggtttctcaggccgctctagtcaaataaaccataaagatcagactcgggcttcttcacttccttctctccgtggtttcgccattagcttccggttccggggaggggccgagttttcttcgaagatttggggctccgcgatacagttaggatggctgtagtacctctgctgttgttggggggtttgtggagcgctgtgggagcgtccagcctgggtgtcgttacttgcggctccgtggtgaagctactcaatacgcgccacaacgtccgactgcactcacacgacgtgcgctatgggtcaggtaatgctgg

SEQ ID NO: 17611 - DNA, 2300 bp, Homo sapien
tctgcccacctcgacctcccaaagtgctgggattataggcatgagccactgcgaccagccccagcatttagacattagatagagagcaaaagttgctagcaaatgagactcagaaggaacagccggagaaatggagaaaatccaagagtgaaatgtcaataaagccaagatgaaagtttggaggcaggagtaactatgttgaatattgcagagacagaggaatatgagaacaaagtatccattggatttggcaacatagaagtcactggtgaccttgataagagcaacttcaatggagtgggcaaagtagatgtggtggcacttgattactagaagctgcctcaggaggactgcttgagctcaggagttccaggtggcagtgagctatgatggggccactgcactccaacctgggcaacagagcaagaccctgtctccacaaaaaaaaaaaaaaaaatggagtgggcagaagagaagccagattggtataaaatgaagagtgaatgaaagttgagaaagctgagttggtacaggtagaaatctatgaatggaaatttaaaaaattggcatggtaattggagagggatgtgaaggataccagaacataatttgtatgctgatgggaacagtttcagggagagacaggatttggtgactgattttattgggaaatagtggacaggaaggaagacaaggattacaggcaggactgatggtagtgccatttattaaggtcaagaatatagaatcagggcaaacgtatttgcctacaaagatcatgtttccaccacactaggtaggctttcagaggaagaactgtaaaatttgactaagcctctccagacggtaccactttctgatgtaattaatctcctgatgaagttaaaacctcctagagttgcaaggctatgctaatccaatctagcagccacacaagccaagtgaataaaaatgtacttgtactggtgaaagggacattactcgtaaaaaagggctctaaattcacagctgatggaagagcagttatgtttctgtaatcaaaacactgaagacttacaaactggtaacttccagataaacagtggaaccagacatttttccgaagaaattaatcaaattcaatattgtttacactccctaatgctcattaatgatgtagcttcatacacccttgttacttttgatattacagtgaatttccacggaagtattttcagagatcttagccctctgaaataagtatcagttcttgcaacaacccaggaaaattaacttctccagctggttcaaaggagtgcctgaggagaaaggtagaaactagaagatggagttttgacttaataactaattttgatgttcatgataggcctctggcaaacgtttgaggaaatgaatctatagagaatggacgggctttaggacttctacaagaccttcgatctttagaaagggatgaaggatgcaaccatctacaaaaagttctatttgtattattcagcaatatgtaaagagctggaatttggcatcgccctctagcctgatggccgagctgctgaaagctccacaggattcatatccccagaacaaacaactcgatcacctgatcctggctcagaagccccaggtcccttccatccccaatccttttgcgtggcccagttttaaaaacctgcggagagaaggacgggatgccaggaagcctgttgattcaacgtgccacccgattcacgggttccgggtgtcactgggctgggaaaagctttcggactctgagcaactacagcgctttcctcccccttccccccatagagcagggaaggccaggctcccccttcttcccgcatacggctccccactgcctcttcccttacgtgaccaggccctaggagcccggttccccacctgactcctgcgagaaacacgctctccagtcggaactttacctgtctgaagcccgccgctcctccagtgcgctaagcccccaccgaggaaaatggagtcgtcgaaccgagactgggaaaagatagtacggacccaccgcacggcccctccgccgccaccgccgccgctgctgcgtcaacgtgctacgtcatttccggctccctgtcaccgggagtgggcgggccatttcttgttctctctcccgctctcggaagctttcgtctcgtgggtgcgaaaggtaaccgaagcggctcaggaaggcagctgtcactgagcccctggaacagagcgagagtatcgtaagtaaccaggctcagccggtttctcaggccgctctagtcaaataaaccataaagatc

SEQ ID NO: 17612 - DNA, 2300 bp, Homo sapien
gcccaggctggagtgcagtggtgcaatctcagctcactgcaacctccacctcccggggtcaaaccattctcctgcctaagcctccagagtaactgggattacaggcacctgccaccatacccggataatttttgtatttttagtagagacggggtttcaccatgttggccaagctggtctcgaactcctgacctcaggtgatccacctgccttggcctccctaagtgctggggttataggagtgagctaccacgcctggcctaatggcttttttttttaagacagagtctcactctctcgccaggctggaatgcagtggcgcaatctgcaacctccaccttccggattcaagagattctcctgcctcagcctcctgagtagcctggcttttgccttctttttgaaagtacgtatgaggccgggtgcggtggctcacgcctgtaatcccagcaccttgggaggccaaggtgggcagatcacctgagttcagaagttcaagaccagcctggccaacgtgttgaaaccacatctcttctaagagtacaaaaattagccaggcatggtggcgcatgcctataatcccagctactcgggaggctaaggcaggagaatcacttgaacccaggaggtggaggttgcagtgaacggagattgcgccactgtactccagcctgggtgagagagtgagacgccacctcaaaaaaaaaaaaaaaaagtacatatgagagaagcaatgctgggaggaatggataatggaagagttggaaccatcagattcttcttttcttctccccaagtgggaatgttgagtgggcagagcagtggcaggttgctaaaaggctgtttgtgggaaggtttaagagccctctgtacaatcatgtgtccgtttttttatccttcactcttttctttccctagttatcttcaggcagagtgagaagctgcagcaatgtctgattttgtggaaagcgaggctgaggagtcagaggaagaatacaatgatgaaggcgaggtggtaccccgagtcaccaagaaatttgtggaagaggaggatgatggtgaggaggccccagcctcaagcttctccccactattgctaagctttggatagttggattcttgctgatgaaaagctcaggctcagcacagaagttatcacacatgaggtaccagcttgagaactttcagtcattcttagcagatactaactgagcatctgtctgtatgccaggcactaggcctggaactagaaatataaaacaataaatatccagctattgtggagtttactttagttggggggtggttgataataaatcagtagataagtctgtatataatactttctgcttttagacctagcattgttgatatttattcacctcgtttcctatttctctggccaagcccaatctttagaattgtcaacagagtagaaccacgaaatgacttcaaaggggtaaagggacgtacaagttttatcaaaggaattatggcaaaaaaaaggaatatagctgctgagtttacaaactgagtaaaacaaagttattggtggctataataatctagtaatgattttgagaagccaaagtgacggggaagatcatcctgcccaaagacagatggtgaatgtaggggaagaaaacattctttccagatgctgctactctaagtcaatggctatgttttgcatctttacatgaggcagaagagttaacatggcacccaggtcattaggtgcagagcaaatggataatcacattaatcaagtgaccctgaacctctagcctgtttttcagtctccatgcctcaaacatgcatgtcttccagatgaggaggaggaggaggagaacctagatgatcaggatgagcaaggcaacttgaaaggctttatcaatgacgatgatgatgaagatgaaggggaggaggatgagggcagtgactctggtgattcagaagatgatgttggccacaagaagagaaaacgcagtgagtagtctgtcgttggctcaagtgaggcttgggtggaggttgcagtggaaaagggcaaccccatcaccatgggcaacactttgtttcttcagcctcttttgatgaccgcctggaggatgatgattttgacctcattgaggagaatttgggtgtcaaagtcaaaagaggagtaagtgtcattctttgtcttttgtccctgggggtaaaggaaaaagccctggaaatttcaatgtctgtgggtgaggaggcacacgcaggacagtttggagaacattagagcacggtgttcggtatcattgtactacgga

SEQ ID NO: 17613 - DNA, 2300 bp, Homo sapien
tgtctcttctttttcaggctcaaggatgtccaatcaatggatgagctgaaagatgtctacaaccattttcttctttattatggccgagacatccctaagatgcagaacgccgccaaagctagccgcaagaagctgaagcgtgtcagggaagagggagatgaagaaggttagtgctggaaaagaaaatccaggagatttgatggccatgcatgatggctcacgcatgtaatcccagcattttcagatgctaaggtgggtggatcacctgaggtcaggagttcgagaccagcctggccaacatggcaaaaccccatctctactaaaaatacaaaagtagccagggtaggtggcacatgccggtaatcccaactgctcaggaggctgaggcatgcctgaacctagaggcagttgttgcagtgagttgagatcatgccactgcacaccagcctgggcaacaaaccgaggctgtgtctcaaaaaaaaaaaaaaaaaatcaagaaagaaaacccaggagacttgacagcccatggcatcttgaaggaggcccttggctgggtaccctttgaggcttctctcctaatgtgtcagatccttgggagtgattggaaactagaaccctaaatctccccatgttttcttcccaggtgaaggtgacgaggcagaagatgaggagcagagggggcctgagctcaagcaagcctctcgccgagacatgtacaccatctgccagagtgctgggctaggtaaaagctagctgctttgggatttaggcattctagcctgagcaaggggagttacccagaaaaaagactggtaggtaggaaaaagaaaggctatctgggtcaatcaccaatccaatcctgaactagcctattagctggtctttaaaaatactccctctccaaacccattcccgcccgacatgatggttcagcctctccctaatttcctgagataatgggaaactcatgattggagggagagagtccagtctgtctgtttcttctgccttataacagcccatcaagtgtttaaaatcagttttttcattgttctttgactacctggtcctgctcatttatggcctctttaaattccagtgctctagctgggcacagtggctcacgcatgtaatcccagcacttcggaggtcaaggtgggaggatcacttgagcccaggatttggaggccagcctggtcaacgtagcaaaactacaaaaaatacagaaaaaattagccaggagtggtgggacacacctgtagtcccagctactcgggaaagctgaagtgggaggatcacctgagcccaggtggttaaggcttcaatgagccatgatcacaccactgcactttagcctgggcaacagagcgagaccgtctcaggaaaataaaaaaggctagttcccagaattccaactccagattctgaaagccaagaggtttatcagcctatctgctgccttacccttcactcttctgtttgctttagatggcctggccaaaaagtttgggcttactcccgagcagtttggggagaacctgcgggatagctaccagcggcacgagacagagcagtttcccgcggagcccttggagctggccaaggattacgtttgcaggtaggcatgcagcaggtggctgacaggaggaggggcctgaggaccacaacaccctggtcctgtagctgcaccattttccccacagccagttccctactccagaagctgtgctagaaggcgcccgctacatggtagccctgcagattgcccgtgagccccttgtccggcaggtgctgaggcaaaccttccaagagagagccaagttaaatataacccccaccaagaaaggtagaaaggtgagctgggtgaagggctttgatccaagatgtgcaccagctctttctttgattgcctgagtttcttgccttccacttcactgagctgtgtgtctgaaagcagaaaggctgtcttttctcctggggcctggcccagcccatccgcaggctcatgattcccccttcatgtgtgcaggatgtggatgaggcccactatgcctattccttcaagtatttaaagaacaagcctgttaaggaactgagagatgaccagtttctcaagatatgcctggctgaagacgaagggctcctcaccactgacatcagcatagatttgaagggagtggaagggtaagcagagccctgggctggcgactctctggggaaggcctgatgaggagtctggtggagggaagggcccctcaggagtggggaaccacaatttcagagttgagcaggctgttgtc

SEQ ID NO: 17614 - DNA, 2300 bp, Homo sapien
acgagaaccaagggaagggcattcgagtcctcggcattgctttctcctctgccaggtaacagcctatttttgcctccccagcaccatctcttgtcttcctaatttcatttttctctcattcataacttcatattgctgattattgcattcttgtttttctgtctgtctggcagagatcaccctgtgttctgcgccctggtcaatggtgaaggagaagtgacagacttccttcgactgccccattttaccaaacggcgaactgcatggagagaggaagagcgggaaaagaaggcaagtggctaggacgaggatactaagtgtacatctggagtatgtcttatgattcagtggagataagtgtttacggtctaagcaacatcctatgcaagactgattgtgtctgatctggtcactgacttgtcccctgggatgcctcacttccatgagcagtagatggcactcaagttatctagtacgggatttgcttctggcttgaggccagttcctaggccttgtgtgcttctggagttgctttaactgcctcttttcttaccagcatctgggtcaggctgttccagcagctgaaagctactgaggcatgaagccagccttttccctgctttagcctttcagggtgtcttttttccagggaaagaagactttcaattcatttggttggtatatttctgaattttgtttatcctaatggtatctgtagtatctttcagttttgttaacagagccccattcttgaaagaaaaacttcttaagaaacaactattttttaaattttattattatcattattattattattattattattattattattattgaaacagagtcttgctccatctccaggctggagcgcagtggcaagaactcacctcactgcaacctctgcttcccaggctcaagtgatcctcctgccttccaagtagctgggaccagaggcgtgcaccaccacgcctgtctaatttttgtattttttgtagagacacggtttcaccgtgttgcctaggcaggtgtcaaactcctagactcaagtgatccatctgcctcagcctcccaaagtgctgggattacaggtgtgagccactgcacccagcccttaaaatcttgaaatggagatcagaatatctaatagtcctaactactcacattttagcaaaagtcacaccacaaatgaaatagccacaaaaggaggacatgcaggagtgtgaggcagtggaaagtaaatcataagaaactggacatctttaagatgaaggaaatcatacttaaccatgttgaccttttcaaagggccctcacccaaaagagggcagctactagttctttgttttgcttcatcaaaactagaaccaatggctaagtattagattttggtttacaataaaaaagaacggtttcctaacttcatccttgggacctagccagtggcacctggtaccactggagcgcagttctagtcagtggaattattaagcagaggcagggttggccaactttcaggaagaggtgggaatagttccttggtagcaccttggaccagatatcttctgaagacttccagttcttacaagatctccaacatagggagacagaatttcctgaaatctttacatcctcagagccattcagcttcaattttctttcaatccaggctcaagacattgaaacgctaaagaaatttctcctgaataagaagcctcatgtagtgacagttgcaggagagaacaggtaggtagggattagaccacacctggtttaaggccgtgacccaactcatcccttattattgagtctggcatatgcccataacagatggggcttgtgcttgtgcagggagtgtccctggggatgtttgacctcattttcttcaaagccctttcctcccctacctcttcacccccaaggcagtcatgagactgtccatccctaagaaaacatattcattgaccaacactcatcccaccagggacgcccagatgttgattgaagatgtgaagcgcattgtacatgagctggaccagggccagcagctgtcatctattggggtagagctggttgacaacgagttggccattctctatatgaacagcaagaagtcagaggtaatgctggagcctcacccttagggcctgcccaggcaagtgctattaatcccaaagagattaaattgggaaacaaaagttatcaggggcacaggactgtacctgtgtacttatccatgcagaagttctccgttttgcagttacggttcagattgggagtcccagaaattaaatcggtctc

SEQ ID NO: 17615 - DNA, 2300 bp, Homo sapien
cccctacctcttcacccccaaggcagtcatgagactgtccatccctaagaaaacatattcattgaccaacactcatcccaccagggacgcccagatgttgattgaagatgtgaagcgcattgtacatgagctggaccagggccagcagctgtcatctattggggtagagctggttgacaacgagttggccattctctatatgaacagcaagaagtcagaggtaatgctggagcctcacccttagggcctgcccaggcaagtgctattaatcccaaagagattaaattgggaaacaaaagttatcaggggcacaggactgtacctgtgtacttatccatgcagaagttctccgttttgcagttacggttcagattgggagtcccagaaattaaatcggtctcaggaaaaaagatcccagagaagcagagaaaatgatttaaaccagaatggtttggatttcctcttgatgttgtagctaaggggattttaaggccctgctgaccctcgtttgactctaggcagagttccgggattatcctccagtgctgagacaggccgtctccctggcccggcgcatccaggaccctctgattgaatttgcccaggtgtgcagttccgatgaagacatcctgtgtctcaagtttcaccccttgcaggtgagtaggatttgacaggcaggctcgggtgaagggaaaggcagagtaaccttactcctgcctgctgaatgtccacaggagcatgtggtgaaagaggagctgctcaacgccttgtactgtgaatttatcaaccgagtcaatgaggtcggggtcgatgtcaaccgtgccattgcccacccttacagccaggccttgatccagtatgtttgtggcctgggacctcggaaagggacccacctcctgaaggtaggattggagtgaattcagaaattttaaaacttgccatttcattgaatatgaatatatactttgtcagtataatttgacagattgggaggaccaaggtcagtgacttgtccaaaatcactcagctagtgagagtcaaaagagtctgacttcagacccagttggccaaagctgtgcccttcactgctgcttgcaccaccacacccagctaattttttgtatttttagtagagacggggtttcaccatgttggccagactggtctcaaactcctgaccccaggtgatccacccgcctcagcctcccaaagtgctgggattacaggcatgagccactgcgcccggccaactagtgttaacttgtaacttataagccatacattagttgtatatggtctttggtgtaggtataacatcatttatttgtttattattttcccatttaaagcaaaacttttttttttttttttttaattttgagtggtcgatagcatgctgtagtgctcaactagatactgggtgggacagagtttttgttatgagggtttaatagagactggaacagtctggggaggtggggcctgcttactgccctggctcagtccagctctctcccccagatcctgaagcagaacaacacccggctcgagagccggacccagctggtcaccatgtgccacatgggtcccaaagtcttcatgaattgtgctggcttcctcaagatcgacacggcctccctgggggacaggtgatgccctctgcctggatggggcaggaggaattcccttgtgggctttgttttcgggtttcaggggttagggctatcaaagggccacaagccattttaacttaggaaatgttttaaagaaaaggtaaggaactttattcagtcaagagcccctgacctatggaaaagatcggttcaatcatgtgaaacatttttcgtgtgagagaaacataaaaagtaccagcttagcttataaattaagcatggaaaacacaagattttgttcagtaaacacaaacttgcttttttattattatggtttgttgtggccagataagggtgggaatagcgggggcaatgaaaaaggagtttgggggtataaagagataaggaagggggagagagatttggtatgttttgagatgatgttattaagagaaagttctattcacttggactttggacttcactattgacctcttcctctccagaagttatcaactcagtctttggaggatcttttccacgggcacatagctcctcattcagtaatggaaatcagtggggaaataggcttcaagttctaaaacttcattttccactcagctttgctgtaacactccacgaataacataggtccatgtgagtgcacgggcaagaccagcctgggaa

SEQ ID NO: 17616 - DNA, 2300 bp, Homo sapien
taatcccagcactttgggaggccgaggcgggcggatcatgaggtcaggagatcgagaccatcctggctaacacggtgaaaccccgtctctactaaaaatacaaaaaattagccaggcacggtggcggccacctgtagtcccagccactcaggaggctgagacaggagaatggcgtgaacccaggagatggagcttgcagtgagccaagatagcagcattgcactccagcctgggcgaaagagcgagactccgtctcaaaaaaaaaaaaaaagaaacttcttatggtcgctgggtcaaaacaaaatggcagacaggcatggtggcacgtacgtatagtgccagctacatcagaggctaatttgggaggatttcttgagcccaggagttcgaggccagcctgggcaacatagcaagaccccatctccttttttaaaaaaagggaggggctggccgggcgcggtggctcactcctgtaatcccagcactttgggaggctgaggcgggcggatcatgaggtcaggagatcgagaccatcctggctaacacggtgaaaccctgtctctactaaacaatacaaaaaattagccaggcatggtggtgggcgcctgtagtcccagctactcgggaggctgaggcaggagaatggtgtgaacccgggaggcggagcctgcagtgagccgagattgcaccactgtactccagcctgggcgacagcgagactctgtctcaaaaaaaaaaaaaaagtggggaggggccaggccgggcacagtggctcatgcctgtaatcccagtactttgggaggctgaggcagttggatcacctgaggtcaggagttccagaccagcctgaccaacatgatgaaaccccatctctactaaaaatataaggattagcagggtgtggtggtgagactcctatctcaaaaaaaaacacaaaagggaggggcctcagttgcagctaaagggatctaagttggataaacataaaagaggatggggcacagtcacaccagtaatcccagcactttcaggggccgaggcaggtggagtgcttgcccaggagttcaagaccaacctgagcaacatggcaaaaccctatctctacaaaataaaattagccaggcttaaccgggtgcagtggctcacgcctataatcccagcactttgggaggccaaggtaggtggatcacgaggtcaggagatcgaggccatcctggctaacacagtgaaaccccatctctactaaaaatacaaaaaattagctgggcatggtggcgggcgcttgtagtcccagctactcgggaggcagaggcaggagaatggcgtgaacccgggaggcagagcttgcagtgagccaagattgtgccactgcactccagcctgggcaacagagcaagactctgtctcaaaaaaaaaaaaaaaaaagattacccagacttgggggcgtgcgcttatagtcccagctactcgagaggccaaggtggaaggatcactcgagcctgggaggttgaggctgcagtgaaccctgattgcaccactacacttcagcctaggcaaaagagtgatactgtcataagaaaaagatggctaggtgtggtggctcacgcctgtaatcccagcactttgggaggccgaggtgggcagaacacctgaggtcaggagtttgagaccagcctggccaacatgatgaaaccccatctctactaaaaatacaaaaatccgccctgtgtggtgatgcacgcctgtaatcccacctactcaggaggctgaggcacgagaatcggcttgaacccaggaggcggaggttgcagtgagccaagattgcgccactgcactccagcctgggcaacagagcaagactccatctcaaaaaaaagaaaaagattcatctgatggccagtggtgccaagcatcagctatgagacaagggactttgtagatggtcaaattctgtcttggcagatgactaagtcattgtgttttcagatcatggtgcaaggtgtcaatggtaaaagaaattacaacacctctgggagctcttttctgaatgagcgatctccagaatattgataatcaagctcttctcctcatgccctcttcaggtgtggaaccactttgacagcggttcgtgcccaggccaggccatcggtgtcaaaacacggctagacaatggtgtcaccggcttcatccccaccaaattcctcagtgacaaagtggtaaagcggccagaagaacgagtgaaggtagaggactgattgtcctaaggtcgtagtgcaattttcagctgcccagatcaggtc

SEQ ID NO: 17617 - DNA, 2300 bp, Homo sapien
aatccgccctgtgtggtgatgcacgcctgtaatcccacctactcaggaggctgaggcacgagaatcggcttgaacccaggaggcggaggttgcagtgagccaagattgcgccactgcactccagcctgggcaacagagcaagactccatctcaaaaaaaagaaaaagattcatctgatggccagtggtgccaagcatcagctatgagacaagggactttgtagatggtcaaattctgtcttggcagatgactaagtcattgtgttttcagatcatggtgcaaggtgtcaatggtaaaagaaattacaacacctctgggagctcttttctgaatgagcgatctccagaatattgataatcaagctcttctcctcatgccctcttcaggtgtggaaccactttgacagcggttcgtgcccaggccaggccatcggtgtcaaaacacggctagacaatggtgtcaccggcttcatccccaccaaattcctcagtgacaaagtggtaaagcggccagaagaacgagtgaaggtagaggactgattgtcctaaggtcgtagtgcaattttcagctgcccagatcaggtctctttaactttgggctgtccccaccagaagttaggctctgttcccagtggctgctggtgggaagtgtttcagggaagatttataactagttgaaagaagctagggtgagaagcatttgaatgagtagcagcttttgttcactgcctttgtgaaatttcagcaagttcccagtcctttgggagagggctcttcctgtgtgggaagctgcagttcagtccagagggcagggcccagcattacatgctgtgaaacagaaaggctctgcctgttctcccaagaccaggcatcagcgctttagagggtgggaaataatgcatggcacagcccctgtgcacagggagcctctggatcctctaggcaggaccagatgacacagaaggaaccttgagatggtgtctgtggatagggaggaaatctctaggctccatttctgttctgttattttctggccatatatcatgcacccactagataccagcactgacatcgacatatgttgtctctaatctcacatgctgatggaaatggaaatattgtcttttgtcagagaaattcaacttttttcagaatcacccagttagtgatatagctgatagcagctctgcgaaattcactggttctgagtgttgtgaacctctgagaactatgacttaggagggctggggaaaaatagttctaataagtgaagctggggagatttttcacaaggagaagagtgatgcagagtgactggcttttgccactacttagacagaagggctcatatcaagggtaagatacagaaaacagctattattttgcttccccttcaaaaagggaagtcaggccaggcatggcagctcacacctgtaatcccagcactttgggaggccaaggtgggtgaagtcattacttgaagtcaggagttcgagaccagcctggccaacatggtgaaaccccgtctctacagaaaatacaaaaattagccgggcatggtggcacacgcctgtaatcccagctgctcgggaggctaagacaggagaatcgcttgaaccctgtgggtggaggttgcagtgagccaagatcacaccactgcactctagtctgggcgacgagtgagactgtctcaaaaaaaaaggagggggggtgttgggggagtcaacctttgatggcaccttgggagcagtaactaggcaacttcatgggagaagagaagagtgccagggacagggtagatccagcaggcttcagctggttttcctgcccagagtggaggcattagtgcagggcttggcctgtagtctacagacaagattccaccccaaactcccagtctgccattcagcagctggctggctttgggcaagtcactttacaccttacacctttctgcctggactttggttttctcatgggtgaaatagggcatcgggctagatcatctttgtcccttccagctcaaatgttctgtggatctaggtgggaatgactgttcactgccgcatcatgaagattgacattgagaagttcagtgcagacctgacctgccgcacctcagacctcatggacaggaacaatgagtggaagctgcccaaagacacctactatgactttgatgctgaagctgcagaccacaagcaggaggaggacatgaagcggaagcagcagcggaccagtgagtgtgcctcccaccatctctgtgcaccctgcatcttggcagttctcccagtgcaggat

SEQ ID NO: 17618 - DNA, 2300 bp, Homo sapien
gttccattcctggttccattctcaccaggatggttggtttttctgcacacttcccttctcctggcttcccctccctcgcagttcctagactctctagagctaccacgggaaggagggtctgggcagcagccctacccactccggacttgggtctggaggaaagtgaaggtggggatcaggcagagcaatagtagcagcagcagagcccctggatgatggtggagaaaacaaggtgtggaccccatcctttctcctcctcttcatcctggctttggaagctggtgccaagagaaatggaggggtgtggtgcatggaatgtcgtcgatatggccataacttcttttcacactctcctgtgattgttttttccatttctgttccctcgcagcactgggctcctcacccttgccttgcctgttaacagatgtgtgtgaagccagcaccacagtccaggtgtggtgtttgtgctgcaccgggtgtgggagttctgtgttccgtgtgcatgttgtattagtctgtgtgtggtgagtatattctgtgtgtgtgtgatatatgcatgcgcagagtgtgtatgttgtacctgagggcgtgaggggtgtcactgggatgaggttcctatgaatgcagcctgccctgttctccagattgtctatcaggataagcttacgactctctattgggcagtattgtctctagaatagggtgtcccctgggggccaggggcgggaacgctgcggggtggcgcaggggctgggagccgacatcaggtcctcagcccggagttaggtcttcggagaggcctgtgggcggagaaaggggaagcccgggctccaccagaggcggagggacctcgaagcccggaaggtggaggggaaatggcgacgccaggacctccctgggctcaggggatcctcccatctcagcctcccgagtagctgggactacaagtgcgcaccactaaactagctaatttttgtattttttgtagagatggggttcgctctctcgccagcgggcagaggcggggctgcggctgggttcccaagggtcggtggggcggggagcgggacgggagtgtgcggtttagagaatggccggggcggggctaagaatggggctgggggcaaggctcgttgtaacactaagaattggggctacgatctggaggcagggtgaaaatctggggtttggactgcaagctggaaccagagatgggtggtgagagctgggcctgtaaggttaaggtctgagataaagaggggcctgggaggcgccggaggccccggatgaagaacgcggctgacgctgagacccagctgggaagactacgcagcctggagccgggctggggaggccggcgggggctgcgccagcatgaggcggggttaggggctaggcgggggcgaagccgagactggagttcacggctgggccgagggctcggccgggctgaggctcagggttggacttcacgcaagagtcctgtagagacgaagacctgggcggagagcgatgtgggtcaggacgacgctcacaattgaaagatggactaaggaaaagaccgagcccaaggcccgctcgtgggatgagagcagatgccgcggtaagaggggcggggcaggggctgggcagagggcgcggcccggctcgcagaccccgagcggcgcacgcgggaagccggcaaaccgacgagggagacgggcaaaccaacgagagaggcggggcccagtgctgggccggggcggagctagggccggggcggagctagggccgggggcgggctcgcgtcgagccgcgggccaatgattgaggactggggtcctgaggccctgctgggtcgcccgcgggatgggcgggaagtctggttccagccagagctggaacgctcggctatcggactgggtggcaccgggcgcaggccgctgcccttgaagcgccggccttggctggagcccgtggaccagcgcccacccggacgccggggcgggagcgggcggttccatcgaccctgagggtggaccaaggagactgagggttccacccgtggcatcacaattacctccgcggcggcgaggccagagaggcatttccaaggagacgcgggcgcactgcccctcccttgcttcctcctcttccctccttcctctcctagtttcttccctcccttcccgccctactccttccctcccttcccaccctactcctttcggctgctctggtgcccacccccagtgcctcgaggtcgaggagagctcctcggccccgcaggacggggaggattctgtacagatgagcataac

SEQ ID NO: 17619 - DNA, 2300 bp, Homo sapien
tccaggcagggtgcggtggctcgtgcctgtaatctcagcactttgggaggccaaggcaggcagatcacttggattcaggagttcgagaccagcctggccaacatggtgaaacccgcgtcaccattaaaatccaaaaattaggccgggcgcggtggctcatgcctgtaatcccagcactttgggaggctgaggcgggcggatcacgaggtcaggagatagagaccatcctggctaacatggtgaaactaaaaatgcaaaaaattagccaggcgtggtggctggtgcctgtagtcccagctacttgggaggctgaggcaggagaatggcctgaacctggcaggcggagcttgcagtgagccgagatggcaccactgcactccagcctgggtgacagagcgagactctgtctcataaaaaaaaataaataaaataaaatacaaaaattagccgggcgtggtggtgcatgcctgtaactccagctacttgggaggatgaggcaggagaattgcttgaactcaggagttataaccattaacttttctttcttttttttttttgtttgtttttttggttgtttatgccattaacttttataagaaagaaaggtgaccaagaccctggctccctgttgacatctaacccagagttccagagtagctggaagcacctcagacatctgggtcaacaaaggaggacttatggcctcgtgtcatcctgggaggctaagggggtgtccaagttagaaggcagattctggctcccagttgccaagtgctctgtctgttccattcctggttccattctcaccaggatggttggtttttctgcacacttcccttctcctggcttcccctccctcgcagttcctagactctctagagctaccacgggaaggagggtctgggcagcagccctacccactccggacttgggtctggaggaaagtgaaggtggggatcaggcagagcaatagtagcagcagcagagcccctggatgatggtggagaaaacaaggtgtggaccccatcctttctcctcctcttcatcctggctttggaagctggtgccaagagaaatggaggggtgtggtgcatggaatgtcgtcgatatggccataacttcttttcacactctcctgtgattgttttttccatttctgttccctcgcagcactgggctcctcacccttgccttgcctgttaacagatgtgtgtgaagccagcaccacagtccaggtgtggtgtttgtgctgcaccgggtgtgggagttctgtgttccgtgtgcatgttgtattagtctgtgtgtggtgagtatattctgtgtgtgtgtgatatatgcatgcgcagagtgtgtatgttgtacctgagggcgtgaggggtgtcactgggatgaggttcctatgaatgcagcctgccctgttctccagattgtctatcaggataagcttacgactctctattgggcagtattgtctctagaatagggtgtcccctgggggccaggggcgggaacgctgcggggtggcgcaggggctgggagccgacatcaggtcctcagcccggagttaggtcttcggagaggcctgtgggcggagaaaggggaagcccgggctccaccagaggcggagggacctcgaagcccggaaggtggaggggaaatggcgacgccaggacctccctgggctcaggggatcctcccatctcagcctcccgagtagctgggactacaagtgcgcaccactaaactagctaatttttgtattttttgtagagatggggttcgctctctcgccagcgggcagaggcggggctgcggctgggttcccaagggtcggtggggcggggagcgggacgggagtgtgcggtttagagaatggccggggcggggctaagaatggggctgggggcaaggctcgttgtaacactaagaattggggctacgatctggaggcagggtgaaaatctggggtttggactgcaagctggaaccagagatgggtggtgagagctgggcctgtaaggttaaggtctgagataaagaggggcctgggaggcgccggaggccccggatgaagaacgcggctgacgctgagacccagctgggaagactacgcagcctggagccgggctggggaggccggcgggggctgcgccagcatgaggcggggttaggggctaggcgggggcgaagccgagactggagttcacggctgggccgagggctcggccgggctgaggctcagggttggacttcacgcaagagtcctgtagagacgaagacctgggcggagagcgatgtgg

SEQ ID NO: 17620 - DNA, 2300 bp, Homo sapien
gccagtctcagggaagaggattgccatgccaggaggcaggaacgctgccaagaggaaagaacacatttggattgactcgggagttagatacagctaagttctagagtgctggagcaggatttgctcggtcgaactgaggtccagagaggaatgtggtttatcaataacacagtgatttggtggcagaaaaaaatcaagtcagggccgggcgcggtgactcacgcctgtaatcccagcactttgtgaggccgaggtggacgaattgcttcgagcccaggagttcgagaccaccctgggcaacacggcgaaaccctgtctctacaaaagaatacaaaaattagccgggcgtggtggtgcgtgcctgtagtcccagttccttgggaggctgaggtgggaggatcgcttcagccctggaggtcgaggctgcaatgagccattccagcctgggtggcagagtgagaccctgtctcaaaataaataaataaataaataaataaataatcgagtcacgagggggaagtgtcagaggaagtacaaggcggccacacctgcccctctttacctgcgacactgatactgtcaagttttactgcgtttcctgataatgcatttgaagttctatgaaaattccacacatttctccaagattcgctagtttttccggttagtaacttcactcacaatcccctgccctaaactagtcttcccttccgtgtcctggtcatctttacatcctcaaattcagctccagacacagagaaaggtttcttaacactcaggttcgcttctcctaaggtgtgtgcctaacccatccccacttgatcctttcttcttccctctcccttcataaaaccagacatgtcccctttgacggtgaaattgattgtgcactgccccctcttctatcctgcaggactttgcacaaaggagttgtccctgggggatagattccaatggggccagaacaatgaacacccataccagaggggagtccccgcctcccagagcggagaccaccccgaagagcagagtttccgggtccacttagcccttctttaacctccctcgagggaacttgatcttcagccctcccacctcacaatctacacagcagccttgaaggaaaagacgccagacttcagacgtctctctcctcggtgggcacctcattctaaccctggcacccccttcgcacgcttcccctccaccatcctcacccccgacctcccagggcagaagggcgagagggggcagactctatgagtcacctcccaggcctggagttgaggagggaagcgccgcctctccttgggccccttctctccccctttcccctccctgctggttcctggcatcgccagatgctgcgcagcagtctccgattccccatcaccaattcggctgggtaagggtccccatgaaggcgcagccgggtatagaggtgcaggggagagcagcctggggagtccctatctggataggctccagcctgggtcggggcggtcctggtgcccggtgaagcgtcaaaagagggagcctgagcggggcaacgcagaagggtggagaggagggggtggcgagggcgggcagcgaggcctggagccgccaggagaggggcggggggcggcccttctccaggaatttccggggatcgtgttacagcgttggcggagcccgagcggagtgggactcgaggccctgtagccggactgggcccctcgccccctcctccagcggcctgcgggccttggcagcgccgcccctgcccacactgaccccgtgtggcggggccgctccgcgcccccgggccgctctgtaatggtagggcagcctcagccccgagatgacgtcgggtctccgcggccccgggttattgtaggaaccatccggccccgcgtaatcgtaggaactatccggccccgcgtaatcgtagggtctgcgcgggcccggcccccaccagacgggactccccgcccccaattggcggccgaagagtctcctcgccccagagtcatcttcgggacgcccagggcccgggtgattttgggctcgccgcggccccgggtgattgtttcatctccgtggcccgcggtggtcgtagcgtctccgagaccgcggactcccgtagggtccccgtggccccgagttgtagtcgggacaccccggccgcgggtgatcgtcgggtctccacgcgcccgggtcgctgacgcggatccggcctcggcgccttctcagggcgccctgcaaggccgcaggcaggatgaacattctggcacccgtgcggagggatcgcgtcctgg

SEQ ID NO: 17621 - DNA, 2300 bp, Homo sapien
tgccaaggcccgcaggccgctggaggagggggcgaggggcccagtccggctacagggcctcgagtcccactccgctcgggctccgccaacgctgtaacacgatccccggaaattcctggagaagggccgccccccgcccctctcctggcggctccaggcctcgctgcccgccctcgccaccccctcctctccacccttctgcgttgccccgctcaggctccctcttttgacgcttcaccgggcaccaggaccgccccgacccaggctggagcctatccagatagggactccccaggctgctctcccctgcacctctatacccggctgcgccttcatggggacccttacccagccgaattggtgatggggaatcggagactgctgcgcagcatctggcgatgccaggaaccagcagggaggggaaagggggagagaaggggcccaaggagaggcggcgcttccctcctcaactccaggcctgggaggtgactcatagagtctgccccctctcgcccttctgccctgggaggtcgggggtgaggatggtggaggggaagcgtgcgaagggggtgccagggttagaatgaggtgcccaccgaggagagagacgtctgaagtctggcgtcttttccttcaaggctgctgtgtagattgtgaggtgggagggctgaagatcaagttccctcgagggaggttaaagaagggctaagtggacccggaaactctgctcttcggggtggtctccgctctgggaggcggggactcccctctggtatgggtgttcattgttctggccccattggaatctatcccccagggacaactcctttgtgcaaagtcctgcaggatagaagagggggcagtgcacaatcaatttcaccgtcaaaggggacatgtctggttttatgaagggagagggaagaagaaaggatcaagtggggatgggttaggcacacaccttaggagaagcgaacctgagtgttaagaaacctttctctgtgtctggagctgaatttgaggatgtaaagatgaccaggacacggaagggaagactagtttagggcaggggattgtgagtgaagttactaaccggaaaaactagcgaatcttggagaaatgtgtggaattttcatagaacttcaaatgcattatcaggaaacgcagtaaaacttgacagtatcagtgtcgcaggtaaagaggggcaggtgtggccgccttgtacttcctctgacacttccccctcgtgactcgattatttatttatttatttatttatttattttgagacagggtctcactctgccacccaggctggaatggctcattgcagcctcgacctccagggctgaagcgatcctcccacctcagcctcccaaggaactgggactacaggcacgcaccaccacgcccggctaatttttgtattcttttgtagagacagggtttcgccgtgttgcccagggtggtctcgaactcctgggctcgaagcaattcgtccacctcggcctcacaaagtgctgggattacaggcgtgagtcaccgcgcccggccctgacttgatttttttctgccaccaaatcactgtgttattgataaaccacattcctctctggacctcagttcgaccgagcaaatcctgctccagcactctagaacttagctgtatctaactcccgagtcaatccaaatgtgttctttcctcttggcagcgttcctgcctcctggcatggcaatcctcttccctgagactggcagttgctcaagataggaagctcccgggaccagacccgagcgccagccggctacgccgtccgctggcctgagcaaataaacgcgtgtcttcaaaaaactacaatccccatggtggcacgcgcctgtagtcccagctactctggtggctgaggcaggagaatggcgtaaacccgggaggcggagcttacagtgagccgagatcgcgccactgcactccagcctgggcgacagagcgctcaaaaaaaaaacaaaaaacaaaaaacaaaaaactacaacccccatgaagctttagtgcctttgaggggaggagtggcgcatgtttgttcacgcacgaaaaagaaattaaacctaactaccgttcccagagggcgccgctctgcaaattacccaatcagctctaagtacaaagcatcgcgagtctttagtgctctttggcgctataagcccgtgggaacgagcattggagacccttttcacaagatggcgccgaaagcgaagaaggaaggtgtgtgttggtgatggggccgcagctggtttaccggggattg

SEQ ID NO: 17622 - DNA, 2300 bp, Homo sapien
ccagaaccgaatgtctggccctccctggcggatgatgcctgccgcgttgcccccccccaactccctctaccggaactcagcccacgaggctgggcccacgcggcccacgtatactgcagcgtgtccgaaacgcagggagcagccccggagcagagccctcagggcttagcccagcagccgtgttcccaattcgttcgctctgcggcgcggcaatccccggtaaaccagctgcggccccatcaccaacacacaccttccttcttcgctttcggcgccatcttgtgaaaagggtctccaatgctcgttcccacgggcttatagcgccaaagagcactaaagactcgcgatgctttgtacttagagctgattgggtaatttgcagagcggcgccctctgggaacggtagttaggtttaatttctttttcgtgcgtgaacaaacatgcgccactcctcccctcaaaggcactaaagcttcatgggggttgtagttttttgttttttgttttttgttttttttttgagcgctctgtcgcccaggctggagtgcagtggcgcgatctcggctcactgtaagctccgcctcccgggtttacgccattctcctgcctcagccaccagagtagctgggactacaggcgcgtgccaccatggggattgtagttttttgaagacacgcgtttatttgctcaggccagcggacggcgtagccggctggcgctcgggtctggtcccgggagcttcctatcttgagcaactgccagtctcagggaagaggattgccatgccaggaggcaggaacgctgccaagaggaaagaacacatttggattgactcgggagttagatacagctaagttctagagtgctggagcaggatttgctcggtcgaactgaggtccagagaggaatgtggtttatcaataacacagtgatttggtggcagaaaaaaatcaagtcagggccgggcgcggtgactcacgcctgtaatcccagcactttgtgaggccgaggtggacgaattgcttcgagcccaggagttcgagaccaccctgggcaacacggcgaaaccctgtctctacaaaagaatacaaaaattagccgggcgtggtggtgcgtgcctgtagtcccagttccttgggaggctgaggtgggaggatcgcttcagccctggaggtcgaggctgcaatgagccattccagcctgggtggcagagtgagaccctgtctcaaaataaataaataaataaataaataaataatcgagtcacgagggggaagtgtcagaggaagtacaaggcggccacacctgcccctctttacctgcgacactgatactgtcaagttttactgcgtttcctgataatgcatttgaagttctatgaaaattccacacatttctccaagattcgctagtttttccggttagtaacttcactcacaatcccctgccctaaactagtcttcccttccgtgtcctggtcatctttacatcctcaaattcagctccagacacagagaaaggtttcttaacactcaggttcgcttctcctaaggtgtgtgcctaacccatccccacttgatcctttcttcttccctctcccttcataaaaccagacatgtcccctttgacggtgaaattgattgtgcactgccccctcttctatcctgcaggactttgcacaaaggagttgtccctgggggatagattccaatggggccagaacaatgaacacccataccagaggggagtccccgcctcccagagcggagaccaccccgaagagcagagtttccgggtccacttagcccttctttaacctccctcgagggaacttgatcttcagccctcccacctcacaatctacacagcagccttgaaggaaaagacgccagacttcagacgtctctctcctcggtgggcacctcattctaaccctggcacccccttcgcacgcttcccctccaccatcctcacccccgacctcccagggcagaagggcgagagggggcagactctatgagtcacctcccaggcctggagttgaggagggaagcgccgcctctccttgggccccttctctccccctttcccctccctgctggttcctggcatcgccagatgctgcgcagcagtctccgattccccatcaccaattcggctgggtaagggtccccatgaaggcgcagccgggtatagaggtgcaggggagagcagcctggggagtccctatctggataggctccagcctgggtcggggcggtcctggtgcccggtgaagcgtcaaaagagggagcctgagc

SEQ ID NO: 17623 - DNA, 2300 bp, Homo sapien
tgtttgcctggggagggacgggggaaatcccaagtcgtgcaagttgattcacctgaagaggacatgacacggtctcgggccgtcccgactagtgagcgccgcgctcgtcagcactctcaactcccctttcacacacgcgctgcaggagggtaatctgccctcagtgctcatcttcccatgggggaagatgggggcggtagtgggtcagtacctgaaagcatcaaggggagaaggaaagaccgcggtttcgccgaaatgagctcaaggcaaaagcctagaggcagggggctggttagtgtgaccagctaggctctttaccggaagtgaggttaattccaggttctcccgggctcctgctctgcgggagctctagaaaaactcagtattcggccaggcgcggtggctcacgcctgtaattccagcactttggggaggccgaggcgggcggatcacctgaggtcaggagtttgagaccaacctggccaacatggtaaaacctcgtctctactaaaaatacaaaaattagttgggcacggtggcgcgcgcttgtaatcccagctactcgggaggctgaggcaggagaatcgcttgaatctgggaggcggaggttgcagtgagccgagatcgtgccattgcactccagcctgggcgatagagtgagcctccatctcaaaaaaaaaaaaagaaagaaagaaaacatcagtattcaggaggaggatggtcactagctgaaggttagcgtccctgtatcagagtgggcaaggggtgtgaggaaaggggcgttttatcttctgcccctgtcctggctctcgcaagggtatccaaacccacccacgtggaatgactgctggaagggcgctggctcaggccggtgtcggccggcggacagagcagctctgtgagccaaggggaggggcgggaaagccgctcacccaggacacccgtgttctcacctagaaaccgactgggctttggttgacttaagagtcccacaggggttaatgtgtaaccttggagccataggggaggaaaacactcaaacggcttggtccctgggtccttgcgcctcaggttttctcggcttcttcctcccgcccgcagcacctttcccctcccccgcttcttcccgcccctcctctattactaccctcttctccctccccgctctcatctccgcttaacttccctcgctggctctcagctgctcctcctttcgcccagagtttatacctaaactctccccgaaagcagctgcctcgctcggaggcgggagggggagcccgcgccacagtgagggcaggctgacacctagtggctaggagccgcaactgctgcaagctaccggcttggagagcgcgggtcactccagctgtcccggcaaatcggaggtcttgcttgcccagcctccggggagccgggccgagggccgggactgtctgagggaggactgtgacagccgcccggccccaggagtttaagagccggcgggaagaggtggcgatgggttactcagcagttcccaagtgcccacctcgcgggcgcgggagggacaggtaaacacgggactccggccagaagactgcgagtggtgcggtaggggcactgggtctgcacggagaccactgtcggacgcggggctccggagcccaccccaggaccaggacttagggggcgtgggcgtgtcgggtcccgtccagctctgcgcagaaagtagagggcggagagagctctcgcggtacccgcccagggcggggtagccggtggcccggggaaaagtggggacgcgggttaatgaggccaggcgagcgagggcagcggggactccgtcggcagtcgggaggcgccagcgaggggtgtctcggcgacgacgcccccagcacagctcctagttacccgaagtccgcgggagccggccggtggccgagaggccacggggacacccggctcgcgcggcagcagcgcctgaggggcgggggcaggcggacggggcgggggcaggcgggcggggcgggggcgcgggcggctgggggcgggggcagaggcctcgcagggagggcgaggaggagccaaggggcctagagggcttcgccaactgtgtggggctggcggccggcgggagaggcggccggcctggactggcccgagagggatcccggttcccagaacagacctaggaggcggcctcgagggcggacggcagggagggccagcatgccccgactgctgcaccccgccctgccgctgctcctgggcgccacgctgaccttccgggcgctccggcgcgcgctctgtcgcctgcc

SEQ ID NO: 17624 - DNA, 2300 bp, Homo sapien
accgcaccactcgcagtcttctggccggagtcccgtgtttacctgtccctcccgcgcccgcgaggtgggcacttgggaactgctgagtaacccatcgccacctcttcccgccggctcttaaactcctggggccgggcggctgtcacagtcctccctcagacagtcccggccctcggcccggctccccggaggctgggcaagcaagacctccgatttgccgggacagctggagtgacccgcgctctccaagccggtagcttgcagcagttgcggctcctagccactaggtgtcagcctgccctcactgtggcgcgggctccccctcccgcctccgagcgaggcagctgctttcggggagagtttaggtataaactctgggcgaaaggaggagcagctgagagccagcgagggaagttaagcggagatgagagcggggagggagaagagggtagtaatagaggaggggcgggaagaagcgggggaggggaaaggtgctgcgggcgggaggaagaagccgagaaaacctgaggcgcaaggacccagggaccaagccgtttgagtgttttcctcccctatggctccaaggttacacattaacccctgtgggactcttaagtcaaccaaagcccagtcggtttctaggtgagaacacgggtgtcctgggtgagcggctttcccgcccctccccttggctcacagagctgctctgtccgccggccgacaccggcctgagccagcgcccttccagcagtcattccacgtgggtgggtttggatacccttgcgagagccaggacaggggcagaagataaaacgcccctttcctcacaccccttgcccactctgatacagggacgctaaccttcagctagtgaccatcctcctcctgaatactgatgttttctttctttctttttttttttttgagatggaggctcactctatcgcccaggctggagtgcaatggcacgatctcggctcactgcaacctccgcctcccagattcaagcgattctcctgcctcagcctcccgagtagctgggattacaagcgcgcgccaccgtgcccaactaatttttgtatttttagtagagacgaggttttaccatgttggccaggttggtctcaaactcctgacctcaggtgatccgcccgcctcggcctccccaaagtgctggaattacaggcgtgagccaccgcgcctggccgaatactgagtttttctagagctcccgcagagcaggagcccgggagaacctggaattaacctcacttccggtaaagagcctagctggtcacactaaccagccccctgcctctaggcttttgccttgagctcatttcggcgaaaccgcggtctttccttctccccttgatgctttcaggtactgacccactaccgcccccatcttcccccatgggaagatgagcactgagggcagattaccctcctgcagcgcgtgtgtgaaaggggagttgagagtgctgacgagcgcggcgctcactagtcgggacggcccgagaccgtgtcatgtcctcttcaggtgaatcaacttgcacgacttgggatttcccccgtccctccccaggcaaacacgaaaccaaccctgctgccttctcccaggagcgctggtctcggtcgttttgggtgtgtttatcgtttgcgtgccaaggagaacccgctttctcctgaaatagcgtcactcgtgggcaagaagggggtcaatcttctcttcccaccccttcccggcctgtggggtttaactctcgggaacgcgacatccttttagtctagcaagctttacaagggctgggtatatgtgtgggaggggcgggtaccgtgcccgccattgcgggcgcgccctattttcttgccctattcttggacactgcgtggggcagggtcgtgaggggaaaagtgacggcgtgtcgcagcgggaggtgtgtggtgcaggcccacaaatacggacgcgtggcggaacccacacctagggcgctggctccgccccgcaagccgctcgccgtgaaggggcggggcccagagtgggtgggtccgcgcacgcgccgcgtgggggacggaagtgaaactctaagaaatgagatggagaagtacgagcggatccgagtggtggggagaggtgccttcgggtgagccagggctctgggggaggaaactgctaggggatagggaaaataagccccaattccgcccgcgaagtcgccgcccgcctaatcccgccccaaggcgtgagcgccactctgggaagccccgcccaagcttccggtcccagtcccccgggg

SEQ ID NO: 17625 - DNA, 2300 bp, Homo sapien
cctcagaagctgcaagggtttctcttcggtaccctccagcggtcacagatgagccggtccccccctgaggcacccggattcacctctggaccaccctgatattgcttctcctctgaatgctctgaaaagtgcaggtgcccaaggcatgacttgcagctgtctcctggattgtgtcatcatggggtatcagggctggcaaaacccctgctctgcttttggccttggatatggaaacctcaaccactttgttctcctaccacctctttgcccttcctaccccttcctcccttcagtcagtgtccccagggtccagcctggctagagttagaaggcagacctagcctttggaagcagggtggcctccagagccttgccataaaaaggctgaaggcagccgggcgcagtggctcacgcctgtaatcccagcactttgggaggctgaggcgggcggatcacgaggtcaggagatcgagaccatcctggctaacgtggtgaaaccccatctctactaaaaatacaaaaaaattagctgggcgtggtggcacgcgcctgtagtcccagctgctcaggaggctgaggcaggagaatggcgtaaacccctccagcctgggcgacagaaccagactccgtctcaaaaaaaaaaaaaaaacaaaaaaggctgaaggcagctgtagctccacacagaccctaccctttcccctagcccagttagaaaataagtctgggccggcggcggtggctcacacctgcataggcagtgctttggccaggaggatcccttgatcccttgtggccaggagttgggagaccagcctggggaccatagcgagaccgctgtctccaccaaaaaaaaaaaaaaagaagaaaataaggctgggtgcggtggctcacgcctgtaattccagcactttgggaggccaaggcgggcggatcacttgaggtcagtagactgaggccagcctggccaacatggtgaaaccccgtctctactaaaaatacaaaaattaaccaggcatggtgacgggcgcctgtaatcccagctactctggaggctaaggcaagagaatcccttgaacccgggaggtgaagtttgcagtgagccgagatcgcaccactgcactccagcctggatgacagagcaagtctccctctcaaaaaaaaaaaaaaaaaaaaaaaaaaaaaagtatttggtgcttaccgggactctatctccatactttggagcagggcaagccagggcctgcctggactggccattaggcctgcctagcttctgcatagcccggggctgggcggtccccgggagtgctgccacctcccctacactttcatcctgaggcaggatttgctagacgtcggcttgcctctcttccccagcaggagggcaggagtcactaagtgctgcagaaaagatccgcgctggagattgcccgtcccccccatgcctttccccagaaacagttgagagaatgggtagctggtgggaccagaccggtttcccagaggacaggaaggccaataaaaatatcagctgcctgcctggagtgtggtgtcttcaagggtgggggtggcgaccaggcaccccaggactgggctgggcccgacctcggtggcagggctgcggccaagggaggaatgtgggcgcagccggaggctggggccgaggttcctctggcccagcgcccagtccagcctccccgccccagctgggctccccggagctggttgccaggcttcggctgcctagcacctggaagctggggccacggttcctgggctgctcacggccccggaggccgagctgttgcctctggagaagaaaacctttgtggcgcggcccgtccccttttccgacccgcacttccccggggcccgcgggctctggggagaagcggagccacgatctctgtcccccaggggaaagaaaagcccatgatcccgtgggtgggcgagactggcggtcaccagacccaaaaaccatgcactcgggggtgggcggggccgcgagggcgcgcattaggaccgcgcggccgcggtccgccctctcttccggagggcgggcttcacagccgagccctggccgcgaccgccagtcggcgccgcccggagccgggagcgccgctccagcgaggcgcgggctgtggggccgccgcgtgcctggccccgctcgcccgtgccggccgctcgcccgccatgcctggcttcgactacaagttcctggagaagcccaagcgacggctgctgtgcccactgtgcgggaagcccatgcgcgagcctgtgcaggtttccacctgcggcca

SEQ ID NO: 17626 - DNA, 2300 bp, Homo sapien
ggcagacacaccccttcagtgcctgtggttgtattgtccttggcattgaagcatggccagtggtagtgggatcaaggggaggaggtgggtgctagaaatccttggggcagttggggcatggactgcctgggtcctggagagtgcctctagaactgggctcccatgtgggctctggttccgcctggatccctgcctgccttccacctacctgactcagacctgccaggaatgccctgccccagggccctgagtcctgctgggtgagccattgctctgcctgagccatgccaggcatgtgtgactggccctggctggggtcagcaagggcatgtcgacagaaagaagcatgccaacaggctccttgggtgctgacggccaggtagggtttggtgcaggagaaggcgggcagctagcaggaggggacggtcaccaggcttcagaagcccactgagcagtgcccagagtcttagctgtgcttgctggacatttttccttgccccagcttctcttccttgtgtgtgtggtgtagtagagcctgtctgagctgtggagtcagacacacatagccaggtgctgcttcacctgtaagcctcttcgtttcatctgtaaaatgggggcattccaccccttctcagaggcaggtggcaagggccgggtgggaatgtaaacaggtgccaaggagcatgcctttcctccccttttctgtgggagacacaccctcaaaggagcagggcagggtaaggtggccgcaagctgacctttgccctggttcttggcagaggaccttcctggggactgggcagccttcgcacttaatctcagcccatccctgttccccctcccagtcagctttcagcgcagccaatgaaaactaacctagggggagggggtgactgtgcagcgtgttcctttcccagtccagctgccatcctgggggagggggtgccagctgccacctgttggccaagtcctgactgaggcagctgtctgtgcctcctctaggcccagaccccccttcccaggacaggggctggggtcttctgggatcctggggaagtagagcccctcaggcctctgcttgcccttttgtctcatctaggctggttgggaaccggtctggtgaggaagggaggctgcctcagtggagggggtggggccaggcctccctttcccctaatgagaaacctttttcctgcccctcccccatttcagtgaaggagtcttcaagtgccctgaggaccagcttcctctggactatgccaaggtgagtccacactgccaggaagaagcccaagcacagtctgttgcccttggaggccggagctgctggcagccagtgggctcagggccagtgtcaaccaaaagccttgggatggtgcgcctccacaaaggtagcctgttccctcccaccaggccagtttgcaaacgaggcccctgtttgccctggagggcatgcacaatgcccagcctgtaggggtgcacagagctgctctgtgcccgcaagaagtgttccctccccttccggtggcaagccagacctgtggctgagggccagtatccctccaccaggggaaaggaagcagagccccagggacagcctgggattgagcaggctgattggctgcctcttcaaaggaagcgtcctgtgcaggcatgttaggacccagcatcagagcagatgctgcctgctgtgcccttcatccctggactcaagaggggcaaagagcccaagagaggctattacaggctccaaggtagagccagcccagttgggtctaggggtgggaactgggcactgcagtcagctctgaccctggccagttcccccatccctacccccagatctacccagacccggagctggaagtacaagtattgggcctgcctatccgctgcatccacagtgaggagggctgccgctggagtgggccactacgtcatctacaggtgaggctctgatgtgagggctggcaccacctctcccttggcaggcactaattgcagccttcccaccagggccacctgaatacctgcagcttcaatgtcattccctgccctaatcgctgccccatgaagctgagccgccgtgatctacctgcacacttgcagcatgactgccccaagcggcgcctcaagtgcgagttttgtggctgtgacttcagtggggaggcctatgaggtgggtggggtctggctgaatgtggaggagggggtacctgatggcctaggcatctcttaactcagcacctctgacatttccagagccatgagggtatgtgcccccaggagagtgtctactgt

SEQ ID NO: 17627 - DNA, 2300 bp, Homo sapien
attacaccacagcatctcaccactgcactccagcttgggaaacagagcgaaactccgtctcaaaaataaataaaataaaaacaggcatgtcatacagctccttttccatcttccaggagtactgaggttgttatatatgaaatgttttgagttccaaggtagcctagactgcttaattttaaagttttgttttgttttaaattatagtagtgttcggggggattaagcagtgttgtagagtgtgatgtagatatttaatgttatgcacttgcaagaacgctgaataaaaatgacattctaggtaatagcttgcctttcctgacccccgttttctttttcttttctttttttttttttggagttagagtcttactctcactcaggctggagtgcagtggcacggtctctgctcactgtactctgccaagtagctgggactaccgtgcgagttaccacgcctagctacctctaaaatttgtggtagaggtggggttctcaccaggtcaccatgttgaccaggctggtctcgaacacctgggttcaagtgatctgcccacgttggcctcccaaagtgctgggattacaggtgagacacaccgcgcccggccagttttcttaaatgagccccatgtagtgctctatcactacaccccagaaaatataccacagtgtttaaaatgtcctattccatgccgggcgcggtggctgacgcctgtaataccagcactttggaaggccgaggcgggcggatcacgacgtcaggagatcgagaccgtcctggctaacacagtgaaaccccgtctctactaaaaaatacaaaaaaaaaaaaaaaattagctgggcgtgatggcggccacctgtagtcccagctactccagctacttgggaggctcaggcaggagaatggcatgaacctgggaggcggagcttgcagtgagccaagatctcgccactgcactccagcctgggcaacagagcgagactccgtctccaaaaaaaacaaaaaaaaaagaaacaactgtcaaaatcaggaaagtaacattgacacattacttccatataattatcagatcctcttcaactgttgcttattattataccagttatatactttatagcaaaaaggatccaggtcagaatcacacattgcatttatttttcatgttgtcttagtctcctccagtctggttgctgagagtatgttccccataatattaggtatatgactgaacaaggattaggtgtttgcttcctaattgtactgaaacctgctaaaggaattgttatcttgggatttaactggattggatacatccagctaaatacattggatgttttgtatctgaaacaggttggagccaactatgtgtgttttttttttttgtatgtgtgtgttttttttttttttgtgtctgatgatttcatgtattcccttctccaccccaccaacttctagatacatactttcccaacatgcctccaacgcccccccctcccccccccccccccccccgcttaatttctgcgtcacgggaagcacgagtttccgacagggaggattgatgtgtgcagttgatttaatatgcaatcctaaatccgtccactgttacagtgcagtgcagttgattagactagaggcagagaggcttggggagcatctttttactgtcgagtgtctccaggtggcaattgctgttgaagtctgaggcactctgggaggtatcgcgtgggtgggggggggtctcctagtacccaggcagaaagtgggaggggacaaggggacagagggagaaggggtgcaaaggggcgcagcttcacctggcccagctacgggatgcttggctcctggctttggggtaggggccgggagagatgggggcagcgctaacaaagaggagccgagtcgggccgggtccgcgggtagcgggcctatcccggtggctgacctccctgtgggcctccccagttggctgtttggcgagtcgctctgctggctccctggctcgccattggctgtgcagacaggagagggctcgcgaagagccagggtggaggtgagggggcggggctggcttccggcggcggctgggagcaagcggcagccggctgggggagggggtgtcggcgcaccgcggagtcctgcgctccgtgagcctggcacccggagcagccgcctccccctccccctgcctagaccgctagaagccccctctcttccatcctcccggggcgggggtgagctgggctcagctgcccaaggcgggcggggcggagccaggagccccacggagcgctgcgga

SEQ ID NO: 17628 - DNA, 2300 bp, Homo sapien
tcaccgtgttggccaggctggtctcgaattcctggcttcaagtgatccgcccgccttaacctcccaaagtgctgggtttacaggcatgagctatcttgcctggccactattttttagattttttgtagagatgagtctccctatgttgcccaggctggtctctaactcctgggctcaagcaatcctcccaacctggcctcccaaaatgttgggattacaagcataagtcactatgcccagctttatttttaatttttttttcttttgagacggagtctcgctctgtcgcccaggctggaatgcagtggcttgatctcggctcactgcaagctccgcctcccgggttcacgccattctcttgcctcagcctcctgagtagctgggactacaggcgcccgccaccacgcccggctaattttttgtatttttagtgagacggggtttcaccgtgttagccaggatggtctcgatctcctgacctcatgatccgcccgcctcggcctcccaaagtgctgggattacaggcgtgagccactgcacctggcctatttaaatttttttaacattcctcattgagcactcaacttgtctttttttcttctctttttcccccttacgttgtatcttgggccttatgtgtccaaactctgaagagaggagaccagcgctggagttgagagagaaaaaagagccatggtgatgaggagagagtttagtcctgtacctcctcttgcctgctgctttcaagtctgttttgttgaattctcaggactcgattgagcttagtctcttgtcaggctatgccaaagcagcacagtagtctagggactgacagttgggcctcactggactttagtggttttcttttaccagtttgaaaaagggccaggctcacagtgagagctggaaagcaggggactatttgcctgcgaattcctcaatagcatacacgcgatgcctagaacatttctgtccaataaacagcatgtgcttgataaacatactgaacttagcggtgtccccagtgcattctaggcgaggtcacctccttgacaaggtccccaggacttcattgcacctcctagctagtagcgtattctaggatggcaaagctgcctttacataattacccccgatacattctagacacgatcatcttgaaagagacccaaattttaccaggcatggtgactcaggcctgtaatcccagcactttgggaggccggggcgggcgaatcatctgaggtcaggagttcgagaccagcctggccaacatggtgaaaccccgtctctactaaaaatacaaaagttagccaggcgtggtggtgcaagcctgtaatcccagctagtcaggaggctgaggcaggagaatcgtttgaacccgggaggcggaggttgcagtgagctgagatcgcgccactgcactccagcctgggcaacaagagcaaaactccgtctcaaaaaaaaaaaaaaaaaaaaaagacccaggctgggcgcggtggctcatgcttgtaatcccagcgctttagaaggctgaggtgggtggatcacctgaggtcgggagttcgagaccagcctgaccaacatgataaaaccccgtctctactaaaaatacaaaattagctgggcgtggtggtgcatgcctgtaatcccagctactcgggaggctgaggcaggagaatcgcttgaacccgggaggcggaggttgtttgagccgagatcacgccattgcactccaacctggacaacaagagcgaaacttcgactcagaaaaaaaaaaaaaaagacccaaatttatcatcagtggtcacctcagagcacctgaattcaggcctttaagtgcaagtaggatgcagaattctggaagagccagtaagtctgtggctccttggggaagcgcgatccaagggtttagtaacctaggcacggtactccagaggcgtaccctgaggcagccgccaaattctctaagcctcagaattcttcaaggccagctcccatgtccactagagacccaggggtccagaccatcaggcactgaggaagacgcccccggcaggggctgcgcaggcgcgtgcggcccgaaagggcccaggcgctacacgctgcgcaggcgcaggagcggctccgggtagtccccacagctgcgccggtgactgaggggccgggcagtggagaagtggtggcggcgggcggcgggcggcaaaggagcagccatgagggccgggcccagtcaccgaccgtgagtagtggtggagggggagtggacaacgcgtgggaagagggtaacttagcggaag

SEQ ID NO: 17629 - DNA, 2300 bp, Homo sapien
aaaaattagcactgggcgaggtggctgacgcctgtaatcccagcgcattgggaggttgaggtgggcggatcacctgaggtcgggagttcaagaccagcctgaccaacatggagaaaccccgtctctactgaaaatacaaaattagccgggcatggtggtgtatgcctgtgatcccagctactcgggaggctgaggcaggaaaatcacttcaacccgggaagtagaggttgcagtgagccaagattgcaccattgcactgaagcctgggcaacaagagtgaaactctgtctcaaaaaaaaaaaaaaaaaagaattactaggcatggcagcggcaggtctgtagtcacagctactagcagggctgaggtgggaggaacgcttgagactgggaggtcgaggctgtagtgagccatgattgcaccactgcactccagtctgggtgagagagcaagaccctgtctcaaaaaaataaaaataaaagaaagaatgggagaagagaaattgaggatagccagaatatacagtggtgtcttcccagggaatttagataccataatttccaccctcccatcctatggataccaaaatctgctgattctcttgtagtaagagatgactttaagtcatcttaaagtctctagattacttataatatctaatacaatgtaagtgctatataaatagttgttatactgtattgtgttgtatttttgttgctattgttattttagagatggggtccctgaaatcccgtgatagagatttctgtctgttttgttcactgatgtattcccagcacaggacagagcttgctagtggatgctttatacatcttcctccatagtcaggcatgttagcatgtgcctgtagtcctagctactcaagagggctgaaactggaagatcgcttgaacccaagagtttcaggctccagtgagctatgatcatgccactgcactccagcctgggtgacagaatgagcactgactctaagaaccttccttcctcaacaccccctctaccaaagtttatctctgtttcttttttttttttttttttttgagatggagtctcgctctatcgcccaggctggagtgcagtggtgcaatctcagctcactgcaagctccgcctcccaggttcacgccattctcctgcctcagcctcctgagtagctgggactacaggcgcccgccaccacgcccggctaattttttgtatttttagtagagaccgggtttcaccgtattagccaggatggtctcgatctcctgacctcgtgatccgcccgcctcggcctcccaaagtgctgggattacaggcgtgagccaccgcgcccagctctctgtttcaagtgtttgatttagaggctacaaaggatgaagagggctcaaggcctcaaacagagcaaggtaaatgagtttctccggctgctagagcggtctaggagaccttaggtggctaagccacttcttcctcctttgcaaaccctctggttgttctccataaaggaatgacctcagatagtagacagtagccaaggcttacaggagggaaatccagacctgctcttcatcccaaacaccgacccaaggaccactccttccaggaacctagcctaaagcaaaggtgcagacagcccggggccaccgctgacctctagggcaagccaaattaaggctgggagaggatcctgcaggccaaaggatggaaaggactaggaacaaacaacaacaaaacccttacggggacaggcggaacagtgccccctcccactcccacaaccattcctccctcgatgggaggacgatttctgctatttggcctcatgggaaatgtagtcttttaggagacatggccagaagggccgtttacaaaactttggcagaagaaaaaaatacgttgtgtatgggagtccaaaactaccgtcatgcttgcacagactctaaatacacattttcccctttccttagcctccaccagtctccagagcaattcctcctcccgcccacatcccatgtgtctcggctttcaatttgggcagacctacctctctcctactcgctggttcgtcagccgctctgttcaatcgtaggagcgctcctggtcggttcccgcagtgccttgcggctgtaatggctgcccccagctggcgcggggctaggcttgttcaatcggtgttaagagtctggcaggtgggccctcatgtcgcgagggagcgggtgatccctttttcctcactcttaggcttccaacggaggtgcgtgtcctgcgtcgcggggtccgctttctctggtccccgc

SEQ ID NO: 17630 - DNA, 2300 bp, Homo sapien
tcgcttgagcccaggaattcgagaacagcctgggcaacatggtgaaaccttgtctccacaaaaaatacaaaaattagctgggcatgggggcacacacctgcggttccagctactcgagaagctaaggtgggaggatggattgagcccaagaggtggaggctgcagtgagccgtgtactccagcagtgctgtactcgtgtacagtgtactccagcctgggcaacagaatgagaccctgtctcaaaaaaaaaaaaaaaaagaagaaatgataacactctctggtttttcccagatcacatatttcctttgaatactgtttcctgtacatttttttgcactgcaagttaactgcctgtccagttttatgaaggtttccttgaacttgatgaggaattttggcattaacaagagagttcactacaagaatctcaggaattgccgggcgcagtggctcacgcctgtaatcccagcactttgggaagctgaggcgggcagatcatgaggttaggagatcgtgaccatcctggctaacacggtgaaaccccgtctctactaaaaatacaaaaaattagctgggcgtggtggcgggcacctgtagtcccagctattcgggaggctgaggcaggagaatcgcgtgaacccgggaggtggagcttgcagtgagctgagatcgcaccactgcactccagcctgggcgacagagcgagactccgtctcaaaaaaaaaaaaaagaaatctcaggaattgatttttctcgtttctgtatagggaacatatagaacatgtctacagcatggatctgggttgtggctgaattagatgttctgtgtagctgacacactgtttccaagaaccacttcctttttaggcctttttgctttctccacttctcccattggtaccacaagttagcctttgttttgaggccttgccttccccacccgttcccatgagaggaacaaagtcattctgaatgttttggaagtagagaaccagcctcactgagatgtgtctgccaggcagaagagcaaaccctctcgccttggttgggagactcttccttccctcccagccccccagtgttgtccctgtctgcgttccctctctgtctacaccccccgtgataacaggtgaactccagggcatacttgtttattgaattaattaattaaaaatggaagctggaccaggcgtggtggctcatgcctgtaatcccagcattttgggaggctgaggcaggtggatcacaaggtcaagagttcgagaccagcctggccaacatggtgaaaccccgtctctactaagaatacaaaaattagacgggcatgatgatgcatgcctgtaatcccagctactcgggaggctgaggcaggagaattgcttgaacctgggaggcagaggttgcagtgagccaagatcacgccactgcactccagcctgggcaacagagcaaaactccatctccagaaaaaccaaaaaaaaaggaagctggcctggcgaggtggctcacacctgtaatgccagcactttgggaggccaaggcaggcagattgcctaaggccaagagtttgagaccagcctggccaacatgatgaaactctgtctgtactaaaaatacaaaaattagccaggtatgctgtggcgggcacctgtgatcccagcaactcaggaggctgaggcaggagaaccacttgaacccaggaggcagaggttgcagtgagccgagactgcgccactgtagtctagcctgggcaacagagtgacattctgtctgaaaaaaaaaaaaagctttttcagatcacctctgcccattgtcctgttctgttcttcttttctctggaagcacttacattctaaactattcattggctatccttctctttatgtaaattgcctgtctaccaatctagactttaactcccataagggtagggagaacttctctctcattgatgtgtaacctcagcactaggcacccaacagtaggcgttgtcaagtatcagagcaggtaaaggacaaaagttgctatcagtgggctggagggtagacagacccaagaaccgactgacttgcggtggtttgctttgctccccagggggctgttgtggttccgactataaacagtacgtgtttggcggctgggcctgggcctggtggtgtatctccgacactcagaggtaagcacctgggggctctaggacctgtcatggagtgggccagggagagaggggcttccagcattgttctgcttcactctgagggtcagctagagcatctaccatttccacattccattctggc

SEQ ID NO: 17631 - DNA, 2300 bp, Homo sapien
gaaaataaaattatgcttttctccccccttatccccatcccccgaccccatccaaatgaaaaggattcccctttaaaattttcaaaagtagagagaaaaaaggttttatgttacaaactgaaggagggaagttagataataagaaaggatggaaaagatgaccatgagatgtattagcatcctccttctgaaactgggctgggtgagatgcctctggtcttagacacaggtccaaggagcaaggcagacaggtgggggcaggggtgggggcagttgctctgctctcgcaggagtccacacacaagagggagctggatctcagcttgatcatctcaaatcccaaggtatcattgtgccaggcattatctgtcacccccgccaaccttctctgcttccctgactccagcatcctcagttctcagcaagatctcctcttcccacccctaaaatagcgttgaagctaacagtgcattgacttctgttctgaagaccaggttctcagtaactggaaggcacagagcaacccatctctggggctcttcttgcccctcagtcccaagactttccacaaggatggaactggagcttttgtcttctcagctcagagtctgggcttcctgaaggaaattccacaagaaaaacaaagtgcagtgcagattctggtctctaaaagccttctctaagggtggggactgggagacaggtttaggtcttatggaggagcaagtctgcatttagtgttctctgggagtctcccttctgtcctcaaggctatttctggtcttcaggggggtagggtacttatctcccacacactggggatgtcccagtggagagattgattttgagatccaaagtgagcctgaagccatgttttggaatgaaaattcccagtggatttatcacccctctccaagggttggcagctgtgaggcctggctcagggcttctatccccttctatctcttcagtaaccagttctaccaaatctgcacgcaggctgaaaaaatcagcactgatagtgggaagatagagaagagaaattcctccagctccaggcctccaagctgtcaggcaccaggacccccgtcccccagctcctgagagcaaggagctgcacaacccggtggcttgcaaggtgtcagccgcttctcaaagcgccccaaatataaaatctcaatagcagttccttttccccagtaccgcagtccccatgccccacctagatagaaattctggaacttgcagcattttgcaatcccaaactgcactgcccagaaccgggtttcccaacctgtagaggccgcatccgcgtctcctgggcgggcagtgccggtaatccccaacaagccccagcctgcttggaattaacgggtctgactgtgccgagaaacgacctctgtttcagggcccctccccatacaggcacctgccctccagggctgcgcgacccgccccccatcccgggcgctggaatccagccaaacctctgcgttcccggaaccaccagttccctccctcctggaaccccgcggcttcagttcgggacccccaacctcacagtagagcggcggggaggcccgcctagggagggggaggagaagcaaataaacacaggaaaacccacagcgggagggggagcccctggtgggtgcccgagggtgcgcagcaaggaaagcgtgagcacgagatctctcttggaaggggcctcaggtgcggcccgggggccagcgccctgcgccgcgcggtggactcaggcccagctcttccccgtgcactccccagccctgcacccaccccgagcaccctccacagctcccaccttcctcgccgccccctcacctgaaaccaccagcgcctcgttgggccccaccgtgtggcaattgcccatggcgccggcggcacggagggccctcgggaccgcacagacccggacaacagcagcgggtctgcagcgccggccgcgcccagcctatcccgccacccccagcggccggccgcccgctcgctcgcccgcgcccctctgcggtcgcagccccgccggaagtgtggcggcggagggcggggccggcgcgttgaggcaggagtgagcgcagcttcggcggtcaacgcgctttattccgaggggcttcagatacagatgaccccagccctgcatccgcccggaaggcgtccccttactcccatggggcacctcgataccagctgccctgccctgactcacttctcagcacccatcttacggcagtcggccctggcctcagacccttgggttcagatcccaggccctcctcctactc

SEQ ID NO: 17632 - DNA, 2300 bp, Homo sapien
aagtgcagaggccctaaggcagaagttcctggtgtgcttgagaaaggctaatgtggctggaacagagtgaggggggagagtggcaagaggtgaggtcatagagaggcactgtgtcctgtagggtttggagggaggttcactataggcattctggcttttactctgagtgagataattggggatccagagcaacactttgtcttatggaagaggttataccaggataacaagatctgtcatattcatattaccatactgcattttagatagtcactgcctaaggctcattagtaattataatagcgatgatcacaattagcctttattaagtctttattacactccatatcactaatgtccaaaatagtggctggtatactgcaagtacttaataaatgctggttaaacaaggaacaggacttgagctagaagaaaagatggagagagactgagaattgtttcagacatgggacacagcatgaacaaaatctgggatgtggggtgaacaagcagtctggatggaagcgaagaggcttcatgcaggaaatgagtgaagtcacctcgcagaagccccgaatgcctggtaaatactatcctggttcccttgaaaccagattctgtccctgttcttctagctctgttctattttttttgttgttgtttttttttttaaagagacagagcttgactatgttgcccagtctggtctcaaactcctgggctcaagtgatcctcctgctccgcctcccgagtagctgtgactgtaaatacacaccactgtgcctagcccgactcctttctttcttcctgcctacagggcctgtgaactcggagctgttcctgcgccatgttcctggatggctgcgcccacttttgcgcccattggcttggctggtgctccgggcaccaagagggggtgcccagacacccctgtattgtgctctacaagagggcatcgagcccctcagtgggagatattttgccaactgccatgtggaagaggtgcctccagctgcccgagacgaccgggcagcccatcggctatgggaggccagcaagaggctggcagggcttgggcctggggaggatgctgaacccgatgaagacccccagtctgaggactcagaggccccatcttctctaagcaccccccaccctgaggagcccacagtttctcaaccttaccccagccctcagagctcaccagatttgtctaagatgacgcaccgaattcaggctaaagttgagcctgagatccagctctcctaaccctcaggccaggatgcttgccatggcacttcatggtccttgaaaacctcggatgtgtgcgaggccatgccctggacactgacgggtttgtgatcttgacctccgtggttactttctggggccccaagctgtgccctggacatctcttttcctggttgaaggaataatgggtgattatttcttcctgagagtgacagtaaccccagatggagagataggggtatgctagacactgtgcttctcggaaatttggatgtagtattttcaggccccacccttattgattctgatcagctctggagcagaggcagggagtttgcaatgtgatgcactgccaacattgagaattagtgaactgatccctttgcaaccgtctagctaggtagttaaattacccccatgttaatgaagcggaattaggctcccgagctaagggactcgcctagggtctcacagtgagtaggaggagggcctgggatctgaacccaagggtctgaggccagggccgactgccgtaagatgggtgctgagaagtgagtcagggcagggcagctggtatcgaggtgccccatgggagtaaggggacgccttccgggcggatgcagggctggggtcatctgtatctgaagcccctcggaataaagcgcgttgaccgccgaagctgcgctcactcctgcctcaacgcgccggccccgccctccgccgccacacttccggcggggctgcgaccgcagaggggcgcgggcgagcgagcgggcggccggccgctgggggtggcgggataggctgggcgcggccggcgctgcagacccgctgctgttgtccgggtctgtgcggtcccgagggccctccgtgccgccggcgccatgggcaattgccacacggtggggcccaacgaggcgctggtggtttcaggtgagggggcggcgaggaaggtgggagctgtggagggtgctcggggtgggtgcagggctggggagtgcacggggaagagctgggcctgagtccaccgcgcggcgcagggcgctggc

SEQ ID NO: 17633 - DNA, 2300 bp, Homo sapien
ggccttttgaacaggtctcattcccatagggaagtttggtaggggaggtgttggagaaaagtgagccagggtgggtggatgacaatggaatgacatgggtgcgtctgctggcccggggggagctgtttctccagagaaccctgactgatagtggaatctagtcttgacctgtcacttctagtcatgtgatctgcagtcacacttctctacaactgctattcctcatcaaaaaacgagtctgctgcattaccttaattctcaagtcccggggaccttcattaaaccaaattccatgctttcctcccagatcttagtgaaaaactctccaggaagttttcctgaggtcagcctcctcagatggagagcacctctgtgtatattccagcactgtttgtgtaggtgcatctgcttgtgtgtcaggattttgccttagggatagaaaatgaatattctacccccagcctcatcccacagcatctacaatggaaacccgaatccgcagtgcagctaaataggaaactggccctggaatctgaggtctgtccctgactttcatctgcccatgcaggcgtcatcactctgctcccggtgccctaatgggctttttgaactccctaaggacagaaacttgtatatcttccactcggaatttccaagtctaactacactgctgggcacaccataagtgccaaataccaggttctaaattgtactgaatgtatcaggcaacggccttctgccctggaatggtcttacccatttgttcctagccagccccacccttcctgccatcatggtcacttgtaattgagtgatggagcttctctgcctgtctcttatcacctatgagaaccattccaaaggcaaatttcctcctgaaaggcaataacagattttactctctatctcttcctgcttcccttcagccatggaaggcactagtggggttgaggtagggagatacagagggggaatgaaggagtgaattctgacaccccttaactgcctgtgccacctttaacagtgtcctctctagcctgtgtggggagaacacggaagaatcctagaagctgggggctggatgtgaagataagaaaacgaaggatttggcccagtgcagaggctcacacctgtaatcccagcactttgagaggctgaggcaggtgggtcacttaaggtcagaagtttgagaccaacctggccaacatagtgaaaacccttctctactaaaatacaaaaattagccgggtgtggtgtcacacacctgtgatcccagctactctggattctgaggcaggagaattgcttgaacccgggaagcggaggttgcagtgagccgggatcacgccactgcactccagcctgggcaacgagagtgaaactccgtctcaaaagaaagaaagaaaggaaagaaggaaggaagggagggagggaaggaaggaaggaaggaagggaggaaggaaggaagggaaggaaggaaggaaggaaggaaggaaggaaaggaaaggaaggaaaggagaaggatttgtgcagaagggaaggaaggagaaggatttgttcttagagggaaaagcatctaggactagactcaaagacacacgtgtattcatgtacacacctaacttcagaagggagggactgtgctacatacacctcgagtaaacatatggagatatgcaagcacatgcactggcagagactacagatgcaggcacatacctggagggactctgccagaatgcacacaaacacctacaaggtgcttacaggagctcacacacaggatccagaggcacgcacacaacccaaagggtgatcctcagggacatgggcacatacacacctagagatcattcacatacaagcgttgcagatgcatgcacatacctagcgtgcactcacagggtgtacgtggacacacacacccaggagttcacacaggcacacacctagggggcgctcccagggcccaagcgcacacactcacctcaaaggtgtccacagaggcacacgcccccaggacgccgacgcacgcctagggggcgctcgcagggccggcgcgcacccgcacgcgcacacgcccctgcccagcctcctgcccgcctccgccttcggaggctgacgcgcccgggcgccgttccaggcctgtgcagggcggatcggcagccgcctggcggcgatccagggcggtgcggggcctgggcgggagccgggaggcgcggccggcatggaggcgctgctgctgggcgcggggttgctgctgggcgcttacgtgcttgtctactacaacctggtgaagg

SEQ ID NO: 17634 - DNA, 2300 bp, Homo sapien
caaacttaactgggcaaatatttatacatcagtggagacacaggttttccaaaactagattcaaatatttcggaaatggatgatattaaaggtagtatgcctcatctcagtgaaacagatctaaaagtaatccagactgtgtaattcactgtgtagatttgtcagagagcatagctgctgaagtgaacgggccaggagaccttgataaaaatccccttgttgtatggtgcccctcccaccttttaagtgtttctctagtgaggaaactcaaagggcatgagttacctgcaaagcattttgtacttggacagtttgagagtgaaatgaggaccgtagcaccatagaacattggtgaagaaccccagctctctcctggaacattagcctttacacttgattctagcaattcaggaaaaatctgctgagaactttgtatcttcgttgcgaatttctcttccacttagcccttcactcttccccaggggtatcctgttcttaccccaggggtagtggaataaactagtccactgtttattcctcctcctctcattcctgggtgatctcagaaagcccatggcaccagctaaggccatcaccagcccatggtgatgactctcaactccatattccatgcctttctccttatatccagactcatatctgcctgcccatcccacagatatctcaggatgaacctcctccataagaccagaagtcttctgcctctccacatctgctcttcctcctgtatctcctattgcagtaaataacaatgatcactactcagtccctcaaactaaaattctgggaaccattttcagttctcccttgtctaccataaggattttgtcaccaaatctgttggttctctggatgttttccaaatccacaaagtgctatcacatctctatgccttacatgcttctccccctcccttatttttcctttatctgcctggaagatccttctcaacttccaagtgtcaacccaaatactgacttcctataaaatcatccccaatcccaaattcctgtcccccaaactaaaataagcactatgtttttaatagcaccttagacatgcttctcttctagaacccattaccttgtgttgtaatatttctgtgtttatctccccactagactgtgagctccttgagggcaagtcttaacttttattcatctctggatctctagaacttggaacagtgcccagacacaggaggtgctcaataaatgttggttgaatgtatgaatgactctttgcttgtgtggctctttcattcttacatggtgtgattcagagtgtggcttctgtttttgttgcacaaagacgtctttagttgtttcatgagtcatgaatgaatggatgaaggaaactgacattgatggagtgcttatcatgagccaggcctcatgtcaagcatttttttttttttttttttttttttttttttgagacggagtctcgctctttcacccaggccggactgcagtggccctatctcggttcactgcaagctccgcctcccgggttcatgccattctcctgcctcagcctcccaagtagctgggactataggcgcccaccaccacgcccggctaatttttcatatttgtagtagagatggggtttcaccatgttagccaggatggtctcgatctcctgacctcatgatcctcccgcctcggcctcccaaagtgctgggattacaggcgtgagccaccgcgcctggcctaagcatttttatctctcagtgactgctcacccactcccaaacttgacactgagcaataagaacccagagtaccactctgaagccctgtccagtgccagtcttacacctttcaggctaaagcagaagacagaacgcagtggtttctgtgttctgcaggccttagaccttgatgaaggaaagtggaggccccacctgctatttccatttctgagcctccttttcctcagcagaccccagagtggatggtcccttgagcaccagcaccacagacagaacagcataccagggcagaatcaactagacatgttggaactatctccctctccttcctccttctatctatcctgaacaggttcctgatgctataaaatctcagtaccagtttccaccccctctcattgcacccgcggccattcgggacggggagctgatctgcaatgggatccctgaggaatcacagatgcaccttttgaactctgagcacttagccacccaagcagagcagcaagaggtgagtgaaggtggggcggggattccaaatccaaccttccttctgtgtcac

SEQ ID NO: 17635 - DNA, 2300 bp, Homo sapien
gcctttagttcagttttgctggccgatctgtccaacaagtcagtgtcactgctgggggatgtagtccgtttgccagatttgtccaccagtccattgacatgacccagctcctttttctgctctcgtttctgtgcaaatgaacaggtgggcccatcatgaaaagtaccatgaaacaaagagatgggtgctacaaagtcctggtagaccactaatcaaaactgtaaaaggccttcacatatcacagactcatctacctggtcacttggaacactggtctgttaaagttgacacaactctaactgaactaaagctgacaaaactgttgcatcagagaatcaccaaaaagcatggtaagttaggaataactatacaaaatatatatcattaacattaactcattgtatgacatacaacatctataaagtatagggtaaagggctaaaaaggtaacacagtgagaataaatttagtgagaccaatagtaaaaatcaatggggcaggcacggtggctcacgtctgtaatcccagcactttgggaggccgaggcaggcagatcacctgaggtcaggagttcaagaccagcctggccaacatggtgaaaccccatctctactaaaaacacaaaaattagctgggtgtggtggcatgtgcctgtaatcccagctactcaggaggctgaggcaggagaatcgcttgaacctgggaggcaaagattgcagtgaactgagattgcgccattgcactccagcttgggcgacagagcaagattccatctcaaaaaaaaaaaaaaaaaaaatcagtgagatcactatagagccttctgacctcctgaatggttttaaaaataaaaactttgctcaaaataagtgacacttcttagaaagtggggaaatggaaaaagattaagtgtactcagtaggactggatatctgatagtacattttcctccaggactccaaatagagtggtcaaatgaaggtttaacactgatctccaggtaggagacctgtgatcttgtcctatttctgccacggatcccctctgaccttgtggtgactcaggctggtgggcaggaatttcttcatctgtaaaatgagacagaaaaatctttctcctcctcctctcagggatatggtggagggagataaaaagggtcatatatacgaaagggataatttggagttggagtaggacctagtcttccactacgaatcatgatagggcctgaatgtcaggagctgatgaaggccagaggatgtattatttcaatccacttcagtgtaaatacaagaggccaaaggggagtagtgctggtgatggtggaaaaggcagacttggcactggtaggcagaggtccatgtgaaaggtaagagaggcatctcaggagaagtgccatgttagaaaagggcatactgtaatccccaacaagtagctctccttctagaaaactgatgaagaggtaacagaggtttggaatgagagaatttggttcaaacattggttctgtcaatacctttgagtccttgggaaagttaatctacatttttgagcctccgtttcttcctttctaaaatggaaacctacggccagcattcggtatccatctatggctggatggatagataatgggataacgtaattaaaacacctggcacacgatgggcactaacataatatttccttttctccaccgtctttaccccttttccttcagctcccctaaaccttttcaggtccagcttttttgagtggcaagtttgagagggctcctggctggcaggtgcctctaacaggccctgctctaacctaattagggatgcacaggaaaggatcttggaaggtggagaggctggaagacagcctggtttatggagaaatttaactacagctgtggttaggtggttgacctggctttggcttgcttttaaatatgaacccttatgcacgtatttgaaaaataatgtctgcttgtttactttctttcttaaaggctgaaactgttacacacataaaccacaatcttaatcatctcatcctgtttctgcaaccaaggaagtcatcattcattgtgacatcatgttcggggaccaggcaaatagaggtgaggtcacaacataggaaagttgcttggtgtataattagtgtggggagcacaggggggtggattacaatgcacagacaaattctaatccatagcctgtaatttgagggttgggtcaatcataatttgggtgcaagcacacctacttccttttttaataagggagaatttagctcttgttacccacaagagttctcaa

SEQ ID NO: 17636 - DNA, 2300 bp, Homo sapien
caatggtaggaatttcttaagcataaatgtggtttttgttgttgttgttgttgttttgtttttgagacagagtctcactctgtcgcccaggctggagtgcagtggcactgtctcggctcactgcaacctccacttcccaggttcaagcgattctcctgcctcggcctcctgagtagctgggactacaggcgcgtgccactacacccggctaatttttgtattattagtagagacagggtttcaccatgttggccaggctgttctcaaactcctgacgtcgtgttctgcctgcctcggcctcccaaagtgctgggattacaagtgtaagccaccatgcctggcctgttttttggtttggtttgtttgtttgtttgtttgttttgagatggagttttgtcacgcaggctggagtgcaatgacataatcttggctcactgcaacttccgcctcccgagttcaaaggattctcctgcctcagcctcccaagtagctgggattacaggtgcccaccaccacgcccagctaatttttgtatttgtaatagagatggggtttcaccgtgttagccaggctggtcttgaacttccaatctcaggtgatctgctgtgtgcacaacctctgtattataaaaatacaaggagggaagagatccaatcattgtcctagtccctctaataaaataagtaagagaactgctgaaatgggcaaagcatgagaagtgccaaaagagaactaacccatgcagcaagaggtccaagatacaggagtaatatgaactcatggaaaagctgtttggttatctattgttgcataacaaactacgccaaaactcattggcctggtacagaaactcattattatctctcacagttctgagggttgcctgggctctgctgggtggtttttctgtttcacatgatgttggctgggactgcagtcatttggaggcttcactgaactggtaagtccaagatgactcactcacatagcagtagttgctgctgcgtgttggcttggagttcagctgaagctggttttttgttttctcaagatggagtttcactctgttgcccaggctagagtgcagtggtgtgatcttggttcactgcaacctccacctcccaaattcaagcaattcttctgcctcagcctcccaaatagctgggattacaggcatgtgccaccatatttggctaatttttatatttttagtagagatggggtttcgccatgttggccaggctggtcttgaactcctgatctcgagtgatccaccagcctcggcctcccaaagtgctgggattccaggtgtgagccaccacgcccagcccaaaactgttgattggaataccttgtctcctccatgtcctctctcatagcatgacagcagggctctgagatggaactttccaagcatatttcttaaaaaatagaatctgcagatctcttaaggccaagctttggaagttgcaacattgtcacctctgctgcattctgtggtcaaagcaagtcataagacaagcacaattcaagaggagggaaagggactacctgtggatgggaggcagagcagataatttgcagctgtctttaatccatcacagctgattgaggcaggtatgaaaggatgaatagagttttgacaggcatagctttctaaaggaagagtattctagaggaagaaataggaagtcttccatttgaatagtgggaagagcacctgaaggggtctgggaagatggaacggtgggaccatgtgacagggctttgaacagcagttagaaaagcttggctctacactaacaggctttaagaaaacagtgtggaggacctctcagttattttattatacctttccctacaaacccagtgttaatagctctggatttggcttctctctctaaggtgtgggaagggatggtcactccttaggttattatgagtgatgctgacttaggcattttggaggagacaaccctagcagtcctgcaggactggccacaataggagtttaggaacatgcaaacctagctaggcttttcctactgcctcaaagggctagttatttagtcttgcccttgtctgttccccacagtaaccctccactgagtgaagaaatgttgcctcctggagagtggatgtgtcaccggtgcactgttcgccgaaaggtaataatgctgctttctgaagactgtccagaaagcctgatccagagcactgatatgctagagctaagacggcctagccctgaaggcattcttgtcccttcttcttgtctcttccagccctggaatcacccc

SEQ ID NO: 17637 - DNA, 2300 bp, Homo sapien
gaaacctaagactccatacactgacatccccactctgtctaactcatcctccttactgtccccaaagcaagcatagtaattccttagacacagtcgacatagtgtaatggacagtgtctggcttgagaatcaagaaatccaattcttaggtctgccataaatgcactatgtgacctaggcaaatcactgcgcctccctgtgcatctggaaaagaggggattaaatcagatggtctctaaacccttgctagtttgacgactctgagaatgctgtgtcccttaacattaaaagtgggccgagcacagctacgaagcaacaattccaactaaacccctagtgtcaagcacaacgatacaattctcttttccactgcttcatccaccatcaggcagcaataaccaaccgcccatctctgacggcaataccaaggggaggagcgggcgccctgaaaaggagcatgaatccccgcccagaatgcgaggcgggccctcagactacaaatcccggcatgcagcactgacgctctcaaaagtatcccttcctggccggcaaatgactcttccccgggtctatcctaccatagagtgcatcgcacgcacatggaactacagttcccacaatccatcagacctatcgcgattcttgctcccaggatgcaatgcgcccccgttcgccctttagaccctttggcgttgcaaactgggagttggagtccggggtacgcaggtagctgggcgttgtcaggattacaaactctccactttaggcttcctcttgaagagcagatctcagggacagtggtgaagagagggtggtaacgggcaggcggaactctccagtgccaccaccacgcaaggcagggatgctgaggatacaattaactgataaaattatctgtcaggagcgggagagaattaggaaccacagtcatcccacacgcctccaaaagcgtcattttctgtctcaaatggcttttctctttaccaatatggtggcctggtccagccacacccgatggtagaaccaaacggtcaagtacaacatccctaggaatactgctgtcaccgacaggcgaccagctccatccaacaccacaccttgctcctttctgttcatgcctgaggactccaagggcatgatagcccatatcccattaccaaaatggcgaaaggagcagctttcttgtgagggcctgcggaaggcaatacgcctgcgcgggaggcgtctgtgttatggagaggaagggggagcacccccaacacgcctgcgcagaacagagtcgtcttagtttgcacacaaacaccaatggatgaacagtccctagcttcctgcggctgcgccttgacccctacaagctttctcaagcgcctgcgcgagacctcaggtcccgcccttttgtctcagtgcgctggcgcagggcagaaaggtggggcttcggtcctccagacgaatgccagcgcggctgcgcgctggggggtactccctcaccgcggctgcgcgggagccaggccgccggctgtcactgcggttgcgcgcggcgagcgccgatcccggggcgcctgcgcgggtggctttgcgggcgctcgcggtaagtttgcgccaagtgcgcggcagccgggacgcagacggcggcggcggcgagaggcggagcccggggaccaccccccatcaccctccccccagtcacctcacgtaccacaacctcacgtaacctctcaccccccctccgatacccccagccccgggatggcagcgcccgccagccttcccggccggaccggctgtcgccagtgccggctttagcctgtgggactaggccccgccgaggcctgacccccggagccgggacccactgtgcagccagcagccgggccgggactgaggggccgctcccccctcgcggcccgtcgggaggacgctgtcgtcccggggactgggggccggggggtgggggggagccagggcgaggaagtcgggacccgtattgggaaaaaagcggggccggggtcaggagcgccccctcccctcacctcccccctccccccggggttgggggggccggagcagagagcacccagcccgggaggtggatgaatgtgggagaaaatggagaccaagacgatcgtgtacgacttggacacatcaggggggctgatggaggtaagagtggccctcctcatctccttcctccagcgccgggagggaacctccgccctccgccccacaaagccagtcctaaactcgaagcgcctagatggccgagggagggggattcttcctcacctagcctctccctcccc

SEQ ID NO: 17638 - DNA, 2300 bp, Homo sapien
aaccagtagagaaaaatccatgaaagaaataatagcagcaaccagcaccttctgcttctacagtcttccaaaagggaagtcttgaccactcatgctgcctacccctggctctagcacaagccaccttgaaggatggagaagctcttgtccatgcagagtgcagtgcctagattagccacaagaggtcacttccaaaggcgtctgtatcccacctgctcgcccctcaatcccccctcaactgtcagggcgggagctctccaaggtgggagcattccttggccccactggcctaacctcatcctgcaagttccaagaggaagaggtgtgaagtttccctggctcttgtcaacagagccaagtcttatttccctcattagcccatagttcctattatcagctgcaattgatggtgttgatcaaagcaaagccttgtccagtggatggatgccaatggcttacttacctgttccataatgcctccaggttaacacagcagcacagctgggccctgagcagtaggaaaaaaagccaaagagagagggcacatgaggttctaaactctgagagcctgtgacataaaatatagccataggagatagaaaatcttgcctctttcatacaaacaatctagctcagccctcccctctctgatggccacatctctggtccacagctcctgaagtttattgttggctcagaatggtagaaagcagagggcagccaattcacatgacattctccaccccaccatccatgaccttatcattctttccaggcaccaagagggtcatcagaaaagcgaaaagtcaggaaaacagaaacctaagactccatacactgacatccccactctgtctaactcatcctccttactgtccccaaagcaagcatagtaattccttagacacagtcgacatagtgtaatggacagtgtctggcttgagaatcaagaaatccaattcttaggtctgccataaatgcactatgtgacctaggcaaatcactgcgcctccctgtgcatctggaaaagaggggattaaatcagatggtctctaaacccttgctagtttgacgactctgagaatgctgtgtcccttaacattaaaagtgggccgagcacagctacgaagcaacaattccaactaaacccctagtgtcaagcacaacgatacaattctcttttccactgcttcatccaccatcaggcagcaataaccaaccgcccatctctgacggcaataccaaggggaggagcgggcgccctgaaaaggagcatgaatccccgcccagaatgcgaggcgggccctcagactacaaatcccggcatgcagcactgacgctctcaaaagtatcccttcctggccggcaaatgactcttccccgggtctatcctaccatagagtgcatcgcacgcacatggaactacagttcccacaatccatcagacctatcgcgattcttgctcccaggatgcaatgcgcccccgttcgccctttagaccctttggcgttgcaaactgggagttggagtccggggtacgcaggtagctgggcgttgtcaggattacaaactctccactttaggcttcctcttgaagagcagatctcagggacagtggtgaagagagggtggtaacgggcaggcggaactctccagtgccaccaccacgcaaggcagggatgctgaggatacaattaactgataaaattatctgtcaggagcgggagagaattaggaaccacagtcatcccacacgcctccaaaagcgtcattttctgtctcaaatggcttttctctttaccaatatggtggcctggtccagccacacccgatggtagaaccaaacggtcaagtacaacatccctaggaatactgctgtcaccgacaggcgaccagctccatccaacaccacaccttgctcctttctgttcatgcctgaggactccaagggcatgatagcccatatcccattaccaaaatggcgaaaggagcagctttcttgtgagggcctgcggaaggcaatacgcctgcgcgggaggcgtctgtgttatggagaggaagggggagcacccccaacacgcctgcgcagaacagagtcgtcttagtttgcacacaaacaccaatggatgaacagtccctagcttcctgcggctgcgccttgacccctacaagctttctcaagcgcctgcgcgagacctcaggtcccgcccttttgtctcagtgcgctggcgcagggcagaaaggtggggcttcggtcctccagacgaatgccagcgcggctgcgcgctggggggtactcc

SEQ ID NO: 17639 - DNA, 2300 bp, Homo sapien
cagagagggaaagtgacttacctgggcacacaaccaggcagtgatacatctacccacagtcaagagagttaccctggtcagtcccaggggtgtgaaaggttaggcggcaggattctggagctcaggctgcctggagatgcaggttcacagggctaaaaggttgaccttcaggacgatgagggccaagatggcagggaggcaaggtccccgctgctccaagcagaggatatagggctgggatagggaggaaggcatgttaggctgcctgggttcaggcaggggcctagcctacgtcctgtcctggtcttaacagctgcttgcggcggagtgatccgcaatgccaccaccggccgcatcgtctctccaggcttcccgggcaactacagcaacaacctcacctgtcactggctgcttgaggctcctgagggccagcggctacacctgcactttgagaaggtttccctggcagaggatgatgacaggtgaggggctgtcctagtggaatgggagtgcctggcctggtaataccctgctggagggacgctacccaagcctggggccacaccccatctgggtcagccaccagcctacatagctgccactctcctggttcaggctcatcattcgcaatggggacaacgtggaggccccaccagtgtatgattcctatgaggtggaatacctgcccattgagggcctgctcagctctggcaaacacttctttgttgagctcagtactgacagcagcggggcagctgcaggcatggccctgcgctatgagggtgagcctgctggggcctcactgggggtggcgggtccacggggatgggctcgggcctagggtctttctcccacaccctacccctctctgcctccatgctgtcactccttccaagtcagcccctgctcactcagtacttaggccccctttccctgcccctctctttgggtccgggatccctaccacagctttgcaggaaacctctgcctggacccaggccctatggtccaagggaataaattctccagattttgaaaagcaaaaaaggcctcaacccttaagaaagaattgctgtaagagacattctagaaccatttatgcatgcatgcattgattaattcattcaaaaaacatgtatggagtaccttctgtgtactaagcacaaaaccaggcagtgggaacaggatggtaatcaagatggcctcctgagcataatagggatggatgctcttggctgtccctcctccatcacattcctgctccaaccccaggacatatatttgtcattcgtacccaggaaaagaaaggctctggggagggaagtagggggatgcttgcccactgtgtttaataccagtcaaggctgagctgggctgggacctgtggtttacagccttccagcagggccattgctatgagccctttgtcaaatacggtaacttcagcagcagcacacccacctaccctgtgggtaccactgtggagttcagctgcgaccctggctacaccctggagcagggctccatcatcatcgagtgtgttgacccccacgacccccagtggaatgagacagagccagcctgccgaggtcagtagacaccagtggatgggcctaccgggcaaaaggcagggtcataccaggagaatagcagcagagcccggggccacaggggccctgtgatatgcgtggttcaggcttcctccaaggaggaggtggggggtcccagcaatttgtgggcactcctgcgggcagatggtaagcaacaccatggtaagcttgaaaagacccttctgggcctcctctgccttccagccgtgtgcagcggggagatcacagactcggctggcgtggtactctctcccaactggccagagccctacggtcgtgggcaggattgtatctggggtgtgcatgtggaagaggacaagcgcatcatgctggacatccgagtgtgagtgcctaccgggtcaggccgagccaactcctgaggtctggggatatcccttgtccagcccatcctcgggcccccaggccggctctgccctgacgctcctccttcacaggctgcgcataggccctggtgatgtgcttaccttctatgatggggatgacctgacggcccgggttctgggccagtactcagggccccgtagccacttcaagctctttacctccatggctgatgtcaccattcagttccagtcggaccccgggacctcagtgctgggctaccagcagggcttcgtcatccacttctttggtgagcttgtccctaccccactcagagtgcagacagca

SEQ ID NO: 17640 - DNA, 2300 bp, Homo sapien
accatacccagctaatttttttgtatttttagtagagatggggtttcaccatgttggccagtctgatctcgaactcttgacctcaggtgatccacctgcctcggcctcccaaagtgctgggattacagacttgagccaccatacccagccatgaatcttatttcattctataaattcttcctgggtgccaggcacaaccagagttgaataacacagatgctttctcagccctcgaggatctagcggggaggctggcaagcagctcagtgcagaggatgctacaataggagtaaaggcagagtggtggaggagcccaagggatggagagctactccaagatgagagaggaggcaagcaaggcttcccaaggagacagcatggaaggatttcagaaatattagtttgggaaagtggggtgggttcctggaactgcatatgcagagatgtgcaggcatgaaatagcacaagatagtgagcacacagtgaagtgtgcctgaagcagagggtatgcggggagaggggactgaagctgagtctagagagaggtggattcataaagggcttgaacaccattttcagctttaactctatcctgagggtaatggggagccactaagcaattttcagcaaaggatggggcatgatcagatttgaagggcagttccattctgagaccaagctgaggcaggtctgtcctttctgcagagaagaaacttgccccagccccccaggagctttactaggttacaatattctgctgccttgagcatttggagacaaaggtcctgtgtattggtcatggcagcctggtctctgagagttgggtaggtcagagctatgtgtccaggagaggaaagcactgcctggaaccagccatactcctcttgcctgaggacccctctctggcctcacataaccgccaggagtttgtggccaagtaacccagcaatcctcacagatagccataggcaaactgttcagtctctccttagaaagagaggacagccccaagccagtagggtcagcactagaaaggtcagtcagcccaggaacggcagtggtagtgaggccggggcggatggcatgcacatcaggtgtttgccgcccggatctagtgctaacccctttttacattcattcactcattttattcaaccaacgctgaacaccaactctgtgcctggcctggaaagacctggttcctgctccagggggtcctagttaagggacatacccaaacaactgattttaggaaagtggcatgaggtagaagtagcagatgtatccaagaaggttgaagcccacagtaagggctttagtaaagtctacctagggagagtcggccttctagagaagtcagcagagagggaaagtgacttacctgggcacacaaccaggcagtgatacatctacccacagtcaagagagttaccctggtcagtcccaggggtgtgaaaggttaggcggcaggattctggagctcaggctgcctggagatgcaggttcacagggctaaaaggttgaccttcaggacgatgagggccaagatggcagggaggcaaggtccccgctgctccaagcagaggatatagggctgggatagggaggaaggcatgttaggctgcctgggttcaggcaggggcctagcctacgtcctgtcctggtcttaacagctgcttgcggcggagtgatccgcaatgccaccaccggccgcatcgtctctccaggcttcccgggcaactacagcaacaacctcacctgtcactggctgcttgaggctcctgagggccagcggctacacctgcactttgagaaggtttccctggcagaggatgatgacaggtgaggggctgtcctagtggaatgggagtgcctggcctggtaataccctgctggagggacgctacccaagcctggggccacaccccatctgggtcagccaccagcctacatagctgccactctcctggttcaggctcatcattcgcaatggggacaacgtggaggccccaccagtgtatgattcctatgaggtggaatacctgcccattgagggcctgctcagctctggcaaacacttctttgttgagctcagtactgacagcagcggggcagctgcaggcatggccctgcgctatgagggtgagcctgctggggcctcactgggggtggcgggtccacggggatgggctcgggcctagggtctttctcccacaccctacccctctctgcctccatgctgtcactccttccaagtcagcccctgctcactcagtacttaggccccctttccctgcccc

SEQ ID NO: 17641 - DNA, 2300 bp, Homo sapien
ggcaaaattctgtatgagctgaatctggagccagcattcattgaccttttcttggcagttaaggatctggggagccgaatgggccacaagcagaatatgcatcatctctccagctatgtggttgaataagtcaacacaatcaatagcagagcaatctgtacctcagaccagagatagcaaatcagtttcatcccccagagccaatctcattgattggtagtggctgcctgaataacattgtgagagggaagttgctaaggaccaggtggccttagcaagaaataaccaaaattgattagcaatgcctgccatggattagggagtgggtgggtagcatgctagatttccattctacacctgtttttcaccctgccctagatggaacctgattagtgtcaccagaaagattaagggaactcagggggacatatcaaatagagacgggatgtaatattatctcagtcaatcctaaaaaggaaacccaattttacagatgagaaaactgagcttcagagagtttgggttatttgcctgagggcacacagccctagagtagtggatctgggatttgaagttatgtctgcctagctccagaacttggctcttcccactctactcatattactgctctagaaggaccataaaaacagaaatgagtacaaaagaaatgatttcctgagaacggagagaaactactgggcccctaacaaagaagtcatgcacccatggtcgggtgcggtggctcatgctgtaatccctaggaggctgaggtgagaggattgcttgagcccaggagtttgagaccagcccagacaacatagtgagatctccatctctacaaaaattctaaaaattagccaggcatggtggcatgcacctgtagtcccagctactagaagtgggggtgtggggactgtggctgaggtgggaggatcgcttgaacctgggaggttgaggctgcagtggagccatgatcacaccactgcattgcagcccgggccacacagcgagacactgtctcaaaaccaacaaacaaaaaaagaagtcatgcaaccatgaggaaatctaaaataaaatcccaaatatgtgacgcatttcctgaggctaatgaccagcaggttcactgagaacaggaaatgaacttgaatgccctatcatctcagacaggaaagacactgtggtgggagacacacttacggttttcatctcaattcaactggtcgcgtgactttgagcaagtcacttcctttctctggcctatttcctcactagtaaaataaggcctctgctcttcattagggatggcaaatatttgtcatgtcagtctgaggtgtcaggtgtgacctcgtggagtgctgtgttgaggaggattctgaggctgaacctgagaacagtaggaaatagtgcacggatgggctagaaatgcctgcctctggtgctggaggagaaagagtatctcatgtgccacccttgaagtatgtaatagcacctcacttccagttcacaaattctgtagttccgtgattctcagcagtgagcacgctcctcagggctgtctgtcaaaagagagcgggcccccccactactcgagttgggcgtgatgctgctctctggagcagggggagaacctctgaccatcccttattatttcaggactctctttagaggccccaaccgtggggaaaggacaagccccaggcatcgaggagacagatggcgagctgacagcagcccccacacctgagcagccagaacgaggcgtccactttgtcacaacagcccccaccttgaagctgctcaaccaccacccgctgcttgaggaattcctacaagaggggctggaaaagggagatgaggagctgaggccagcactgcccttccagcctgacccacctgcacccttcaccccaagtccccttccccgcctggccaaccaggacagccgccctgtctttaccagccccactccagccatggctgcggtacccactcagccccagtccaaggagggaccctggagtccggagtcagagtcccctatgcttcgaatcacagctcccctacctccagggcccagcatggcagtgcccaccctaggcccaggggagatagccagcactacaccccccagcagagcctggacaccaacccaagagggtcctggagacatgggaaggccgtgggttgcagaggttgtgtcccagggcgcagggatcgggatccaggggaccatcacctcctccacagcttcaggagatgatgaggagaccaccactaccaccaccatcatcaccaccacc

SEQ ID NO: 17642 - DNA, 2300 bp, Homo sapien
ttggaccctctaggttagttcaggccatagggaaggtgatgtgacaagttccaggatggcttctctccccctcctttatgtgcatagtgcccagcccatcaaggagccctgttgctaagagagtcagacaagcctgccaccaacctccaaatccccatgaatcatcctggcaatacaagattcatccctaggtcatgactcactccccttgcccaagctgcctagccatgagggaccaggaatactagaggagcccaggaatactttcaaggaggaaaagaggaatctcatgacatttgccagcattttcctaaacttcccccggtcacacaaccttctacctctgtgtctcttcccttcctctgttggcaactctctttctgcctcccctcttgcaccttctttcctggcttcctctcctcacccctgattcttgcatcagctcctccttcttcctgccatccttctgctgctgccctctttttcctcagcttctcaaaacaactgtccagaaatcccagcgtcttcctaattccacacgccatctgcctgctgcctgggactctttacagcagtcatcacagctccccagagcccacaagaagagggtctggagagaatccaaccagcagagttgggagactctggtcaagaggaccaaaacactctctaaggaacttgagcagaaatttcaccacctgcttccaggatgagggtcaggaaggacactggacaatgactggagtctggaagctttggagagcaaccaagttcatgtaaaaagaaactaaacaaaaaactgcccttctcccaggggcaatagggagttcagccctcctattcctctacagggaataataacatcagccataggatcctgtcccattgtacccattaaagctcttcaagtgagcccatccatgagcccctgcctttaaagagcagcctcaggatggcacagctgtgactgcccccttgctgtcctgtgactcactggggctcctcagcccaagcagggccctggaaagttatttttccatgcctttaatagtacaggctacacccctgggcctccttcaagtctctatctaaaacagccgtagggcacagtggctcatgcctgtaatcccagcactttgggaggccaaggcgggaggatctcttgaggccaggatttcaagaccagtttgggcaacataatgagaccttatctctgcaaaaaatttaaaaattagccaggcttgggggtgcatgcctgtagttctagctacttgagaggctgaagtgggaggatctcttgagcccaggagtttgggtgagctattaatataattgtgccactgcatttccagcctaagcaacagagaccctgtctctaaaaacaataataaaataaaataaaataacagctctaggaaaccctctctcatgcctatgccattttctccaccaattccagaaacctgggcagagatggcatgaagggtctgtatcgactgtcactgtggcttctctggtcctgcagaggggccaaggcagagtcctggagacccagggctacgtggggacccaggatactaccttcagctgcccacagcttggcccaggttgcctcctgccaagtgaagaatgtctccccaggatgcgagtgccactggcttttaactataatatcaggataattaagcttttctgtgagcacagtttgctgctgatgcagctgcctggagccctggcatttattgagcgcaaagtaataatttattatcctttgtacgctcaaaagccatcttcattatcgtcccaagacggaactgccacaagggcacgcgggcctcaccagctgcctcactctcggatgtcttcccaggtcacccttgacgccctcaggtaccaggattgggtggagaggggtggggaaagtgttgctctttctcatggagaatcagaaggctacagtgagctattaattgaggttccttagcaggccgttaacgggaaagagggtggcatgcttggctgggggtgggcagcgcagaagggcaggggccgtgtgcccacatgagtagggcagtcgcggtggagcgggagcctgggctcctgcccctgggtctctgcgcctttgcatgagactttacggtaagccgctcctcccgcgcccccgcccccagccccgctcggcgatccccggcgccgtcgccaggcgctggccgtggtgctgattctgtcaggcgctggcggcggcagcggcggtgacggctgcggccccgctccctctacccggccggacccggctctgc

SEQ ID NO: 17643 - DNA, 2300 bp, Homo sapien
acagctgattgtccccttgggcattttattgttctcaatttgtaggtaatatcaaggtctggttaggacgagccccttggagggcatgatagagggcacctgacagaagctctgctgtttcccagtttggcccaggctctgcctcaacctgcctaggaacccactgcataaaggctatgttaactgcctttaggagggagggacagccccggtgcattgtcatgcccatcatgcagtacaagcccatcttctgagctcagggtacagtactgtattctgggacttgtagtctccattggaccctctaggttagttcaggccatagggaaggtgatgtgacaagttccaggatggcttctctccccctcctttatgtgcatagtgcccagcccatcaaggagccctgttgctaagagagtcagacaagcctgccaccaacctccaaatccccatgaatcatcctggcaatacaagattcatccctaggtcatgactcactccccttgcccaagctgcctagccatgagggaccaggaatactagaggagcccaggaatactttcaaggaggaaaagaggaatctcatgacatttgccagcattttcctaaacttcccccggtcacacaaccttctacctctgtgtctcttcccttcctctgttggcaactctctttctgcctcccctcttgcaccttctttcctggcttcctctcctcacccctgattcttgcatcagctcctccttcttcctgccatccttctgctgctgccctctttttcctcagcttctcaaaacaactgtccagaaatcccagcgtcttcctaattccacacgccatctgcctgctgcctgggactctttacagcagtcatcacagctccccagagcccacaagaagagggtctggagagaatccaaccagcagagttgggagactctggtcaagaggaccaaaacactctctaaggaacttgagcagaaatttcaccacctgcttccaggatgagggtcaggaaggacactggacaatgactggagtctggaagctttggagagcaaccaagttcatgtaaaaagaaactaaacaaaaaactgcccttctcccaggggcaatagggagttcagccctcctattcctctacagggaataataacatcagccataggatcctgtcccattgtacccattaaagctcttcaagtgagcccatccatgagcccctgcctttaaagagcagcctcaggatggcacagctgtgactgcccccttgctgtcctgtgactcactggggctcctcagcccaagcagggccctggaaagttatttttccatgcctttaatagtacaggctacacccctgggcctccttcaagtctctatctaaaacagccgtagggcacagtggctcatgcctgtaatcccagcactttgggaggccaaggcgggaggatctcttgaggccaggatttcaagaccagtttgggcaacataatgagaccttatctctgcaaaaaatttaaaaattagccaggcttgggggtgcatgcctgtagttctagctacttgagaggctgaagtgggaggatctcttgagcccaggagtttgggtgagctattaatataattgtgccactgcatttccagcctaagcaacagagaccctgtctctaaaaacaataataaaataaaataaaataacagctctaggaaaccctctctcatgcctatgccattttctccaccaattccagaaacctgggcagagatggcatgaagggtctgtatcgactgtcactgtggcttctctggtcctgcagaggggccaaggcagagtcctggagacccagggctacgtggggacccaggatactaccttcagctgcccacagcttggcccaggttgcctcctgccaagtgaagaatgtctccccaggatgcgagtgccactggcttttaactataatatcaggataattaagcttttctgtgagcacagtttgctgctgatgcagctgcctggagccctggcatttattgagcgcaaagtaataatttattatcctttgtacgctcaaaagccatcttcattatcgtcccaagacggaactgccacaagggcacgcgggcctcaccagctgcctcactctcggatgtcttcccaggtcacccttgacgccctcaggtaccaggattgggtggagaggggtggggaaagtgttgctctttctcatggagaatcagaaggctacagtgagctattaattgaggttccttagcaggccgttaacgggaaagag

SEQ ID NO: 17644 - DNA, 2300 bp, Homo sapien
actacaggcatgcaccaccatccctggctaatttttaacattttttgtagagatgcggtcttgctatgttgcccagactggtctcaaacttctggcctcaagtgattctcccgcctcggcctctcaaagtgttgggattacagacgtgagccactgtgcccagcctcagtgtctttgtataccaggggtgttgctttgggtaagatagaatctctctaagccttcacgtcttcagccattaagtaatattttggttatggctgtgtaaaaaacctccccaaaatgttgtggctgaaaacaacaaccattttattctgtttcatggttttgtggatcaggaatgaagcttgactgggtgattcttctgcactatgcagcatcaattgggtcacttggtactatttggctggtgctaggctgggctggaggaaccaagatgacttcacttttctttgagacaaggtcttgctatgttgcacaggtttgtctggaactcctggcctcaagcgatccttcctgactcagcctcccaaaccaagataacttcattcttatatagagttctccacctggtcccaggtcctctccatgtgaactctcccatagggtgcctgcacttctaacatggtggctcagggctcagagagtaagggctccttggccaggtgcggtggctcatgcctgtaaccccagcactttgggaggccgaggtggtcggatcatgaggtcaggagttcgagaccagcctggccaatatggtgaaaccccgtctctactaaaaatatgaaaaattagctgggtgtagtggcgctcgcctgtaggcccagctactcgggaagctgaggcagaagaatcgcttgaacccacgagtcagaggttgcagtgagccaagatagtgccactgctctcctgcctggatgacaaaacgagactccctctcaaaaaaaaaaaaaaagtaagggctccaacataagaagaggaagctgccagtctctttagggctgtgccagaaagtgtcatggtatcacttttgccatattttatgggtcaagcagtcacagagtctgtgatagaaggagtgaaaaagaatttggggccatccttaatctgccaaaagtaggcataaaaatactcctaagccaggtgcagtgtctcacacctgtaatccaagcttttgggaggatgaggtgggaggattgtatgagtccaggagttcgagaccagcctgagcaacacagtgagccctcgtctctacaaaaaataaacaaaattagctgagcatggtggcatgcgtttgtagtttcagctactcgggcggctgaggtaggaggaccccttgagcccaggaagtggaggctacagtgagccgagttcgtgccactgcactccagcctgcgtgacagtgagatcccagagatcctctcaaaaaccaaaacttcaaaaacaaaaacccgcagaaactcctagggctatgaggagtaaatgagataactcatgcagaggcaaatttaccatgaagcaaatgaaacttcaaccatgggggtccttaattgaacagtttcttccacatccgggcatctaattttgtattaataattctccttttttctttttctcaaagagtaccctcgaactgtatgacaatcaagccctacccaaatgccagtatcagtacttactaagcatactgcctgggacagagagatgctcaacacggggcccctccaggcactgggctggcctggtcccctctctgtggctgaggagagggctcctcctctcactctgccctttctgtcttttcaggatcatttcttctttcttcaaaatgaaagtaaaacatgctgggaataatttcataattacaaaactgccctcccaattggcccctgcctctaccccctgacctcaccacccaccagggaggtgggtcttattctgggcatcgtgccaagttcttagcggggccctctagaatctctaaagcaaatcaggctgaagaggggaaaaccagcagggggaggcagcattcccggtgcccagtatggtctaggaggcattgaaattccagggccgaagtcctgagacaaagatcataatgagacaggaaggtggcaaaggaaggagcccatttgcatgacaataattgagccaagaatagaaagccacagggatgcaagggtgaggctggcggctgagctgggctaaacctcacaaatcagactacccagctctgctccgcaggggaagggagactgagccctgggccaggcttggcagagagggaagcgggaggacac

SEQ ID NO: 17645 - DNA, 2300 bp, Homo sapien
atccctcctcaccctcccaggctgctttgaaaccctagaaacctggaatttaggttctgacccctccaccaacatcattgtgctcaggcctgccccactgttttcctggagtggggaacccagaatggaaggggcctgcttcgcaccaggcactaaagggacggacgggtctctgtccccatggtactccagttaaaacagatggaggtgcagctagaggaagagtatgaggacaagcagaaggttctgcgagagaagcgggagctggagggcaagctcgccaccctcagcgaccaggtcaggggatgctccacccaccaagcctggccggctccctgcccatgcggcctgaggagtggggatcctagggatggggagccacgaacagagctgtcgggggtgggggtgctgcaaagagcccatcgtcatcccttgtgggatgggggcatcaccatacattggcacacccagccctttatcgctggttggcatgaccctggctcttccagcatccttatggggacactgataatgaggacgtggtgaggagggagcttggggaagataggaggaagccctgtgcagagcccagaaccccaactgctggtgcccacccaggtgaaccggcgggactttgagtcagagaagcggctgcggaaggacctgaagcgcaccaaggccctgctggcagatgcccagctcatgctggaccacctgaagaacagtgctcccagcaagcgagagattgcccagctcaagaaccaggtatccacagagagcacacggctgatccaggcacaacagagcttacctttccattctctttctctctctcgctcctctcagtggttcttgagtccttgggaaggaaagtgacaggaaagaggggagagccacgtgtagcagctagactccccaggctctgcgtgtgccttactgtctcaccgcccagcctgggatggtgtggatggggcctggtgcccaccagccatgtcacgggaggagatccccacgcgtgcaccaccacacagccatggccctggggtctgaagtgaatggaggaggagaaggagggcatccgagctccctctttcctgtacagccctcctgcccccaaggaatggctgacatctctccctggggcgggggtggtctgtgtccagctggaggagtcagagttcacctgtgcggcagccgtgaaagcacggaaagcaatggaggtggagatcgaagacctgcacctgcagattgatgacatcgccaaagccaagacagcggtgaggggccaaggtgcccggggcagagctcggggggctgaggcagaatagagctgcctctgtggctcccttcaccctagacaggtccctccacgtcaggacttgtgacaggtcctttcacgccaggacttgctgcaggaagagcgggcctcccctcctctgcgtctctccacactgagcagaggcctcggggaggagcgggcagaagagggagccagcaagggcccatctccctgtttaaccacctgcctacgggagcttggccgcaggccccaacaccataaataaaggcagctaatgtggctgagggatgtaaacaggtgcctagagattagcagaagcacagataagaggacaggatggcttggcttccttccccttccccctgcccagcccactgacaagcccaagcggcagctaattagagctcttatttaatgcctcccttttaatttcccacctctcccacggcccatccatcggcagagaattcattactgggatgcggccagtacaggcagctccttgagcatcactggtcctgggacccaccccagtgggcaggccccttgggcagggaatggggcaggggaggaggctgggctgggctggtggcttcatggcccctgagctagtcacctagctgctgagagatgccaatctcacgggcttgatttatccccatgacatttgtgctcctcagcagttctcaggtgagtaattcaaattccttaattgtgttaaaaaaggttgttataaaattaccattttatttaaatctgagttaataaatttcttggcggaggcttccccagctccccacagcccagtaacaagatggatggggcagagaaggagccaacacagtcattttggtttggaattacaggctaatagattcattcatttcctgaagctgctgttggatctctcttcccctcccccaaggaggggactggctgtcggggctggatgcccagggagtgggcagtcccagggaaaatgagagtctaagccaggaga

SEQ ID NO: 17646 - DNA, 2300 bp, Homo sapien
tatgtaccagtctcatactggttgggtaagagtcagtaaaggtgtaatcctcattttacagataagggaaatttaagtcacctgcctgtgttcacacagctaaatcattcattcattcactcattcatttaacaaatggacatttctgtgctaggccttatgctggccttagagtcttgcagttctcagccttggctgcatgtgagaatcacctggggagcttttatcaataaaaaatcccagtgtccagccaggcgcagtggctcacgcctgtaattccagcactctgggaggccaaggcgggcggatcacgaggtcaggagattgagaccacggtgaaaccccgtctctactaaaaatacaaaaaattagccgggcatggtggcaggcgcctgtagtcccagctactcgggaggctgaggcaggagaatggcgtgaacccgggaggcggagcttgcagtgagccgagatcacgccactgcactccagcctgggcgacagagcgagactccgtctcaaaaaaaaacaaaaacaaaaaaatcccagtgcccaggcccctgctcccagaccaattatgtcagaaactgagagggaaagggtgggctccaggcatcagtatttttttcaagttccccagtggatttcagtgagcagctgaggctggcaccattgttctaagtagccactgaagatgtgaagacctgtgacactgcacgtgcttcagaagggccagatgcttcccctggggggacatcccactccctagagagcaggacacaagcgccgtgtcctaagagtctgtgtatgtgactatatgacagtgagacttggacagcgcatggcaggtaggaggcagggctgggtttccatcctctctggcagtgcttaccaatcttttcatggagaaagtcagacaatgtatagaaccaatggcccttagagctggccaggggcaagaagcatggggtgtatgccagactggttaggaggcggttctgtatcagggcttcctagcaccacccccaccccattttttttttttcctaaagaggaagagggaggcaatgactgtttccttttttctgcagagctgacggcttctgagacttgctctccctgtcttttggccccttgacattctgttctccagctcccatttcagcgtctcagcgggtccctagtcctggtctaggcatcccatggtgctaactggagagccaggccaggatttctcttcacaagaaacactggcttttcacaggcagccatcactcattggctagacacccatgacttcctctgtctgcagggctgaggcccaccccaccctcctctctgcctgtgcagtccctggcgtctgtggaggggagagggatgtaaacaaagagagtgtaattgattctctgcatgtcccctgtgtgctgatggcagtggggcagtaagtgggcctgcccgtgtgggtctctgctcctgccagaccttacaggactgctttgcggctgctgtttgggcacagtgtgcagtgggccccgtgtgctgtcttggatgtgacgttagtggctgtcttggcctctgccgcagtaattagatggctagggtaggcctatgatttgggtgttctcaagaacactgtgttgattgaatgttcgtgcatgctggtgtgtgtgtgtgtgtgtgtatacgtgtacatgcacatgagtgcgcatgtgcttgtctcaagcttggcctgtggggccgggggctgcaggtctcaaattcctctgctatttttaggagccatatcagcccagctgtcccggagctggggtgtgtgtccataggcaagtctcaccctccctgtccttgccctaaccccctaacactgcctgccccccaccccaatggctttaccctaagagccttctccttcccttccacacacactgctgtatcaccctctccctcctggcatacctgatacccgaagtcctccgggctgctggctccaactagggctgggcagctcgggacgggaggggccggggagagggcgggaactgggcggggccacagcctgtgctattttgagctgctaacggagccagagcagcatcagagcggagtctccttgctctgggctgctccaggccaggccatgcgggtgagtgtccctctgaccccccaccccggaaatgtcccaggctcctcatgctatttcctcatttaggaaaggagggacctttttgtgatttccccagatgtggctgaagtaggtggggagaggggtggggcagccttggggctcctctccgagcttcttg

SEQ ID NO: 17647 - DNA, 2300 bp, Homo sapien
gagtacagagcccattgaatcagccgcctttcccttgtgctttggagcccttttcttgagcaggttggtgccctgttgttgtggcaacaggcctggcctaatgttccccaccctttttagttcaggggctactttctatctggagatattgaaagttgctctcctgaggtctctggcttcctgacaagcctcactggctctttgtccatggcttcccacctcctcagcttcctctctgtttttttgtgatgaagtctttccaggaaacatcctcctggtttctggatttgacatgacgggttatatatagcctcgggtggaggtgtgcttgtccattttgggttgaggacatgggggttgtggcctcaattccaggaaaaccatggctttgggggcagctattgtgttgagggattaggggaatgagaagggttgtaggtgggggtggagggtgggcatgggaggggccacaggctggcggtcacttcctttgggagctttgaactttgaacagttgatgacctggtgcctggtagctctgagtgtctagtttgtttactctctcctggcctggcccaggtgccagagtgtgtgcctgagggcttcctcctgcgccccagactttcctcatgtgggttatgcccttcctgactcccacctggtctctcagcctcactcctgggctgtctgggtagccagccagttccctggaggccccctcactggccctggtagtggctattcattgaggactgcatgtgtcttcagaaactgggcctgaaaactctgggtcccccagaggcaggtacctaaaggtggactgggtggggcagaactggggctcatgtgaaagggagaatccaccctgctgaggtggagctgggagttgttggaactcaggaagccttcatctggacttgctgtgtcacaggtcttcagggcagcagggctgttcttaatccttcaaaccagaggtctctcctcagccagatcctctcacctggggtggacgccacaggcaggagccagagcatccacgtgagctgggttttgttggtggcctggggtcccaggcctgagtgtggtgggaaaactgaggggctctggctggttgtagtttaaaggtttggggcagtaggagggcccagcccactgtctgctgtaattgacaggttcccacaggacttgggattggtagggcagcttgatggagtttaagttctgctttgggtcagacccccgggtgctttaagatctgcacaccccaccccatcaccatttcttccccctagcattttccaaggtggcctgaattagaggagttggggaggtgccgaggtaggagctggattgggaggggtggtgagcagacctggtgagcctccacttcccaccttcacttccctgcccttcttttgaggtaggaattgcagggcttgtaaaatgtcaatttcccttgacattttaaacagtttagagtcaggcagcagttttggttgttagactgatgattttacaggacccagggccctttctgtctgccaagtagtttatcatcacttacaagagattattgtgattattctctaatattcagagaggttggatgatgggctgaaggtcacacagcaagtcagaggcagagcgggattacaacctgcagtgtgtggttgagcagaatagctctccagcagaggctgagggccaaatctgagctgtcaggcccttgaagataactgtagctgaaatagtggaggcttagagaggggaggggacttgctcaaggtcacacggaaggggatgttagcggaactgagcgccaggcggtgcacctggaagagcagcagggaacctggcgaggccgcaggagctctcccgctcgcgttcctccatggcccgcgggattgctgccttccgggggagatgggatcgcagcgggaggcgccgcggggctgcggctgcgccggcccagccgcggggaaacgccaagggccgcccggctccccgcgcggcggcgtgagggctggctaatgtcacgtgagaagcgtgcagtcggcgtgagggagcacacctggagccagataagctccgtgtgacctggcagggagtcacccggcgctgcggagctcagcacagccggccgggaggaggctccccctggagcacggggccaggccaggtgctggctacccctccggccgctgctacaacccttggcgaggggcagagcgcggggagagagccggggtcccggggctggaggaaacggccgctcagggaggtcagaggccaagggagag

SEQ ID NO: 17648 - DNA, 2300 bp, Homo sapien
atttttgtgaagggtataaagtctgtgtctagacccccccctttttttttttttgcatgtggatgtccagtttgttgaaaagccccatgtgttgaaaagactaagcttatataattttcaaaacaaattttgagggagggagtcactgttattatcccaattttttggatgagcaaagtgaagcacagagaggtgatttataaaaaatcacccagagtaacacagctagtactttacagaactgagattttgaatccaggcaatccagctccagagtccatgcactcaacccctatctataataataatgtctccctcataggttcattgtgaggagtagagatagtgtctagtatataataggtactcaggaaacactaatgatagtcgttgtcctacttagcctgcaaggttccgctcaaatgtcatgtttttggggttttttttttttcttttttggagacagagtcttgctctgtcgcccaggctgaagtacagtggtgtaatctccgctcactgcaacctctgctccccaggttcaagagattctcctgcctcagcctcccaagtagctgggattatagacatgcactaccacgcctggttaattttttgtatttgtagtagtgatggggtttcgccatgttggccaggctggtcttgaacgctggcctcaagtgatctgcccacctcagcctcccaaagtgctgggattacaggcataagccaccatgcctggcctcaaatgtcatgtttttgaagctgctcttctcactcctcaagccaaataagcctcccatcatagcacctatctcatcatccaagtaatgccagcatggtgaaccctactactgtcacagctcaggtctacctgttccccatgtgatttccctggagatatgccatgtctgatctccttctgtgtcaccccaagtgcctggggctgcacttggcacttagcaggcagtttgttaaattgaatttgagttgcatgttattccaaaatgtgtatcccgcctgggtctattcctcaggaactccctaactcttactcaactctctgctttctgagcctccttgctccagccttccctggtctgtcaggttgggctgcccttgcctggagaagttcctgtttgggctgtctagggaggtagcagcatttgtctgctacacccttcttcctgcaccaccccactcagtttcttccacattctggcacaccccactccagcatggacactgcccagggaagtgtccccatttctttctttctccaaactctagacatagcacctatcttggaggcctggtatctggatgtcccttggcctctcccaggaagtataaactgtcttcttggtgggtacagcagctcacttgatatttacagcacacagtggacccagggacagactgcattccaaagagcttctgaaagtgttaatcttggcattggtgaactcctttagggagtgagtggcacttacagccatggctcccgggccctggtacgcctcttgatccactccattttgaggcagggctgtatcagaccaagctattgggagtctgtttttaccttggggagtgcattctggcagtgccatctcggacatggcaggcagtacctggtctggactgagcctggggcaccatccagcagggccctgtgtgtgcctctgcagagccaccttgggaggaggcggccagtaagacttaattgcttcctttagacagcactaccttgaacacagcctgcagagttcggtgcctgccttggacagcccctcttctatacgttcatcatgaccctggtgcctgtcctaggcagtgccactcagcccctttcggacccttttcggacagcctccagtgcccagtgcagacagaaactccaggcagggcctctctcagacacagcgagaggggcttcggagtccacagcggacggaggctgccagggcagcgcccggcccgcctggcccacgtctggcggcgcgcactggcgctgccaggcaggccgggcgtttatccccacagccgccagcagggagctccctttcggctcggcctgcgcggtcgctgggggcggcgctgagctgcgccgcgctgcgctctgctccatccctgaccgggccgaggctgctggatgccgcgtctccgcttctgctgcctgccgggcgggctccggtggccggtgagtgccggtcggcggcggcggccgctcggtggcgggcccggcttggtggggcggcggggcgggctccggccgggagggagggcgggcgggcggcggg

SEQ ID NO: 17649 - DNA, 2300 bp, Homo sapien
gtatctttcattggaaagagagtagggtaaggagtcataagcctacaatgtatcaggcagatattctatttttgaggttgagagagtctgagtgacttgcttcaaatctcccagccaggaaactgggatttgaacccacatctgcctggctcaaagccttccacatccattgcagcctcttgcttctcacaatatctgtgatgcttgcagaacacatcttccccttcagggcccctgcggaggcccacgattcccctaccttaccttcatcaagtgtcctgaagtttctgggagaagtcattttacactttaaggtactatacgcatagtaacttgggcctgtgagatttccaaagacctaaaacaattcagtaaaacgtcaaaattggccgggcacagtggctcacgcctgtaatctcagcactttgggaggccgaggcaggcagatcacttgaggtcaggagttcaagaccagcctggccaacatggtgaaaccctatctctactaaaaatacaaaaaaattagccgggcatggtggcaggtgtctgtaatcccagctactcaggagactgaggcaggagaatcacctgaacctggggggcagaggttgcagtgaggcaagatcgcaccactgcactccagcctaagcaacagagcgacactctgtctcaaaaagaaaaaaaaaattggttttgaaggtgtgggtggcaggaattctcgcccctggcctgggtgagctagaggggagaagcaaggacatctaggtccctatcaccgcttgcctagacaacttcacaggaaggcccccgggaatctgagatggagcaggtgaaccctttacatctagatggtgagtccaaaggaggtattcagaaggttgccttcttccccttcctactgctgcccaacgatgacccgcaggctgaaagagccctttcctcctggaactgatgtgggacctggcctgtttgggagcagaatggtgaaaggaattaacatggaagacaaagggacaggcagccaagatcatttgaggaggaaaaattgcttcatttctaggctccttccccttttgaaacagataagttacatccattatatgctcagtgtttatattcagaactgcagttctagccaggggggtctctttcctctcctggaattttttgggccatttatgcattactcctgagggagggccagtgcagggcagtgactttggtgttggttagaactggattcgagtcttggctctgccattataaatactgtgaccttaggcaagtcacctgattgttctcttagtttcttaatctggaaaatggaggtgaaaatagcactgttgtggtggctgtgaaaaagtatttctttcttttgttgtggaaaagtatttaattcaaactttttaagtaaagcatttagcacatgtctaatatataggaattattcaataaatggtttaattcttttttaaaaaacccaaaagttatagctccaaaatttttaaagaaaattgcaaaattaaaaggaatatttaataaaatagctacagagagacacatgtctgctagtcaactataattgaagtcaacccttacatagttatatataaatacagcataataaagattcccaagaatacaatgaaccattttttctcatattgagttcagaattacaataattctttcacatttttaaacaacaagaaatgcacatctgtatggaagtgaggtgcattttgatgtgtttgatatgacatggggtctcccagggtcttaaggtcttaggaagatcccaaggtggtgtgaggaacctggagaaggacaagagacaagtactcatggcagagacttctgtcctcaccccctagctgctctgagagattaagaaagccaaggcctgcagcagccagccatgcccacaacagaggggcctctctggatttctgtatccctggtttaaacaaaggccccagcaagctgagccaccaaagctctggggatcatgaggaacaaaggcagagggagagcagagtgctgacagggccagaggccagaggccgcagggctataaagaggagggccacagagcaagtggtaccagatggagacccaggctgagcagcaggagctgggtgagtaaggccctcagggtgcccttgcccttcctctccttgccctgcagagacatgcccaggagagggcccagttctcctgcctagtgtgtagagccttctagggtggctggagaagagtggggaactctggcggaagacagccttctcttgtcaccccaa

SEQ ID NO: 17650 - DNA, 2300 bp, Homo sapien
actttgggacaaatctctttgtgctgtttggtaacacttaactctatttgttgcaatctttctccttaggtcctcacacaattccttacagagcacttattaaaaaaaaatcttaagagttgatctgttttctgattattttgtgtaagcttctaaacaaacttcagctgtgattaatttagcacatttaaataacgtgttattgtttggtataaagaattttccttcaactcagagtattagtactgtagcataaaccaaatacagtctagaggggatttttaacatccctccattataaagactgaaaaaggggtgtgtgtgtgtgtgtgtgtttatgtatgtatgtatgtgtgtgtgaggaaaagatggagatattaaaaattagtaaatgaatgtgtataagacattagtattcagagaatgaacttgtatttattttgtgccatttgttttcattacacagaaaaaagtcaggtggtttaaatccttaaaagggtagtattgaaaaatggcactaagaatgaaattatgacctatttttttaatagctatgaagatactaattatgggtgaagatttctttttaaatctgttttgattattgtaggcttctgtgtcacataccactcttgtaggtgtcctcaataatccccttttcccacaaaatacacagggtgtattatctttctctttattcacccccactttgctgaactgaagttaattacatagcctttcttctaacctccttagtaatgaaccttcacataaagtgtatttacagcgtctgtggtagccagcccttcctcctctactttctaggaggggatagccaataactaggaatttaatgacagatttttttttctttgaaataaatggccagagtttctccattttagaattttgttgtcctccttaatcatctgcttacctagtcattactcaatctgcagaaacttcataaaggaaaagtgctgcattgtttttacaaataacagtttgtagggaaaatatgacaaacctcaactatgggagttgtccacaatacaaaattttgaaaaaacattacatagtgataatatcatacttggttgttaggcttgttgcttccccacatcagaggcatctaatgatttatcttttgtaattgctgtgaacttttttaaataagccatttagtgtgaaattgtcatgtatcaaatggctattggaaatggactttactcaattttaattccactgtaaataaggacggagtcattcctacaaggctctcttcagagaaatagattaaaagtccaatttccaggtattattagtatagttatgccgctgggccacatcctcaacaacagctgatccctcttgtataaatatgttaactgtgcagaacagttatgttatgggacaaatataatggtcattatggtcagattggttgatgccacaccagtcaaggtagagtctgatagggcagtatcttaataaccctacccatgacttaactgttggatttgaaaggaaaacgtaggatttgctcttgtccccttacccgccacaaaattttgataatttgtttaaaagggagaggcagaggaaaagactagaagcataaatagctgctttaggtttgccagaggcacatagcttaacattagttcttaatatcgatgttatttttactaatgtaattaatcaacagagcaccaagattctttcatggtgaaaagggtgggcttctgttttggtatcttaaaatgtttcttttaaaatatacatcacctgtgtgagaaccaggaccacctgggagagtgatgaatcattggctccactcaaaagcattgctttactgagttttaaatttcacactgttttgccgctcaagaaaggtcttaaagtagttaaaggatgccagcaatagtgcgaatagaattttcggttgtctgcataataaaaacacccattgcagcatgattggtatgttgctcttgcattattgggaatggtaaatcagttatgggctagaaactatggaatggccgtcctcatatgtgatgggattgctgattcagacttccctattttccatacaattttgttatgtgcagagttctaaagccattttataatactgcagtatcccccccccccccacctttttttttttgagacggactgtctgttgcccaggctggagtacagtggcgcaatcttggctcactgcaacctccacctccctggttcaagcaattcccctgcctcagcctcccatgtagctgggattacgggcgcac

SEQ ID NO: 17651 - DNA, 2300 bp, Homo sapien
cccagcactttggaaggctgaggtgggcagatcacctgagatcaggagttcgagaccagcctggccaacatggagaaaccccatctctattaaaaatacaaaattagcctggcacagtggcgcatgcctgtaatcccagctactcaggaggctgaggcaggagaattgcttgaacccaggaggcagaggttgcggtgggctgagatcatgccattgcactccagcctgggcaacaaggacaaaactccatctcaaaataaaataaaataaaatttaacaaggcaacacaaatccttactgtatagaacatgccaaaatttggtcatggttttcaggattcaatgacatttgttattggaaaccagcttttacgttttaaataagcttttgcattgacattcattaatttcatagcataaactttttgctttcaagcttcttgttcctttaatgttgtcctgttgtaggaattcaagccacattttaaaaattcaaaaacgtaacatacattgaggaaacagtccatatgtccgttgctgagtgaatgaacaaaatgtggtatatacatataatggaatattagtcagccttaaaaaagagggaaattctgatgtatgctactctgaagacattatgcaaaaaagctagtcacaaaaagacaaatacagtacaatcccacttatatgaggtacctagaatagtcaagttcgtagagacagaaaacagaacagtggttatcaagggatggaaggaggagggaaaggacatttatttttattgggtatgaagtttcagtttggaatgatgaaaaagttctggagatagatgatggtcatggttctacaacaatacgaatgtacctaatgcacctgaaccatacacttaatattaagatggtaaattttatattatgaatattttacaattaaaaaaatcccccaatctataacatacattgggaaaagtgcattttatctgtatattcagtttaacaaataattactaagcaaatatatgtaatcaccacctagcccccaaaatgaaatattatcagagtaacctgtgtccctccccatcacaaccctcttccttcctgagtaaccactatcatggctctaacatttgcttttgaaaatcatatactgtgatgtggtaatgcaggataagttaaatctacactacaaaacgctacagaatatttcttttaatttcaatttttccataagtgccaaaaaaaaaaaaaacaaacccacttaataacttttaagtgctctttctccccttcctttgctcttgaaacttctcattctaaaacctattttggttccacagttgacctcacctgcagagtttaattaaaaaaaaaaaaaccttcagtgtaaattttcattcctcctgctctcccttgcctccaactacaaagaaacaatgatttaaaccctttgtgcccttttagaaaattacacagataccccattgtggaaccctataatcccttcgtggaaaggaagagattagcatatgaatacaaagcaaaatgaatccagaatacaaaatgatctactggattgtgaagctcttgtatgcttaaaaatgtatttatttcctctttttgtattgcccctttagtggtctcggggttaagggaattgagcttccctttctggttacccggaaaaggattaaaaacaaaacaaaacaaaaaacaaaaaaacaccagattctaagaggtgcaaagccagcagatggctcacagcaccagtggaatcgccagtggaatctgctaccctcgacacgagcctgcttgccggcgaggagtgtagaaagtgctgttcacagactgcgtggtgaaggagagaaagcgacagaagagagagccatagtgctgacgttgaaggcccggccctgtgaggttgcacagggtaagtggcgttggccaggcggcagcggcgaaggggaaggaaagaggatttgagctgggggcggggcttgcggcacagcgtggctcctgattgttggagtgcggctgccaatctcgcagaatcgctcggttaaccagtgcgctggcgagacgcgctcagatatactgagtgagccctgagaagcagtctcagatcctgacggtgcagcagcccgcagcctcagccagggagtcccagccgctttcaatggaggagaagcccggccagccacagcctcagcaccatcacagccaccaccatccgcaccatcaccctcagcagcagcagcagcagccgcaccaccaccaccattattatttctacaaccacagccacaac

SEQ ID NO: 17652 - DNA, 2300 bp, Homo sapien
cttgcagtgagccgagatagcgccaccacactccagcctagagacgagtgagactcagtctcaaaaacaaaaacaaattgactttgggttgggcatagcggctcactcctgtaattccagctactcagaaggctgaggtacgagaattgcttaaacccaggaggcagaagttgcagtgagctgaaattgtgccactgcactccagcctgggcaacacagtgagactctgtctcaaaaaaaaaaaaagacattgactttggagttccacttccatcacttactaatgtcggtagctgcccttactttgtgtcattctcataaccaagctgaggattcttttctttatctgtaaaatggggttaatattaccttcttcagagggtcatgtgaagattaagtaagtaagattaagtaacatgtaaggtgcttagcaccatgcctagtccatggaaaatgttttaaagtgttagctattactgtgtatgtgcaaggaggtaaatattcatcccacttctctgacactaccctctggcaggcatcccatgatcagtgcatcatggttgattgtctgggacatctgtggctataggaagggttgggcagcatgtttgtggactgagaggtttttggaatgtatcttcaggacgagttggtgattttattatgccctttgctatggctgacatctgccaggatttaaaaaaatctacatgaattcctaccagatttctgccacacatcatatgaaacacaaacagctggcaatcaaaacataaaataagttaatattttattggcttgggattttctttaggcttcctctttggacttctctttactaaataggagtaatatactagtaggaagtcttttggggccaggtgcactgattcatgcatgtaatcccatgactttggtaagccaaggcaggaggatcacttgaggctagagttcgagaccagcctgggcaacatggctagaccctgtctctacaaaaaataaaataaaaaattatctgggcatggttgtgtgtgcttgtaagtcccagctacttgggaggctgaaggtggaggatcccttgagctcaggagttcgaggctgcagtgagctatgatcaccactgtacttcagcctgagtgacagagcaagactctgtcttaaaaaaacaaacaaacaaaaaaagaagtcttgtggttgaaggtgacaattcaaatcagctttttttttttttttttttgagacggagtcttactctgtcgccaggctggagtgcagtggcgtgatcttggctcactgcaacctccgcctctcgggttcaagcaattctcctgcctcagcctcccaagtagttgggactacaggtgtgcgccaccatgcctggcttaatttttgtatttttagtagagacggggtttcactatgttggccaggctgatctcgatctcttgacctcgtgatccgcccgcctcggcatcccaaagtgctgggattacaggcgtgagccactgtgcccggcccaaatcagcttaagggtgggaaaaaagaaatatattaggccctgtaactgaaaaatcagtgccacaggagcttaaaaagttttgttaagtgtttgactctgtctcccttttttctgtctctccacacaccacacccagctcccaatccctgggtatttttctttatagattgggttttgttataaagttgagtgtccatactgggtcaggggatacagctggtgaacttgggtgcttcccactgctgccacctagttttaatacacctcaacactgaatgctgtcatggatactgtctacacacaggaaatgaatcaggaaaatttctaatatctgttttaatcaaatgcttcctttggccaggtgcagtggctcatgcctgtaatcctaacagtttgggaagccaaggtgggcagatcactagaggccaggagttcgttaccagcctggccaacatggcgaaacgccttctctactaaaaatacaaaaattagcccagcatggtggtgcatgcctgtaatcccagctactcaggaggctgaggcacgagaattgtttgaacccaggaggcaaaggttgtggtgagccgagattgtgccactgcactccagcttgggcaatagagtgagactctgtatcaaaaaaaaaaaaaaatcaaatgcttcctttactgatatgttgtattatacccactagagacagtgagtgtctcaaaattcaggttttaaacaacctctcctacataacctgctctctcctactcactgcccagaaacccccgaa

SEQ ID NO: 17653 - DNA, 2300 bp, Homo sapien
aatcatttgatcctgggaggcagaggttgcagtgagccaggatcacaccactggattccattttgggagttcaatatatatattacatttttgggagaaaataagaaagtttctttcccaaaaagccagagaaaatcttattgtacccattggctctaattggatcatgtgcccatccctgagccagactagaggaaggtcatacatacactgtatacacggattgcttaggtctgatcaacatgctccttccttggagcacagatctactatggccagcctggtctcgaactcctgacctcaggtgatccgcccgtctcagcctcccaaagtgctataattacaggcgtgagccaccgggcccggcccagagttaatttttattcatgaaactcatataacaggtttatttatttcagtcgttttgttggttaaagaaccaagattttttatgactacactttgtgtacacttttaggttctctcttttttttttttttttttgagacgagtctcattctgtcgcccaggctggagtgcagtggcgcaatctcggctcactgcaacctccgcctcccgggttcacgccattctcctgcctcagcctcccgagtagctagctgggactacaggcgcccaccaccacgcccggctaatttttttctatcttttaatagagacggggtttcaccgtgttagccaggatgctctcgatctcctgacctcgtgatccgcccgcctcggcctcccaaagtgctgggattacaggcgtgagccaccgcgcccggccttacacttttaggttcttgaataagtactgagggagttttccctaaaaaaaaaaaaaaaagttttgagataaaagaataaaaactctacttcttctttgcataggagtctttagtttgtttgctgctcttgttccaaaacttctcattactcaacctactaaacccacagacacttttcaagaagttatctcttttctacatcaccaatatatagggtggcttagatctgtatttccaagtcttactgtcgttccaagaattagtatcaactattagaatctcaaaaactcaactgcatactgattgcgctgcccagtgtacctctgaatcccacgggggagggggtgtagaaccgagttgtgcaggaatgggatattccacacttcagggcaaacttattcgcaggatcagtggcgggctttggaggtgggaagcaggaaggaaggggaatgcagataaactcttcttcttcagatctccggggtgaaatgaatgcacctgacgcccgcgtggcattagaagctccgcgaactcagtgaggccatgctggacagaggctggaactccgggccaccgggacaactctgcccgtagcaagccttgcgcgctcctgtgagggcgcgcgcgcgcgcatgtagtcgtgtctcgcgcagggtccggcctgtcaggcggaaaatctcgcgagatcggagacgggggatgacggtctggaggaggggagtggtgtcgggtaaagggggggaagctgggcagcggccgggctctgtggcttcagggctcggggagagagagggagggtggcaaagagactgagtcggtgccgccgcctgcctgaggagagaggaggggtcccgctcgccctgcgcccttcgcgggccgaaagcactaggcactcgcgaacatctgaggcctcccggccccgggggaccccgccccgccgtccgccggccggcccgcggcctctcttccctttgtgagcgcctccttaccaggggtggtgttggtggcggagggctgcgcgtgggcccgcccgccgaggggccgcggcgggggaccgagagggcctcggctgtgtgaggactagaggcggccgaggcccgggccggttcccccgaggcggcgacggagacggctcccggcacttccccgcgccatcttaactgagcccaagcgctgagggcgcctcctcgaccccggtcgtcccctcgcccccccccccaccccccgccgccgccgccccttgttgcagagcttgggctgggcggcttgctggggctcgggggtggggggcggcgatctgtcgccgggccccctcctcctcctcactcctcaccctccagggtagcggctaccggagcgctgcagggggctgcgcctgcctgctccgccccagacctgtcggcgaaagggtaagggcacctctgctttgggaaagggggatatagaggggggcggggaaattcggcccactcgggcctgtgtgtggaagaagggatgtgggagtggggt

SEQ ID NO: 17654 - DNA, 2300 bp, Homo sapien
ccaaagataagtgagaataaagagagaactctgttactattgtttttacatcaccaaataattatttaatatcgttagctaagagaagaattggctatgaactgtactttaacaactgacacaactgcatacaagttataaagtttaataatctttatcatcttggaaaataaatctcttcttgctaagtatcagtttttaaaaattgccccatgtattagatatgtatttttttaacaaaaatgttctgtgtattaattattttgaaataaattttaagttcacaaaaagccattacaagaagtggaaatagcagcaattacacatggtgctcttcagggattagcctacttacattctcatactatgattcataggtaagtgctttggaaattatatattgataagtaaatggcttgttgcatataccaactttagaatttattaactctaaagtttttattggttaaagccaaataaaataatataagctcatatttttttagatttttcatgtcctaaaatgaacatagttgtatactttatctcactaggataatttttatctttgcctatatgtgctgctggaccttgtaaaaatatgtatactttctagatttgtggtagaaatttagctatagaatcatttaatttgcaaactggaatgggcattagagaatcatacagtttttctttctcattttaccggtaaaatcactgatgtctcaatttgtgactaatttcctaaaggttgcaaagctgagtagatagagctagaactaaatctagatcttttgtcttcttggtaactgataatgacatatttattccattgattctatgacatggacgaataaaagctgcttaaggccaggcgaggtggctcacacctgtaatcccagcactttgagaggcctaggcaggtggatcacttgaggtcaggagttcgagaccagcctggccaaccaatatggtaaaacctcgtctccactgaaaatatgaaaattagctgggctttgttgtaggcatctataatcccagctactcgtgaggctgagagaagagaatcacttgagcccgggaggcggagtttgcagtgagctgagattgtgccactgtacacactgtacactgtaccactgtacagcctgggtgacagagtgaaactctgtctcaaaaaaaaaaaaaaacagaagctgcttaagactccttatgcttttgagctgtggtccttgataatccttgataatggatagtaactttgaagttaaaacattttataatgtatttttggcactggtattggttctagctgttttagaagaaagttagcattttcttattacatatatgaaccaggcagtacattttaaactatataatagagtcattgtgagttaataggttatcattttttaacatgaggataagatctgagagatacccacaagctagtaaataagtgagttttaaactatataatagagtcattgtgagttaataggttatcattttttaacatgaggataagatctgagagatacccacaagctagtaaataagtgagtgccatagttggaatttcaacctaaggttttctcaaatttaagatacctctccatttaaaaaaaatcaaatggaggaaaaatagattcacttcgtgttatgctctaaaatattatagtgagaattaacaagggcttggaaattcagcactttaatttctattttaatttttgaatgattaagtatatattataatgctaattagatggacagtcttattatataaatacatgttttcttagtttatatagacagtatgtttgctatttcagaaaagtaaatttgggatcattgatactacattatccatatatttcagtttttattttatatttaggaaaactatgctgacgtttggaaatgatacgaatacatctttatgtatttatttattttgaataagtcttttaaaaagtttggagaataaggttcttttatattttcttttttgtttttaagttaagtatggatactcagaaatcttacgtatgatgaagagattgtttgctaattgcaatatattttaaaaaccattgtttctaccaataaacagaaactaaaatataaactatgctccaatgaactaatttttttttactgctatttgtcttctcttttagaaaattattactatatgtttatttgaattctgtagttttttgttttctaatttgaatattaattctccttatcccaattgtgagattaccccagcacttaattattttgatttc

SEQ ID NO: 17655 - DNA, 2300 bp, Homo sapien
tttaataaatattttgaaattcacagacatataaattaggggtacttaattatttaaagagtacataattatggcacattcatataagtctttgccacttaagaatgtgccatataactctagtaaactaataatgctaaaactctgtgccaaaagattctttctatataactctactttgtgtttagaattatatagaacgaatcttttgacactgagtttagtgttatggtatggtttagtacattttgtgctgctgtaacagagtatcagaggcttggtaatttataaagaacagaaatttatttctcactttctggaggctgggaagtccaggaccaaggcactggcaggttaggacctggtcctcctacttacaagatagtgcctttaactctgcatcctttggaggggagaaacattgtgtcctcacatggcagagagcaggagagagagaaccctctcccacaagccctttttatagcagaattaatccattcatgacctgaacaactcgcattaggccccacctcccaacactgttgcactggagattaagtttcaacatcagttttggagaaacaaaaacattgaaaccatagttgatacatataagtaaaaaatatattgaacacagactgtctttacactgtgtttgagacttggagatttataaaagaattcttgcctacaaggaacttaaaatcttatttgaatattggagacaaacattgatggagtaattatttactgccttactgaactcttgtcaataacactatataataatgtgttacagacttctaacgtttttaaaaatatcttaattggttttctaggtttaatggaagtcttatccatttgctcaggggcaccaaatactcaggtataaaaacactctctccagagcagatagagtgatattctgaaacatgctatatagaagaagatccaaggggcaaataagaaagagcttattataagaaaggcttagcaaaaaggaaaatagaaaggaatgttatcttgggtttgaaagaaaaaaaaaagtagataggcttccctcattttgcctcgatatagtaatatgagttgtgatatttaaatatgtaggagcaggattttaaagtaatctgtgtgaatttatctttggaaaatggtgaacattcattggttgctttagatagatcttcatagacttatatgaaactgtatagtctctgcttttttttaatcattccctttccatttcccctcccaccaataggcacgtgtcttgatttgtgaatgtatttttaaaggaaatagcaatgtgttcacttgatactttcctttacaataggtctgattattttcgcaactttgtagattcttgcctccagaaaatccctcaagatcgacctacatcagaggaacttttaaaggtcagttctattatagtttatttatttattttattttaagacaaggcctcactttgtcacccaggctggagtggcagtggcacaatcacgtctcctgcagccttgacctcccaggctcaagcgatcctcccacctcagcctcccaagtagccgggactacagacacatgccactgaacccggctaatttttgtatttttgttagaagtggggctttgccacattgcccaggctgatatcgaactcctgggctcaagtgatccacacctgcctcagcctctcaagggcttggattacaggcatgagccaccagttccattatactttaaatttgttcttacccctaagaaatgattgtaaagaatgtgttttattatttgattctgaattaggattaagtatactctactagtttttaataaaatactagttttttatgccgttgtttctgataacttttcttagatactaaatttttgtattttgtttttcaaattgattagctgctcttaccatgtctaaatagaatatgtagttaagtattcaaatagctcaatacttaatatgtgcaagaatataatcatgagttataaattttaattcatgtggaacaatgtcttatttcaaagttgataaaacatagcttagccaggcgcggtggctcacgcctgtaatcccagcactttgggaggctgaggcaggccgatcgcgaagtcaggagttcaagaccatcctggccaacatgctgaaacccccgtctctactgaaaatacaaaaattagctgggcgtggtggcgcatgcctgtagtcccagctactcgggaggctgaggcaggagaatcgcttgaacctgggaggcggaggtagtggtgagccgaga

SEQ ID NO: 17656 - DNA, 2300 bp, Homo sapien
acaaaaattagcccggtgtggtggcatgtgcctgtaatcccagctactcaagaggctgaggcacaagaattgcttgaacccgggaggtggaggctgcagtgagctaagattgcaccactgcactccagcctgggcaacagagtgagactctgtctcaaaaacacacacacacacacaaaacaaacaaacaaaataacaaaactaatctttcaaaggttaaacaaaacttctgtggtaacggaggagacaatcctcttcgtggggtaacagacatgaactacagtatataaacatttctgagatgaaaatatttaagtttagagacagaagatctttggctttagtgtttggttaatcagtaggttgggtattctatgaactcaggttttaaaaagcttcaataagatgagatctgtttctgtaaggtgtaccagttgatcctacaagtgagaacacattcatttactgcactgaggcagaacctattgttgaaattattttatcttaatataaatactgccaggtattggctggttgattcatcatgcaacaaatggatatgtaaccaaatttacacacttgtctaagagaaagtactcccctcaatactacaacattaaatatgcctttctgtatttttcaccatctgaggcactagaccctagtaatatgtctttattttgtgaggggtcaagaaatgtctagctagtaagagaaactcttagtttagctatggttagtagcactgtttttatttttgagacagtctcactctgttgtccaggctctggagtacagtgccatgatcatggctcactgcatccctgacctcccaggctcaagcaatcctcctacctcagcctcccaagtagctgggattacaggtgtgagctaccaccacgcctggcttttgaatctttttcttttctttttttgagacagggtctcactgtcacccaggctggagtgcagtggcatgatcatggctcaccacagcctcaacctcctggggttcaagtgatcctcttgcctctcagccacctgagtagctgggaccaccacaggcatgtcatcatgcccagcctctttttttttccctgagaaagagtcttgctctgtcaccaggctggagtgcagtggcgctacctcagctcactgcaacctccgactccgtggttcaagcgattctcttgcctcagcctcctgcgtagctgggactacaggtgcatgccaccacacccagctaattttttaatttttagtagagatggggtttcaccctgttagccagatggtctcaatctcctgaccttgtgatctgcccacgtcaacctcccaaagtgctgggattgcagccgtgagccactgtgcctggcttttttttttttttttttttttttttttaagagatgagatctccctatgctgcccaggctggtaattttttctagagacagggtctcactatgttgctcaggctgagtagcaccattttaaaataccattcttaggctgggtgtggtggctcacgcctgtaatcccaagactctgagaggctgaggtgggtggatcacttgaggttaggcattcaagaccagcctggtcaatatggtgaaatcccttctctactaaatatacaaaaatcagccaggtggtggtgcatgcctgtaatcacagctactcaggaggctgaggcaggagaatcacttgaagctggcaggcagaggttgcagtgagccgagattgcgccactgccctccagcctgggtgacacagtgaaaacaaacaaaaacaaacaaaaaaaccattcatggttaacaaagttgttccaagtgcttctagacagaaatgaaacaatgaaatttagatagtatcttctgcctcagtaaaatagcatccattcttttaaaaggctttatttttatttatttatttgttgagatggagttttgcccttgttgcccaggctggagtggaatggcgcgatcttggctcaccgtaacctccaccttcctccgccttccgggttcaagtgattctcctgcctcagcctcccaagtagctaggagagcaagcatgtgccaccacacccggctaattttgtatttttagtagagatggggtttttccatgttggtcaggctggtctcgaactcccgacctcagcctcccaaagtactgggattacaggtatgagccaccacgcccggacattatttttaatttttgagacggagtctcgctctgtcgccaggctagagtgcagtggcacgaccttggctcactgcaacctccgcctc

SEQ ID NO: 17657 - DNA, 2300 bp, Homo sapien
aactctggatcctgcttttcctatagtcagagggctccaaggtagaactctctaagtccctctcaatggcactctttgcctagaccaaactaatgaccaaacagtaatcaatctatcactgttgaagtcctggttttctcaaccaaattttaagtctttcccaggtatgtcagtcgagttgccatgaatcctcacctgtaggagtttctgggattcattttaaggaaactggaagaaaattaatgttttaatgtaaatgtttttaaaaccaagatcaccatagagttcacacaaaattttaggcagtgtttcaagaagcactcttatgtgttgttctttcagcccatgctccaggtcaccggtttttaggtaaacatgacatgacatgtacttgtaatatcagtgaaaggggcttttagtcgtctcagtatcttttttgcattcaggtattatagcgtttccaacaaattgagaaattacttatttggtgtaaaatgacgagagagctttagaatttaataaaatgtcaaaaatacaatttgatacccttaaaaattattcatagatctggctgctctgtactactggatgggtggaatagggaagcagatcacttttgcatacaaaaactctttcaaacccaaaatattattggtggtacattttaaagtccaattgtggacttaaattagtcaaattgagagttactgagtccattcagatctccagtagggttttgtatctaatgtatttggccaccagttttacatgtaggtcatgactatacctggattttatcattaagttaactttaaagtatatacagtttgcaaaaaatgattcaaattaattggtttgtatatgtttgtgagatctagcttctgaggaatctcatacatagtaggaaccatcatagagtaaagcttgtagcagaaaaattggaagggttttgagatatcctagagaaagagcaagcactttctgaatcagtggggaaatatcaatatttgatcaaattaacactacctccttcccagtgttggtgttcactcactatatgtctttaagaaaattaaaactatggaaaatttgtctagcatatcagaagttgtaaatgctatatctggtatccagaggctggctgtaaaaagttccttggggtcactctatctcacattttttttggttagcattttaaaaatgcaaagccacatactttgaaatatattattccaaattgagctcccttccctttgcacatattttttcctccccttattgaagtcagctctaaccccaaattctagtatccaaaagtatttttatttgtataatgctatctgaaaaatgtgtttatattatattttcagagctgcaattcttattcgccatttcaatacctagagatagagagtcttgtatttgaagccacacacactggtgtaatatgcttagtactctaggtcaaggatttgttggtaaatggaacattttagcatagtcatgatttttggttgcctagacatcaggtaaacattcagtacactaaagaaactatcctggacactccctcctgcttccaccaatttttttctcacccccttttcaaaaattgaaaactctatgagtgtctttttgagaccataaagcagactttagtaactttctatttctgtaagtactaaatgtctggcattttaaacttttgtagaatacattatgttggacactggaataatactatttattttcacctgtgaaaaatgacttcattgtacttgaaacacctcctttgcatttctccatttgtgccattcactagtggaaataaattgtattataccatgatctactggctttttaaaactgtattaaatatgcacatttttggtatagctattatcatttgtatgtatatattgtatatacatatgagtgtctgtatgtgtgtatagatggatggatgtaactcatactgtacatttccatcagggcacttaaaagttctgttatttttgtttggttttgttatttcagtcctcagttaaggcaagaatgcatgtgtttcttaagaatgagtactctgcgttgatgtttatgagaaggtggtcattagatgcagtcttttcctttttaatcccctcttagcacttctgtgagtggagaggacattaagtaaaatttggaatcataagttgcaatgcagtaaaatggtgctggggaaggagccagttagtgtttctgtgagtttgtgttgtgatgcaataagagataagtaatgcagagagaaatgaaccatg

SEQ ID NO: 17658 - DNA, 2300 bp, Homo sapien
taccacccagtccagggccactagcccatcgtccgccaactgcaggtactcccgggccagctcaggcccaggcgctacgggcaggacgaagtggcagagggtctgcaggtggggcccggagaaccaggagcgcgggccggcctccagcgcctctgagcgccgcagggcgcgcagcaggcactgggccagggccgacggcttgcaaacaaggctgcaccctcccggcagtggctcgcgcccgtcgctgaactggtccgccgggcctccgccgtccgcctcctccccgtcgtctcggtcttgggcccccggcagggtcctctctccgacggcgcgcccccagggtccccggagccgcgggccgagcaggccgagaagggcgagcacggccaagatgagcgcgagggcggcgccccacggcggcatggcgaagctggagagccccggcgggcagcgggcggcggggccgtctactcggcgagctccgcgctttgcccgcggctccgcccgccggcggcggctgcccagggccctcccgcgcgggcgcgctctggattggccgtggccgggcagaggcagccagttcgggcccggctgccctcgcccgccccccacccccgccccggccctttgtacagcaattgcaacaagtgggagcagagggtgagaggagccggggccaccagggagggagggcgcgccggcagccggaagggagtggggagggcacgagccggggagagcggtgttggccatggagacgtggggagactggaggccgaggcttggggacccgactgtcatcagggtcttccgccagaccctgggcgctgcgccctcagaggccgatgaaaagaagcagaagggagaggtgagtaagtcgcagctccgggcgccggctcccgggaccccgtggggcggcggccgcgcgcgcgctctgccctcgggcggccctgctctcccccgcccggccccgcaaccccgcaataacttggctgggcggggtccggcactgggctagagaggtcgagcgcggcgtcttgagccgctggcgggaggctgctgcttccccgcctgcatcagtgcgggtcccgtggactcctcgcccccgtccccgcgagctcggggctccacatcaaggaaatcctcagcccgggagtggcttccccagaaacagcagccccaagcctccgagagtcagtcggagaaaaggacacactcaggcgccctgcgacagggatgcccgtccgacctacaaggaacgcctcgtaaaccggggtgcatgggagaccacggaaataacacgttctcgctgtttccaagctttgggataggcatctcgaccctcgctctctacccacgtttcccccccaaatcctggagagggaaccagaaccagcgccccgctgcggggcgggccggccagcgcacctcctgggggtgaggcctgtggcgtccccatctcgcggcgaccaatctctttctagacgcgcgcctgccaccgctgggcgacggcggaggtggggaagacagcagcctctcggctagctccggcctcccggggcttctgggtttggagagtttggggagcggagacacctcccgaggctcctccgcgttggaccctatttgcgagggcgggagcggggtgggccgacggcgaagctccagaggtgggaccctctcccttcagcagctcttcctgacttcatgattctgcccctcttctcattgcaggtcacaccgacaaatctgaagcgggtttgccaggggagtgtacccgtctccccagcctgggccacccggtccacagggattccatttccggccttacactccgctccacgatctcatccaggcgctgcagctgtgcagctgctctacagactgcagggacctgctgagacgaatccccggacgaggaaaggggccccccgcctgccctactgagccttgcgcgctgacccggttcctacacttaacttttccggcttcgggtttaagacgcgtgcgcgcacactccgctgctgtgggcgggcattggggcggggcgataccgggggcccactgtctggggaggggcgcgcgcgagcccagggccaacggacgcgcgggcggcgcgggcggcgcgggggcgctggggctggaggggcggggcgcgcgcgctccctcgctggcggagcggctgggcggcgggccgggcccggggccgcttggaatggcgcctcctccgccttcgccccaactgcttctcctggcagccctcgcgaggctcctgggtcccagcgaggtaaggtgacccg

SEQ ID NO: 17659 - DNA, 2300 bp, Homo sapien
agcctttcacatccctctctccctgggccctccagggctcctacctgcggaggcagaggccacaggctctcgggacaatgggctcccgcctcctccgccggtccagccatcacctgtgggtccaaagcgaagagttggggcgctggacgcggcgaggccctgccctctctctccccaggcccagcccgccagcggaagaactccgcgtccccctcggcgcgccactccttccaggacgaacttttggcaaagcgctttgagctcgcgggccgaggccttcccaggagcgggtcaccttacctcgctgggacccaggagcctcgcgagggctgccaggagaagcagttggggcgaaggcggaggaggcgccattccaagcggccccgggcccggcccgccgcccagccgctccgccagcgagggagcgcgcgcgccccgcccctccagccccagcgcccccgcgccgcccgcgccgcccgcgcgtccgttggccctgggctcgcgcgcgcccctccccagacagtgggcccccggtatcgccccgccccaatgcccgcccacagcagcggagtgtgcgcgcacgcgtcttaaacccgaagccggaaaagttaagtgtaggaaccgggtcagcgcgcaaggctcagtagggcaggcggggggcccctttcctcgtccggggattcgtctcagcaggtccctgcagtctgtagagcagctgcacagctgcagcgcctggatgagatcgtggagcggagtgtaaggccggaaatggaatccctgtggaccgggtggcccaggctggggagacgggtacactcccctggcaaacccgcttcagatttgtcggtgtgacctgcaatgagaagaggggcagaatcatgaagtcaggaagagctgctgaagggagagggtcccacctctggagcttcgccgtcggcccaccccgctcccgccctcgcaaatagggtccaacgcggaggagcctcgggaggtgtctccgctccccaaactctccaaacccagaagccccgggaggccggagctagccgagaggctgctgtcttccccacctccgccgtcgcccagcggtggcaggcgcgcgtctagaaagagattggtcgccgcgagatggggacgccacaggcctcacccccaggaggtgcgctggccggcccgccccgcagcggggcgctggttctggttccctctccaggatttgggggggaaacgtgggtagagagcgagggtcgagatgcctatcccaaagcttggaaacagcgagaacgtgttatttccgtggtctcccatgcaccccggtttacgaggcgttccttgtaggtcggacgggcatccctgtcgcagggcgcctgagtgtgtccttttctccgactgactctcggaggcttggggctgctgtttctggggaagccactcccgggctgaggatttccttgatgtggagccccgagctcgcggggacgggggcgaggagtccacgggacccgcactgatgcaggcggggaagcagcagcctcccgccagcggctcaagacgccgcgctcgacctctctagcccagtgccggaccccgcccagccaagttattgcggggttgcggggccgggcgggggagagcagggccgcccgagggcagagcgcgcgcgcggccgccgccccacggggtcccgggagccggcgcccggagctgcgacttactcacctctcccttctgcttcttttcatcggcctctgagggcgcagcgcccagggtctggcggaagaccctgatgacagtcgggtccccaagcctcggcctccagtctccccacgtctccatggccaacaccgctctccccggctcgtgccctccccactcccttccggctgccggcgcgccctccctccctggtggccccggctcctctcaccctctgctcccacttgttgcaattgctgtacaaagggccggggcgggggtggggggcgggcgagggcagccgggcccgaactggctgcctctgcccggccacggccaatccagagcgcgcccgcgcgggagggccctgggcagccgccgccggcgggcggagccgcgggcaaagcgcggagctcgccgagtagacggccccgccgcccgctgcccgccggggctctccagcttcgccatgccgccgtggggcgccgccctcgcgctcatcttggccgtgctcgcccttctcggcctgctcggcccgcggctccggggaccctgggggcgcgccgtcggagagaggaccctgccgggggcccaagaccgagacg

SEQ ID NO: 17660 - DNA, 2300 bp, Homo sapien
ctggtcttgagctcctgacctcaagtgatctgcctgcctcagcctcccaagtgctgggattacaggtgtgagccaccatgcctggcctgaaatacctaacttaaattggccaggcatggtggctcacacctgtaatcccagtactttaggaggctgaggcgggtggaacacctgaggtcaggagttcaagaccagcttggccaacatggtgaaaccctgtctctactaaaaatacaaaaattagctgggcgtggtggcacacccctgtaatcccagctacttgggaggctgaggcaggagaattgcttgagcccaggaggcagaggttgcagtgagccgagaccatgccactgcactccagcctggcgacagagcgagactgtctcaaaaaaaaaaaaaaattctctgtaatagctccaggccaagagttgttgcctcacgccacctatcagattcctttcctcaaacagccctttcatgaagtcattcctctgttcacaaactgtcaatggctccttatttcccaccttatcgtggccatattctccggcctggcttttcaggccttacttaagtaagcttcgtctgacctctccacatccttggttcctctccagttgtgtcgggctgtttgccacacaaatgagtgccagcctcgcccttaccacagcccctttgctcctgtttattctcctccacacctggcctatcctgactcggagagtgcagctccctgccctcctgccatactcccccagccatcttcccagtcccagctggcatcagctccccctgagacactgcccgatggcatcagcctttattcctcccctcctcctctgaatctatctctgataatttaacaactaatcactaagttttattagtttgctgttttatttgcattagttgtttccctgagtttctcacacactccttgcaagcagagtccaggagttctttggcatctcccacagcatctagcacagcactgagcaccaagtcaactcaatcaaagaataatgaatgattgatggagtatttccatcctgagattgtgcacctgctgcctgcctgccctgtatttggatgctcttgggagactgtatagattggatcgatggtcttcatttgggggttgcttatggcttggattgtggacctgtagagccatcgttacacctgcagggaaatatggctagagtgtggtctgagtctggcaggattatccaggcatgctgtgagctttgaagggtggcacttgatggagaggaagggtgaaaggaacactcagaggcaagagtgggtacatgccaatacccagggccctttgtcctttcctgggccctgaaggtagaagagccatccagctatcctgggagtacctttaaactggtcccctggatgggagaacttgagattctctgggagggctctgggcctgctttgatgtctctgtgcctttcctccaggctgaggatgtcaccttcctctaccacccctgtgcccatccctggctgaagctccagcttgccctcctggcctatgcttgtatggctaacccttccctcacccctgacttcagcctcacgcaggatcgggtatgtagctgatgaaaggcgcttgcctggccctggcagaaggctatggccccgtgtgcagggaatggaaaattcaagggtttcctcttgtttgtccccaccttcctcgtagctctaacagttacctcctctcgtagcccctggtgctgactgcatgggggctggcgctggagatggcctgggtagagccagcctgggctgcccactggctgatgaggaggcggaggaggaagcagaggaagaagaaggcatggatctactgtgaaagcctttcagggcctgctccctccgagccaactcccggtagagggaggctgtgccgaagagggtgtgtgcaggtgagagacgctgggcccaggcttgttggccctcgggttctctgagaggggcagcagggtgattgctctctctcctctccttaggccctggctctggcctttgctctgcggagctggcggccccctggcacagaggtgacatctcaagggcccaggcagccctcttctagtggtgccaagaggcggaggctgcgggctgcccttggtccccagcccactcgctcagccctgaggtttccctctgcttccccagggagcttgaaggccaagcagtccatggcgggaatccctggtagggagagtaatgccccatctgtgcccactgtctccctgctgccgggggcgcctggaggcaatgcca

SEQ ID NO: 17661 - DNA, 2300 bp, Homo sapien
cccacccccaccttgggggcctggccaccgtggctgatctgctcctgtccgtcccctacagtgtggctggctacccaaaaccacagcactctggtgacagagcgcagtgccgtgcccttcctgcctgttaacccggaatactcagccacgcggaatcaggtgagggggctggattgggggcctggggtggtctacttcatccccgcggtccctcctcatccggcagtgggctggggcctgagccagctctccagcatttgccagggcctccctcagggcacagctggcactgggatttgggaaggtcaggaggctgttgttttgagcacttggggagcagctccggtgggtgttccggcctctgctcaggcaccctactctatcataccctgccacgggtggccttggctgctgactagccaggtgaagctaggctgggacgctttagctggggttaaattaaatggcagagccatgccttgctacttggtccctgccgtcctgcgtcagtcataaggggtcccctgaagccagcctggccctttctgccttgcaggggcgacaaaagctggcccgctttaatgcccgagagtttgccaccttgatcatcgacattctcagtgaggccaagcggagacagcagggcaagagcctgagcagccccacaggtgggagggttgtgtgggagggtgtgggaagcaggcggggctccaggggtctttcctgcatggctctccctgccagtggtgacctgagagatgggttgtgtggtggagtgtggcctgagtgacactcctgtgtcctcagacaacctcgagctgtctctgcggagccagagtgacctcgacgaccaacacgactacgacagcgtggcctctgacgaggacacagaccaggagcccctgcgcagcaccggcgccactcggagcaaccgggcccgggtctgagtcccaccctccttcccactcccctgtgccctgacccaggccttcgctgaggcccagctctgtcctcttgtagcccaggggcctgagggacaggtgggctgctcctagcctcaataactgccccctgcgggtgttggcctccctgcccccaggtgctgaccagcttaggtctctctctgcagagcatggactcctcggacttgtctgacggggctgtgacgctgcaggagtacctggagctgaagaaggccctggctacatcggaggcaaaggtgcagcagctcatgaaggtcaacagtagcctgagcgacgagctccggaggctgcagcgagaggtgagggtgcagcctcggtgggagggggagccccaggactccagggggttgacagcactttgcacccatagatccacaagctgcaggcggagaacctgcagctccggcagcctccagggccggtgcccacacctccactccccagtgaacgggcggaacacacacccatggcgccaggcgggagcacacaccgcagggatcgccaggccttttccatgtatgaacctggctctgccctgaagccctttgggggcccccctggggacgagctcactacgcggctgcagcctttccacagcactgtgagtcacctatgggtctcaaggtgtggggagatgggtggggctgccgcagggtccaccatgacgctcgctgtgctaacatccccaggagctagaggacgacgccatctattcagtgcacgtccctgctggcctttaccgggtaagcctggggaaggcgtgtccatcttagccagtaggttctgagccccagggggttctgggctctgtgctgaattcggggcttaagatgattagactgacctggtccctgctgcactgctggtgagcaggggggcagtggggcacactgactccatccagcgctgccctgggtttcagatccggaaaggggtgtctgcctcagctgtgcccttcactccctcctccccgctgctgtcctgctcccaggagggaagccgccacacggtaatgtttccatgcccagtgcccacagggtggctgggggccgtgtgggctaggggcagtgtgggtccaggaacacggcgctcacagccccttccctccgccctccagagcaagctttcccgccacggcagtggagccgacagtgactatgagaacacgcaaagtggggacccactgctggggtgaggctccctgggtctccagtccagcctgctcacatgccgaggcggggaggttgagagggcccccagtgtgtgaggaccaaggcgggcggctccgaggctggaacgtgtctttctctatatgta

SEQ ID NO: 17662 - DNA, 2300 bp, Homo sapien
gaaaaggctgagagactggtagcagtggctgcagggcaggaaactgtgcctgctgaatgggccctggggactgcatatcccagaggggtaaggatgtaggaaagggcatggctctgtcagcccccagctgtgagctcttggggagatccctcactggtaacctggccgtagtgatggtcccagctcctaggctgttggagactgagtgagtgaatgtgtggagagtactaggcttggcacgggccagagcaggtgctcaggaggtctggcccatcatctggctccggctgacccttgccctcaccctggcagaccctggctgggcatccatcagcaggggtgtgctggtgtgtgacgagtgctgcagcgtgcaccggagcctgggacgccacatctccattgtcaagcaccttcgccacagcgcctggcctcccacgctgctgcaggtacagggctcagtcgggtggttcttccttcccctcaggcagagtgtgctgagcatgagggcgtttccccctcacccacatacacccccatctggaatctgcagcttccaaggggcagcacccccctagggcagaggctaatcctgaccctttcctcccatctactcacttcatgcagaagagtagctcacacccctgctctgccacttatcaacgtggtcgtgtagcattgagcaagttgcttcacctctctgagccttggcacactcatgggatctgtgtctttgggcagctggactagatggaggtgtggtggtgcgggcacacagtaggcccccttggtaccgtttccagctacgccagccacagcaggcgctcaggaagtgtttcccccattgcttagcacgcagtgggcactctctcacttggcatctcttccctgcagatggtgcacacgcttgccagcaacggggccaactccatctgggagcactccctgctggaccccgcacaagtgcagagcggccggcgtaaagccaacccccaagacaaagtccagtgagtggggctggaggggtggtgggcagagactgcgcagtccgggacagggccctgggaggtggcaaggtgaccaccctctcccaccatgctccccattcctcctgtgtgccccatgcagccccatcaagtcagagttcatcagggccaagtaccagatgctggcatttgtgcacaagcttccctgccgggacgatgatggagtcaccgccaaagacctcagcaaggtttgaggggccctacaacagatgggtggccccctcctcttcttcccatccacgactctctgaaggcctctcctttgtccccactgagccctgggccccaaaggcagccaggtcagggtaacagtagacagggtggagagagcagattgttgggtcaggccgtgtgtggctgaggctccccagcaaccaagtagacacacaaggctagaagcccacagctgccactcagaagctgggaaaacctgggggtagttgcttagccactcatagcctcagtttactcatctgtaaaatgggaaagaaataacagcatctacttcataaatagtatctaagcagggcacacagcacacgtggtagatggtgactgacggcagcgtttattaattggcattaacccctagcgggaagcctctgtcctcccgacatagtctggtttgggcaggcctccttggagctgctaggtgtcccaggggcagccagggtgcagcttgtgggtggggaggtgcgcctcacgcacatgcgtattcactgcacactctgctcctcttagcaactacactcgagcgtgcggacaggcaacctggagacatgtctgcgcctgctctccctgggtgcccaggccaacttcttccacccagagaagggcaccacacctctgcacgtggctgccaaggcaggacagacactgcaggccgagctgcttgtagtgtatggggctgaccctggctcccctgatgttaatggccgcacacccattgactatgccaggtgagggtcggctgaagggtgcagtgtgggtgggtgggggtgtgggtgagggctgctgctgcaggtctgagccataccccctcctcacaggcaggcggggcaccatgagctggcggaaaggctggttgagtgccaatatgagctcactgaccggctggccttctacctctgtggacgcaagccgggtgagcagagcttggggggcgcctggctgtgacaggcctggctggggctgggcaggtgggacctggacgcacccggcagcaggtgccatggtgacagagcggctggggagcaa

SEQ ID NO: 17663 - DNA, 2300 bp, Homo sapien
catttctactccaacttctttgcctctgaattgaggaagctgaggaccccacagtgaggaaagtcttgttgggattacagagtaagctgggaacaaaggcaacactaagccccagactcccccgattgggcgcctgctaagactctcctccacattccatgccatgcttaccccacggagttgtggaacagtggggagacatttataaggcaaggtgcatcctcagccctgccatccccagacctgcctgcagctcggggaacggagtcacagtttcttaggggtatggaccctcaaccccagggccctctaaaccatgataagcccctaggaggccttggtcataaccacctatggagtattttgtgcccaagccctgctaagtcatagttcccaaatactctagcttggcacccccagaaccaccagagcatctgtgaggctcaaccggtggggtcctgggcctgctcaaggggtggctgaaagttatgggcccacaaaccagcaccccatactctcactcttaatcatgcccacagccccgctagagttcacggacctccgcagcctgcccaggggcctaccagggagatagctcctttgctaaagaaagaatggatgtgggctagagcttccttcccaggccagctgcagagccccgtcactggctgtcctccctcatcagaagggagcagcctcttggatcattacccctgacttcctcagcaggcctggggggtttcactccagcccagtcctaactctgttaggaaaaggaagggaaccaccatgtaaatacagccaggagacaggccaggaagccagcaggatacggggaatctcggcacggcctcccacccatttctggccagactgggctaggggacagggaggggcccgcacccaggatagcttgatgccaagctcactttcccaagcaggccttaccggtgaacaggaacagcagggtccagccgagctgttcccagtcaccaccagcaggcctggggatgcctcccgagaagacacccgggtctagactggccctgaacgccaggcccggcaaggagcgctagccttaggaacccgaggcagggagtcctgggagtagccaccgctcatctgctcctgaggagacggtattcaggccccactggcgcatctgcccggccctctgctccttgccctccaccaccccggcaggcgtaccgaccacgcgagcagcaggtgcaagacgcgggggtggcactgagatgacataaaaccacactcgcccccacctcccaagccctgacggcctccgccacggccctcctgccaccccaggctggcgcttccgtcggatacagagatggaggtggaggagcagccagctgcccgcctccctcagaccgaggagcgggaggcggcgccgggaacgtccttcctcgctagtccacggcctccagggagcatgggcaccccaggccggccctcccgccaagggcgcagctccgcagtggccgaggcgggggcccagcctggaggccgcagccccccgccccgcccagccctccggccccgcacagcgctcttgccaggccccggcgcccgcccggcggcggcctggctgtgcggtcccgcccccggccccgccgcgcttacccggggcgctgcagtccgcacacacctccgctcgcggcccctttcgggacatcctcagcggcgacgcggccgcagccctctgggccagcgtggggggcgcgggcggcgggcccgggcggcggcggcggcccctgctgcccggcccggctccggcgaggccccggcgaggctccgcgcgcccggccaaccgtccgccccggggctggcccggaacccgccgtgcccgcctgcccgctcgccctcgggcgccctccgccccgcgccgccccgccgccgctcgcggctcctctctccgccccctgcgcggctcccggccgcttctgcaggaagcggcgcaggccctgcccacagggggaggggccgcacccccgccccgccgcgcgctgccggccgcgccccctagagaaaggaagcccgggcgcgggcaggagggggcgggggcgcttaaaggggccgcggcagatgcccggccccggcgggcagcgtggcctgcggccctggcctccgctgcagcgctcgcctggcccggaggcaatgtgagtcaccctcacagccccctccccttcactttccgcgtggggtggaccgggggacgctgggcccacggacggcgagggtggggattagggaagaaggacttggaggcccaagtcccg

SEQ ID NO: 17664 - DNA, 2300 bp, Homo sapien
attaaattgtttttcgaaccttgtgtgtgattccactgtagcagtcctgcttcctggggtggtgacatctccacgggggaatccagaaacccttttatctccagtcccaggcccagaagtttggctgtgacggggctgggggaaacaaagtttggacgatgtgtccgcgccagggccactcccaggtagtctctgagccaaccaggagatggggagtggggtggaggggtaagcagagtgaatcatccttcttccccagcaaagcccaggagtccgaggacagggggagttcaggatggattgtggggagttgtcgattgtggggaactgtcccctgggcggccgtgttctttttttgccaggcggcggtagacactgaacccaggtcgcttgcgcttcggcccgcgctctcagctgccacgtgctcgagacgcgcccacacagcggagaaacaaagacagccaagcggcagggctgccagcagcctcctcgacatttaataaatgaaattccatagctgggggtcgatcgggggtgaacgggcggccaccgctcgtggactgagcgcctggcacgggctgcctggccactcctcccgtctcactccccccgccccttacccccttcccgctgaggccaccaagcccatggactctggtgagagagcagctcggggcggcaggtggtgctcccccctacacaccagctaggtatcgttgcttgcaaaagccccaccagctgagcggctggctgtcgagggaggggaggcctgcaagatttttttaaggtgcaattataaataaagcccatggatcgcgatttcaaacaaacttgtcaatctgggccgcagcaaaaggcgatggaggcagctttgcatgtatttcgggtggtgtgactcatgagcattacttgtctcccctagggaaggagcctgcccacccacaaatcactgccgctctggcaccgttgggataatcgaccaacttgagcacccctgccaaaggactgcccccatcttaacaagcaggagtctctgactcttggagaacccctcctcaattgtcaccactgacctggcccccaggtctggccctggggacctctaccctctccccacaagcagagtgcccgggccttttgctgctgcagggattgggggttgggtacacgcgcggcacacgcgtatgggggcgcatgctcagtgcgggggctgcgctcatgtgcggcctctacctaggctccctgccccccagcccacccacgtccctcacctgccttgcctttgcctgcctcgtcgtgtgaagtccaggaagaaaggccgtcacctgaaacggcccctctatgttatatgcaccctttctggacacacacacctctggtggcccagaaacaccgtgggtgtgtgtaaggcggatgacaagtggatgtgagtgcacacaggcacagtggtcactcctcgggaggtctttaaaaaccgcccagattctctcctctctggatggaaggatgcatggagagatagatatatttttagtccggaggcaggggaatacactgcctgacctttctggcacctgggcgtccatattgttagcagtgggcgtattcagcaagagtgtgacacatacacacacacccctggacacacagatgtggacacctacgggacagggacgcacacctcaccccaaccagagatagacgggtaccccaaggcacagcccctttgacctggagcgggacttgggcctccaagtccttcttccctaatccccaccctcgccgtccgtgggcccagcgtcccccggtccaccccacgcggaaagtgaaggggagggggctgtgagggtgactcacattgcctccgggccaggcgagcgctgcagcggaggccagggccgcaggccacgctgcccgccggggccgggcatctgccgcggcccctttaagcgcccccgccccctcctgcccgcgcccgggcttcctttctctagggggcgcggccggcagcgcgcggcggggcgggggtgcggcccctccccctgtgggcagggcctgcgccgcttcctgcagaagcggccgggagccgcgcagggggcggagagaggagccgcgagcggcggcggggcggcgcggggcggagggcgcccgagggcgagcgggcaggcgggcacggcgggttccgggccagccccggggcggacggttggccgggcgcgcggagcctcgccggggcctcgccggagccgggccgggcagcaggggccgccgccgccgcccgggcccgccgcccgcgcccc

SEQ ID NO: 17665 - DNA, 2300 bp, Homo sapien
actccccacaatccatcctgaactccccctgtcctcggactcctgggctttgctggggaagaaggatgattcactctgcttacccctccaccccactccccatctcctggttggctcagagactacctgggagtggccctggcgcggacacatcgtccaaactttgtttcccccagccccgtcacagccaaacttctgggcctgggactggagataaaagggtttctggattcccccgtggagatgtcaccaccccaggaagcaggactgctacagtggaatcacacacaaggttcgaaaaacaatttaataaggaaatgcacaggcatgctcccggccactcctagatgcccctcaaccgcgccagccccctcccctgcactggctgcagccacgacactctgctgacccctggtggtgcaggcgggcagcggtcccgggcccccggagacgccagctggctcctcccaggcgggagaaaggggcgaggcagcccgctcctccctcatctcttcccgctggggcctggcaccacagggtgtggaggaggaaggagggaagaccacacaaagaaacctgagagagtttgcaagcttttgctggcacctcccacacaaacacttcttggattgttgttttaagtagggccggtgtggaatcccttattcctgccttgttctgaggtgggctcaagaaggcaccgtgcctggtcccgccacctgtctcggcccgcctggttgggggagggaggcgctgtttccagggcagtcattatccttagctcaccccaggaggtagtatctagattctcattttgaaggggagtggaccgagaaagtcggaaaaattaagcagtttgctcttttaaggtcaggcagttggagctattcgaactctggtctctctgacatcacagtcccctccctccagggactggtccaagcctcttggtccttccaggccttgcaattggcgcttgagaggccaattcaacttttaccacaccctctgcagggaccattctggaagtacctcttcaccctggggtcattcaggaaggagacagtctctggaatcagtcacttcccttcctgaagggccagctgggtggaggaacggagctgccacctgctgctttttctgtccaacctcactctggttcttgctggggacagtgtgcggggggaaagggaccatctttcccgcgttactggacattctgtttccaatgacatgtgtggaagatggagtttaattttctaacagggcagggaagactcctcagaaatgttccaggggccagacccctggctgctccaatgacccttggtactgatgccccacacctttctcaggagttcccaatcagacgctctcttctgggaatccggatccttcttcatggcccctgggacccaagctcaattctgaagaccacacctccaccccgtctcccaaacgctcgacctaggcccgtgcccccccacttccccagcaaaaggcaaaatgccagcgggggaggtgcgtcccagcccacctggcgtcagggccccgcccgcgtctgggccaggcctgactccccgcccactctcccacgagatccggggacagtgcagaccctcttcggccacctgccacccccagtttcacgaggcggactacaaaccccatgatgccgcggggctgagctgacaagctctacccggggcgcctggtccccttcctctctccccatcatccccacatccccgtatcccgcgccggccgctcgggctgagggccgggctatgcagctgtggggacccgggggctgcgggcgcgcgtccctgcggcggcgtccccggggcccgcgtcccgtgcgcccccgcgcccgctgcgggcgcctgctccctccgccgagcggcgtctttgtgtgcgggggtgtgggaggcgagcgcgagtccgcgcagcgccgccgagtgcccgctccctcccagggcgggtgggggcctctccgcgccgcccgccgccgccgcctcgcgaggacgcccgtcgcccgcgccgcccgcaccgcgccgggcgcgccgcccccgcccgccgccgctcgcacatgcccgagccgcagccccgcgagcaggcagcgccggccccccgccccgcggccccgggccccggctccggcgccgtccctcctccccggccgggcgccgcggccccggcatgaggagcgggcgatgatccccgccaacgcctccgccaggaaggggcccgagggcaagtatccgctgcactacctcgtgtggcacaaccgccaccgcgag

SEQ ID NO: 17666 - DNA, 2300 bp, Homo sapien
tgcaaatacgcacacacacgttacacaggagtggactcctgcagggccagaaggcagctgggcatgcatgtgcttgtacacttaagggcacacgtgagtacctatgagcgtacgagtgtgtatctgtatggtaccagtgtgtactagagtgtggtgtgtgtgcctgagtggaggtagggaggctctctgcccagggacccccagctacaaaactccaaagactccaccttttgactccagctgaggcctgctgggataaggaatctccgttctcttggtggggagggctgggtgttgggtttcatgggaaaccttttcattccagcaattaaatagctagaggcctctgctgaggagaagctggaggcctctgctgaggagattaatgaattctcctacctgggcccagggcaaggtgccacttacactgcaggcggcactctgggcttgtggggagagctgctctggagcttggctgagtgtatggggttctgcatggggtgtatggggtgctgagccatccaggcctccctggggagtgctcctgaggtgtggggatggggaggagcaccctgcttgcaaggaagtgccagccgctctctggagcctggagctgaggcacctgatggggaggtggaggcagcatctggagccctgaggccaggcagcggcctgccagctccctagggtcttattagctgcagcggctgcggctgcagcatctggggcagggctgggaggcctggattgctcagcacttccccagtcagctcgggccctgtggccctctcccactcccgctgccgggctcaggaccccacccaggttgcaagccccggagtccagcccaaccaggattggacaagagtaaacaacactccccttctctgtgaggggccacagctcagaggccaacaggggccaggcccgctggtttttttgaggctcccagtatattgaaaaatgaagaaattccaggacaaggctataaaaattatataaataatcttaaattatttaaaatgtttcatttttgacaatggagttcatggtcatgctttaaaatatttaactgttgctagaagatgcgtaatgaaaagcagtgctccttgctccgcctctcccacctccccagcactctggactccttttgtcatttacctccctaattataaacaatatattgtttatactgccctctcccctccccttctccctccctccctcccttccctgcctccctccctttctctttctttcttcttcttttttttcttttttcatgagacagcgtctcactctgtcacccaggctggagtgcagtagtgtgatcacagctcagtgcagcctctgcctcccaggctcaggtgatcctcccatctcagcctcccaaggagctaggactacaggtggtgccaccatgcctggctaatttttgtatttttttttgtagagatggggtcttgccatgttgctcaggctggtctcgaactcctgagctcaagtgatccacctactttggcctcccaaagtgctgggattacagacgtgagccccccggcataaacaatatacttctgcaatgatttcttggttaattaccttcccctccttgtgccccctcagcctagtactctatgcatttgtctagcaaatatttatgtgccaggtgctgcctggggagtggggaaccagcagtgaacaaagcaggcagggacctggctgatggggcttctgttcgaggtgcaggaggtgctcaacaggcacttggacgggcagtggatagagccatagcagctgttacctcagatgggctgtcagggtgggcttttctaaggaggtgacatttgagcagcagcctgagtgaagggagggagaaagctttggggctctctggaggatcctggagaacgttccggggaaggccattggcgaagggtggagcaaatgagttcaaagagaagtctggggccattggattccctgctacctacgatggaaagccactggaagattttgaactaaagagtgtcaggacctgagtaacacttcacagggtgactttagctgccataggtgaggtggacaatagagcctggcaaccggggagcagcaaagaggcagtagggggctgccagtgagagatgggggggcaacagctgcaaggtagtggaaactgggcggcttctaggtctgttttggaggcagagcctacaagtttttctgatgggttagatgtggagggtgcgggaaaaagaagagatgtagacagttttaaagttggtttttttttccacctg

SEQ ID NO: 17667 - DNA, 2300 bp, Homo sapien
gccctggaggtacagaagcaatgcagcgtggtcaagcacttatatttgggttcaaggcacttctctggtgttttatatggatgtatggatgtatacacagggcacgtgcacacgcacacacacacacacatttattcctcacagcaaccctttctggtaggtgctgttctgttagtattcccattttacgcatgtttattgagtcctttccttggcatcccatttactcttcacaacaaccccaggaagtagggatgatcggtccattttatgatgaggaaatagaggcttagagtggttctgtgacctgtacaaggtcacacagctgttaagtggcagagttggggttcagatcctggctggcctgaccctagagccaggcctttatccctaaaaatgactgcctggctgggcatggtggctcatgcctgtaatcccagcgctttgggaggccgaggtgagcggatcacctgaggtcagttcgagaccagcctggctaacatggtgaaaccccgtctctactaacaatacaaaaaattagccgggtgtggtagcaggcgcctgtaatcccagctactcgggaggctgaggcaggagaattgcttgaacctgggaggcggagcttgcagtgtgcagcgatcccgccacagcactccagcctgggcaacagagcgagactccatctaaaaaaaaaaaaaaaaaaaggctctgcctgttactctgggacccctatgttgcccacgacatgaaagcaggaactaacaaatgccatgggttttgtgtgtggcatctcctctgaaagcctcccctgcttctgtagtctgggaaggcctctgtgctacccccaccagtgcatggaccatgctgttataactccattttattgtctccttatagagattgtaagtctcaggagggcagggatcatgtttggcttgtttactgtatccctgatgcctacctcaatgcctggcacataaaggctcctcaaaaaatgtttgttgaatgaataagtgaatgaatgaatgaatgaatgacctcatatattcacttacccaaaagcctgaagcagagtctctccaggaccctttgctacagggagtgttcccagtgcccttaggggtaagacacagggtaagaccagaactgcttatgagccctttcttcatctgtccccaggtgtatggggcatctaacgtggagctcatcacccgcacacggacagaacatctttcagaacagcacaagggcaaggtcaaaggtaatgaggcagagctggatggggagaggtgttgcaggactgcgggaaccagctcccacttcagtgcttccatcagtattcccactggcatcctagcaagaggctggatgctttattcaggccgatagatttcaattcaggtgccaagccctaaggatgggtagtggctgcctagagtactaagaagtttctaaggactcatctgggttcagtggagagccatgctgcaagtgattactaatgttgctgttgaatttgggagaggagagaaatgccatgtatgccatttattggccattctagtctagtgggacatatcctaggtagaaagtcaggggaccttgccacagattctgtatgcccattgatgccacacctgattctctgggtaccagataccgtgtccgaggtgaaaaagcataatttctacctcacaggggaacaacatgaaatcatgcctatggaagtgcctgaagcaaacacacacacgcacatgcacaccccacagtgcctgccggggcaggcgttttactgtccagggtcaccgagctggagaggagcacttttggaagttgcttctgacctctaggccttccttttagtgttttaagctgtgctcacagaggccctggcccctggtccttgaagcactcagtccccttcaggtgaaggtgcctgagtatgtggttgggtgagcaggccccaccccaggaaccggcctcctccctaggtcttgggtgctgtcacctctgatgaggtgcccaggtgtgtgtggagttgcggtgtcctctgagatgccacatttcttgtaggctgtaagacacctttgcagtccttcctgggaatcgctgagcagcacgggggcccccaaaatggggtgagtgtgtgcaggggtacccgtaagtggagggatgtggatgtggctcaggaggaggcttgggaagcgtcctgcttagcatggcctatgtggacctcctttccacaatgcccaaggccatgtcagcgccacactggcagaggggacagcttgggggccttg

SEQ ID NO: 17668 - DNA, 2300 bp, Homo sapien
catctgtccccaggtgtatggggcatctaacgtggagctcatcacccgcacacggacagaacatctttcagaacagcacaagggcaaggtcaaaggtaatgaggcagagctggatggggagaggtgttgcaggactgcgggaaccagctcccacttcagtgcttccatcagtattcccactggcatcctagcaagaggctggatgctttattcaggccgatagatttcaattcaggtgccaagccctaaggatgggtagtggctgcctagagtactaagaagtttctaaggactcatctgggttcagtggagagccatgctgcaagtgattactaatgttgctgttgaatttgggagaggagagaaatgccatgtatgccatttattggccattctagtctagtgggacatatcctaggtagaaagtcaggggaccttgccacagattctgtatgcccattgatgccacacctgattctctgggtaccagataccgtgtccgaggtgaaaaagcataatttctacctcacaggggaacaacatgaaatcatgcctatggaagtgcctgaagcaaacacacacacgcacatgcacaccccacagtgcctgccggggcaggcgttttactgtccagggtcaccgagctggagaggagcacttttggaagttgcttctgacctctaggccttccttttagtgttttaagctgtgctcacagaggccctggcccctggtccttgaagcactcagtccccttcaggtgaaggtgcctgagtatgtggttgggtgagcaggccccaccccaggaaccggcctcctccctaggtcttgggtgctgtcacctctgatgaggtgcccaggtgtgtgtggagttgcggtgtcctctgagatgccacatttcttgtaggctgtaagacacctttgcagtccttcctgggaatcgctgagcagcacgggggcccccaaaatggggtgagtgtgtgcaggggtacccgtaagtggagggatgtggatgtggctcaggaggaggcttgggaagcgtcctgcttagcatggcctatgtggacctcctttccacaatgcccaaggccatgtcagcgccacactggcagaggggacagcttgggggccttgtgacaacaaatgagttggcctggcattaggaactgaggggagctcctgggcccctccccatgtggtacagaccctgatcactcagactctgagccaagccaaccccactgccatcactgcagaagaatacttcaaccccaactttgagctgggcaaccgtgatatgggccgccccatggaactgaccaccaagacacagaagtgaggcccctgccggtgctgggaaggtggggggccggggctccaggagatgctgggaggccatggcttcctgcagtgtcccttaccccttgggatctggtgggggcaggttcaaggccaagctgtggctgtgtgaggagcatcccctgtccctgtgtgagcaggtggcccccatcattgacctcatggccgtcagcaatgcgctttttgccaagctccgggacttcatcaccctgcgtctgcctcctggcttcccagttaagattggtgagaccgcacggccatttctcctgagcccgtggcgggccgaccggggtttagatgaggtcggggtggggctgaggctgaggtgtgaggggctgagtggtggcgcctaaaggtttcctcatcctcagaaatcccgatcttccacatcctcaacgcccgcatcaccttcgggaacctcaacggctgcgacgaaccggtgccatcggtgcgaggcagccccagcagcgagacgccttccccaggcagcgactcctccagcgtcagcagctccagctccacgagtgaggccccccgcgagaacgcctgcccctcggctctccccggggtgggtgggaggggcgcgcccggccgtgcctgacccagcccccgcgcccccagcctcctgccgcggctgcgagatctccccagcgttgttcgaggccccgcgcggctacagcatgatgggcggccagcgggaggcggcgacccgggacgacgacgacgacctgctgcaattcgccatccagcagagcctgcttgaggcgggcagtgagtatgaccaggtgcgtctccgcgggcgcgcggggccacgggactccgcgccgccacggctaacgcccacgcctccccgcaggtcaccatctgggaggcgctaaccaacagcaagccaggcacccaccccatgtcctacgagggtcgccgacaggacaggtcagtgc

SEQ ID NO: 17669 - DNA, 2300 bp, Homo sapien
gggtggtaataagggaggtgctgggtcccagggccctgccctgcccagctcctggactatttttagctacatgcccaccccctcccaggatgcactgcttaggactaattatagccatggccaacttggtgcctggagagcagcagggcagtgctctgaagtctccctgctggagtgaatgggaggtctctggagagctggcagtgccccctcctggctcccagctgcttctgttctaggcatgcaccaccacatcttgccctgtatttgacccttaccactcaagagagccagtagggttaaaaaaaaaggtagggaaggagtggagggacagggtggctcctcattccacccaccatataccttttcttcctacccaggtgtggcagattccagactatacccccatgcgcaacattacggaacctatcatcacacttgagggccactccaagcgtgtgggcatcctctcctggcaccctactgccaggaatgtcctgctcagtgcaggtctgggggctaaggaggggtcccccatagatgggtgggtggtggcaaaggtgggacccaggtgaccatgcctggccactctgggcaggtggtgacaatgtgatcatcatctggaatgtgggcaccggggaggtgctgctgagcctggatgatatgcacccagacgtcatccacagtgtgtgctggaacagcaacggtagcctgctagccaccacctgcaaggacaagaccttgcgcatcattgaccccagaaaaggccaagtggtggcggtgagtgcctggcctggccactccccagaaccccttgaccagtggccagctgtcagcacccttgtacccaccattatcagagcccctggtcccggctttcacctgtcgcatccctgctccagagactagcccccttcccccgtctctgcaaccacaggtctctgccctaagtaagcccccagcctgcaattctctgcccggctcctgttccctcccctcccttgcatctcagaagctcagagaagggctcctcgctttgggattgaggaggggagaagctggaaactccatcctcccaccagaacctgcatgaaacctgagctcctggacccctctcctctcagccggcacccagacgcatcttccagggtctggggcctgacactggctcgagggctggccctttctccttgtggacccgctgggcgggggatggggcaaccctcgcgcgttgcttatcccagccggatgccctgggagggcggcggccctggcctcgccagcctcaagtctaacctggggtgcgggtgcgtgggccgcgtgcatgtctgcgtggagcaagcgcgccgagagcggtcggggctggcgccggggcgctctaacccactaacccggcgagcaggagcaagcccggcctcacgagggcgcccgcccgctgcgggctgtcttcaccgcagacgggaagctgctcagcaccggcttcagcaggatgagtgagcggcaactcgcgctctgggacccggtaggccaggccgcgccgggcgcgctagctcgctccttctctgggtctgccgggagcgccttcccgggctgtggctggcgcccaagaggccagagcggagcggggagctcccattcgggaaaagcctcgctgcgactccggggagccagcagacacccctgctctagggatcggcctttgagcgcgcttaagggttcgggatcggctgagagccgcgtgcctcctgctctctccaggcccggatgctctccaggtcaggggccagacgtggccccgcaggaagctgagtgcttaggccccatttgtctcttccccgcatccgctcctccaccccggacacccaagtcagcaagctggttgctcatccctccatgctcctcagggcaggcagctgggtgatgtccctccctgtctccccctccccccaggagaggtttgcggcccacgaggggatgaggcccatgcgggccgtcttcacgcgccagggccatatcttcaccacgggcttcacccgcatgagccagcgagagctgggcctgtgggacccggtaacgcagctggaggcttggggtgtgtgcctcggggactggcatcacgggagagtggccaggcgccccccacccgcagggcatgcccacctggacaggactgaaggctgctgccacctctgcagcgcctgccattctcacacccacccctctgcccagttttgctgcgtcgcgtgaaggatcctgcgctggcgcccccacctggtgatgccgagtccctgggggtggtt

SEQ ID NO: 17670 - DNA, 2300 bp, Homo sapien
aagtggttcacaaggaagagatctgccaagggaggccaggaaagggctgtccagcactacactattatctcaccttgacctcttccaccaggagattcccacagacacttcaataggagaacaggctgaagaacagcctcctccaagtaggtgtctttggaagagcactgggctggaaagttcaaatctcagctctacaagtatcttgttgtgtgtccttgatgaggccatcttacctctctgtgtcacagtccctaatattaaattatttcaactctgccttcagtaaagtgcaggaagtggactggatggggttagaagtgcagagagggatctgcaaagagaaaataggtaataaggaatcgagatgtaagcagatctgctacccactccccaaaaaacacacaggagagtagccccacatcttcttctccaacccctcagacagggcgagtggataagaactacccactggtcactgggcacactgcccctgtgctggatattgactggtgtccacacaatgacaacgttatcgccagtgcctcagacgacaccaccatcatggtaggagccaggtggctactgctgggcagttgagcaggggagcagggaaggctgcctcacctgtgctggggaaggtgctaagggtggtaataagggaggtgctgggtcccagggccctgccctgcccagctcctggactatttttagctacatgcccaccccctcccaggatgcactgcttaggactaattatagccatggccaacttggtgcctggagagcagcagggcagtgctctgaagtctccctgctggagtgaatgggaggtctctggagagctggcagtgccccctcctggctcccagctgcttctgttctaggcatgcaccaccacatcttgccctgtatttgacccttaccactcaagagagccagtagggttaaaaaaaaaggtagggaaggagtggagggacagggtggctcctcattccacccaccatataccttttcttcctacccaggtgtggcagattccagactatacccccatgcgcaacattacggaacctatcatcacacttgagggccactccaagcgtgtgggcatcctctcctggcaccctactgccaggaatgtcctgctcagtgcaggtctgggggctaaggaggggtcccccatagatgggtgggtggtggcaaaggtgggacccaggtgaccatgcctggccactctgggcaggtggtgacaatgtgatcatcatctggaatgtgggcaccggggaggtgctgctgagcctggatgatatgcacccagacgtcatccacagtgtgtgctggaacagcaacggtagcctgctagccaccacctgcaaggacaagaccttgcgcatcattgaccccagaaaaggccaagtggtggcggtgagtgcctggcctggccactccccagaaccccttgaccagtggccagctgtcagcacccttgtacccaccattatcagagcccctggtcccggctttcacctgtcgcatccctgctccagagactagcccccttcccccgtctctgcaaccacaggtctctgccctaagtaagcccccagcctgcaattctctgcccggctcctgttccctcccctcccttgcatctcagaagctcagagaagggctcctcgctttgggattgaggaggggagaagctggaaactccatcctcccaccagaacctgcatgaaacctgagctcctggacccctctcctctcagccggcacccagacgcatcttccagggtctggggcctgacactggctcgagggctggccctttctccttgtggacccgctgggcgggggatggggcaaccctcgcgcgttgcttatcccagccggatgccctgggagggcggcggccctggcctcgccagcctcaagtctaacctggggtgcgggtgcgtgggccgcgtgcatgtctgcgtggagcaagcgcgccgagagcggtcggggctggcgccggggcgctctaacccactaacccggcgagcaggagcaagcccggcctcacgagggcgcccgcccgctgcgggctgtcttcaccgcagacgggaagctgctcagcaccggcttcagcaggatgagtgagcggcaactcgcgctctgggacccggtaggccaggccgcgccgggcgcgctagctcgctccttctctgggtctgccgggagcgccttcccgggctgtggctggcgcccaagaggccagagcggagcggggagctcccattcgggaaaagcctcgc

SEQ ID NO: 17671 - DNA, 2300 bp, Homo sapien
ccagattccatcactgcctctcctaatgccgcatcccctcatgttttgggtgtggagaacctcctccctagcccaagatgaccatttgattaagtcacatcccagagcagcaaactgaggacagggtcaggctctatccaaagagtccctggttacctccaaggacacttgcagtgaagtagaaagaaagggaacggaaaggaagggggacatgacacataaagccagagccctccctaccctcaggatggggaccaggcaatgactaccacgttagcttcataaccttaagccccttgaccatccacatcccaaggatgactctcccccaacccccaaggtatgaccttgacctggattctggcccctacaccttgttagggtaggctccacaggtggcggggtcaggaagaggcctgaaaaagccagtgactcaccccagacaatgcagacatcatcctgggacacagccccagggctcaaatttcagccggagctgcctcctcccccaatatgtctgctctttcagtaccacatagccaccctctcccccgctgcctggtctggaccagtgtctgcccctgcagaggtctcagaacccccacaagcagcctgtgaagaccaaaaaatagatgggcccccagctcccatttggggatagtaggcaccaggactgcttgctgcttgtggttccaaggtaaaagtggttcacaaggaagagatctgccaagggaggccaggaaagggctgtccagcactacactattatctcaccttgacctcttccaccaggagattcccacagacacttcaataggagaacaggctgaagaacagcctcctccaagtaggtgtctttggaagagcactgggctggaaagttcaaatctcagctctacaagtatcttgttgtgtgtccttgatgaggccatcttacctctctgtgtcacagtccctaatattaaattatttcaactctgccttcagtaaagtgcaggaagtggactggatggggttagaagtgcagagagggatctgcaaagagaaaataggtaataaggaatcgagatgtaagcagatctgctacccactccccaaaaaacacacaggagagtagccccacatcttcttctccaacccctcagacagggcgagtggataagaactacccactggtcactgggcacactgcccctgtgctggatattgactggtgtccacacaatgacaacgttatcgccagtgcctcagacgacaccaccatcatggtaggagccaggtggctactgctgggcagttgagcaggggagcagggaaggctgcctcacctgtgctggggaaggtgctaagggtggtaataagggaggtgctgggtcccagggccctgccctgcccagctcctggactatttttagctacatgcccaccccctcccaggatgcactgcttaggactaattatagccatggccaacttggtgcctggagagcagcagggcagtgctctgaagtctccctgctggagtgaatgggaggtctctggagagctggcagtgccccctcctggctcccagctgcttctgttctaggcatgcaccaccacatcttgccctgtatttgacccttaccactcaagagagccagtagggttaaaaaaaaaggtagggaaggagtggagggacagggtggctcctcattccacccaccatataccttttcttcctacccaggtgtggcagattccagactatacccccatgcgcaacattacggaacctatcatcacacttgagggccactccaagcgtgtgggcatcctctcctggcaccctactgccaggaatgtcctgctcagtgcaggtctgggggctaaggaggggtcccccatagatgggtgggtggtggcaaaggtgggacccaggtgaccatgcctggccactctgggcaggtggtgacaatgtgatcatcatctggaatgtgggcaccggggaggtgctgctgagcctggatgatatgcacccagacgtcatccacagtgtgtgctggaacagcaacggtagcctgctagccaccacctgcaaggacaagaccttgcgcatcattgaccccagaaaaggccaagtggtggcggtgagtgcctggcctggccactccccagaaccccttgaccagtggccagctgtcagcacccttgtacccaccattatcagagcccctggtcccggctttcacctgtcgcatccctgctccagagactagcccccttcccccgtctctgcaaccacaggtctctgccctaag

SEQ ID NO: 17672 - DNA, 2300 bp, Homo sapien
acacagccagcattttaggtttctcaaatgatcgctattgccattcataacaataactaacattcacaaccctgtgtcgggtgccctctcacttgccctacatcaggatcagcctgggtcctcattctctagggcctctttcccccagggaggcctggaagtgcagtcccgcagtcccggccgatcgggacagctaaattgggagcgcgattgaggctggaatgcgggtggaggcacctggtctccctcggctgcccgctctaggggcgcacgccccctcgcccgttccctctccaagcgtcctgctctaggtctgcgaacccgagcctccccagcctacccgggagtcatggagggagggaagcagcgtgcgcacctagcacacagctgcacatttattttcgatggttctccgaggccggcggaagctgggaggggagtcggggtcgctcgactttcccgccgctggagggggcggggcaacttgggctctggccccgcccctatgctagccccgccctcttaggttgatggcagcggcagctggggctgcagcggcgccgggctctagagagccgcaggatcggccagagtgcggagctggacacccgggtcccagatactacagacacccggagaggtggctccttcgccctgaagccttcctcggccccctacgcactcgggccccttccgcagaggattcgcagcgtgagcgccccgcagcccgctcaggaccaggtacccagccccccacacccggccgtcaccgcagccagcggagcgggcggggtccctgaggggcagaggtctgcgcctcctccccccgcgccgccaaattcggtttcgggcggggaggacgtggtgtctatatttggccggacagcagccagcgctcccggagggcgcagacacctcgtctcgcaagaacgcagtgtcagggcagcaggctgaagaagggtgcagggaggccgggcctcaggctcggggccgcagacgcgccttgaagggcacacggatgctggggctggggtggggcaggagccactggctggggctttgggagtgctcagtgtgtcctctagggagaccctagctggagaaaaggcacctcaccctccccacccctgcaaatctggcttggccgtggcgggggcaggggtggaggatggggttgaagaccccacccctagaagagttcactaggaagaaggcccaaccagggcagaggacccagaggagaaaccggacaagcctatggtaggcaaaagccagaagaccatgatcagggcttcctggagaagccagtgcagaaaggagtgggagaagagggatccacctcactctgtgctgccacccgtccccccacaaggcatgggatgaaaacagtagcagaaaggactcagattggtggacaggaggaacttcccccttggcaaaattttaggaaaaggcaaaaccccatctgcctgaactattccagagatgcgagttcggtatcctgtggtggctgcagtcttggccccatacctggctttaagccaagatccaatggtcaagtcttctgcttctggacagggtgcctctgggagctacaaccacgtccgtgaagagatgctcatcaaggctggcggtggtgggggcggggggtgcaggcagtgtggcattgaggctcctcccaaaaacattccaacgtccagaaagctttcagtctgttaggctccacaatcccctcagcctgggtctctgtggagaattcaggccccaaatcctagccacttacattaaacagcattttacacagcaaaataactttcccatactttgaccaccttgaagaaagctccctgcttctaggaccagacactatatggatttatacctgactcctgaccacataacccttctcatcagccacccctccactcctcctccctcccgcagctcacaggactaaggaccaaaggcatttctgggcactgagatcctacctctctgcctgcagctatgagcagacgtgtggttcggcaaagcaagttccgccatgtgtttgggcaggcagcaaaggccgaccaggcctacgaggacatccgtgtgtccaaggtcacatgggacagctccttctgtgccgtcaaccccaaattcctggccattattgtggaggctggaggcgggggtgccttcatcgtcctgcctctggccaaggtgagggatcagggaaaggaagcaagtgggaggacactagctggggcccctgggaactcctgagcctttgttctcacctagttccattccatagt

SEQ ID NO: 17673 - DNA, 2300 bp, Homo sapien
ctgttcagagagctgtaaaaatatggcgattgagccaggactggaaccagttttttaattcattccaggcatcctttcctctgtgccacacagtataaactctcagttacgttttagctcagcacttgtgagataaagtggcactgtccttcagggagagacagaaatgcatgctgctgaaaagcaagaaccagatgccagaccacgtgggtaagaatcatagctacatcaactaccagttgaggttgtgatgggtaagccacctaacctctttgtggctccatttcctcaactgttaaatagggataacaacagtacccaccttagaggattgttttttggttttttgtgcgtgtgttttatttgagacagagtctcattctgtcacccaggctggagggcagtggcatgatctcagctcactgcaacctctgcctcctaggttcaagcaattctcgtgtctcagcctcctgagtagctgggattacaggtgtgcatcaccacacctggcaaatttttgtatttttagtagagatggggttttgccatgttggccaggctggtctcgaactcctgacctcaggtgatccacctgcctcagcctcccaaagtgctgggattacaggcgttagccacccgcgaccagcctagaggattgttaagagtatgaaattaatacgtataaagcccttagtgccagtgcctagcacataagcatgggttattgttgtaaaggagcaactgagtcactcaggtattttcctcctaatcatgtgcctggaatctttaggtaaaagagagatgactcacataccctcataccctgccccagcacccctacgccaggagttatttctggagcactcgtaacagttttttattctgttcccctacaagccactgactcttgatttgattctgtccctacaagccacctggactcttcctgagaaacaaaggagcctcgtgggcccttcatggtttctaccaccttccctccctttcctccccagtgctggttcctgcccttcagaaggctgtgttccattcactcactcccaggtgtgccctggagggtgggaagtaataactggccccagatgcccttatgatccaagggaagaaatccaggcaatgtgcagacactgggtagactggagctacgggactggctggtcttcactggctgtattttgatcaggttatctttaatctccttgacctcggtcaacattcagttctgtgaatattgggggagacgggggaagcttacctggaacacagtcgggcgccaattcaaacaaggcccagaaaacattaggagtctggcctctgagttggcttctctgacccctaaaatgtgactagagaccggtgctagcctcttccccctgcatctgggaggggagggagtgtcaaggtgggttcactttacactcggtcctccccttgttctttcagctgcttcctgccctgctccatggaatctcatctaatggggtgaaatgcctagcacacagccagcattttaggtttctcaaatgatcgctattgccattcataacaataactaacattcacaaccctgtgtcgggtgccctctcacttgccctacatcaggatcagcctgggtcctcattctctagggcctctttcccccagggaggcctggaagtgcagtcccgcagtcccggccgatcgggacagctaaattgggagcgcgattgaggctggaatgcgggtggaggcacctggtctccctcggctgcccgctctaggggcgcacgccccctcgcccgttccctctccaagcgtcctgctctaggtctgcgaacccgagcctccccagcctacccgggagtcatggagggagggaagcagcgtgcgcacctagcacacagctgcacatttattttcgatggttctccgaggccggcggaagctgggaggggagtcggggtcgctcgactttcccgccgctggagggggcggggcaacttgggctctggccccgcccctatgctagccccgccctcttaggttgatggcagcggcagctggggctgcagcggcgccgggctctagagagccgcaggatcggccagagtgcggagctggacacccgggtcccagatactacagacacccggagaggtggctccttcgccctgaagccttcctcggccccctacgcactcgggccccttccgcagaggattcgcagcgtgagcgccccgcagcccgctcaggaccaggtacccagccccccacacccggccgtcaccgcagccagcggagcg

SEQ ID NO: 17674 - DNA, 2300 bp, Homo sapien
actactaaaaggaggctgaggcaggagaatcacctgagcccaggaggttgaggctgcagtgagctctgatcgtttcactgcactccagcctggtggcagtgtgataccctgtctctgtgtgtgtgtgtgtgtgtgtgtgtgtgtgtgtgtgtgtgtgtgtgtgtgtgtaaaatatagaaagtaaaagccttccccagaagtatttctacctttcttgaaagaatcactattatcagtttggtgatgttcctccagattttttcctatattattctaacatagacactaatttcaaatgtgtttgaggtttttttttttactgaatagtataccttgtatatcattccactaaaatacctgacaggttttttttttccttttagttttttttttttcttaccacagaagatttctgtagacctgacagcttttaacagctccacagcatatagttgtatggattataatgtaaatccttttttgttgttgtttggtgtctcatcttttagtatcacaaatagtgtcatagtaaatatctttttttgtttatttgtttgtttatttgagatggagtctcgctgtgtcacccaggctggagtgcattggtgcaatctcggcccactgcaacctctgcctcccgggttcaaggagttctcctgtctcagcctcccgagtagctgggattacaggtgcccgctaccactcccagctaatttttgtatttttagtagagacggggtttcaccatgttggccaggctggtctcgaactcctgacctcaagcgatccgcccgccttagcctcccaaagtgctaggattacaggcatgagccacggcagccggccagtaaatatctgtatatatctttctttatttttattttttattttttttttgagacaagggatcactcagtcacccaggctgggtgcagtggcacaatctcagctcactgcatcctcaccctcctgggttcaagcaatcctcccacctcagccccctgagtagctaagactacagtcatacgccaccacacctggataattttttatatttttgtacagatggagttttaccatgttgcccaggctggtctcgaacttctgggctcaagcgatctgcccgcctcggcctcccatgaagtgctgagattacaggcgtgagccaccttacctggccatatggatatctgtgtgtacttgtagtagtattcctccaagaaaaatgtattaaggaagaattgttggttaaagggttaaatttggagagctattgccagatttcagtctttaaaatctacagttcagctgggtgtggtggggggccaatgtgggcatatcactcgaggtcagaagttcaagaccagcctggtcaacatggcgaaaccccatctctactaaaaatacaaaaattagccaggcatggtggcatgttcctgtaatcccagctactcgggaggctgaggtgggagaattgcttgaacctgggaggcagagattgcagtaagccgctgcactgcagcctaggcaacaaagcgagactctgaaaaaaacaaaaaacaaaaattctgaattcacattcctcctaccagtatatgagagggcttgtttagccataccatcatcaacactggctgttaccaaccattttaattcctgtcagactgataggtaaaaaaaactcacactcatttgttgttgttttgctttgttttttgctattaaattgtcttttcaaacgtttattgcctagttccattgagcaataacaaagcatttttacaagttaagatttatctgggagtgttttcctgggagggtgttgattatctttacaaaccagattaagatacttcctgtgtatgtcctccacagcaaacagcggcataacaaactatggagatctcattcagatagtgacctctcagaccaccacgaacccatctgcaaacctgggctagaactcaacaagaaggatatcaccacctcagcagaccagattgctgaggtgaagaccatggagagtcacccacccatacctcctgtctttgtggaacatatggtcccacaagatgcaaatcagaaaggcctgtgtaccaaagaaagaatgatctgcttggagtttacttctagggaatttcatgctggacagattgaggatgaattaaacttaaatgacatcaatggatgctcatcagggtgttgtctgaatgaatcaaaatttcctcttgacaattgccatgcatccaaagccttaattcagcctggacatgtcccagaaatggccaacaagtttccag

SEQ ID NO: 17675 - DNA, 2300 bp, Homo sapien
cagcaggaggctgtaataaattacagtctggaagaagtttcaaactggcaagtttgccagatattttaagcaatttattttggggtgtatcagcagatttttttttacactaccatttgggtggctgctgacacagcctgaataaatctttcaaacattttccttcctagagatggatgaagatgatgaactccaagatccagaccttccgttaactcttcacttgccacctggtgctttcctattaccagatatctcagaaacttagataactctttacagcatgagttttcagtatttcaagtccctcaaggtgctttggcaacaggcttaagttttatagaagaatcaactaacgagtaattctggttttaggcatagaccttataatttggattgattatttcattactagtatcttgaaaattgccaaactttccaatgggaaaagagcataaatatttatataaaacaaaggcttattattttcttgattatagcatgttgagtcttaaagtcacttcttcctaattttaatctaattggttagtgaagtttttagaaattattattaatttctgactccagaattctaaggcagcttcagtgatatatattttagtctagtattcaaaaatgctgaaaatgctgatacctgaaaatatttgctgtagcataatgagactggaaaggtaaaataaaaggaagctaacttctattgaatgcctgcaccatgccagccccatttgtgagcacaacatgcaggagagagagagcgcagtcatattttacaaagagctggtccctggtcaggtgaaaggcactgctcagtgaattggaaggaacatggtaagggcttaaaactgtaaaggcgtcagggaatacaatttgaaggtaaaagccctagatcaaatgtcataaaacctgggttcctgaatgacattatttataaacgaggtcatctgcttagaccttaaatgttactgtatctgtaaagtgaagatatgatctctactctgccgtctcaaccatggctgcactttggaatcacctggggagctttgaaaaatacgtctaaatcccaccttcaagagattccaattttattaaggtgcagcctgggcattgagatttttaaacccaccacaagtaattcctatgtgcagctaaggctgtgaatctttgaattgggggatggctaagaaagccctctatagatttacttacaaacattagtagatgttatcgacaatctaaattgttttttgtttgtttgaccattacttcaactgtttaaaaaaaaaaaatcttgccgggagccctggctcacgcctgtaatcccagcactttgggaggccgagacgggcggatcaccggaggtcaggagtttgagaccagcctggccaacacattgaaaccccatctctacgaaaaatacaaaaattagccaggcgtggtggcgcaaacctgtaatgccagctactcgggaggctgaggctggagaatcgcttgaacctgggaggcggaggttgcagtgaaccaagatcgcaccattgcattccagcctgggcgacaatagcagaaactccatctcaaaaaaaaatatatatatatatatacacacacacacacacacacacacacacatatgtatgtgagtgtaatctctgaatttccaaatcacataggaagtctctgataaatatttgttgcacttgtgaatttatggcctttacattttttaagatctttcaaaaacgggtttgaggtacaatgtatagagccaatctttaagaggcaggacttttctgttgaaacatcctcctttagagaaatgcaagcctttctcgtccacccttgagtagcttcactcccttaccgaggcagcagtgtcttggggccgccggatgccctaaaggctgtgacgcgcgctgcgggatccgcgcgggcgtcccgagatctggggcggggcgccggccgggcctaccctctccgctctcaggacccgcccgtcccgccccggacgcgggtgggggcgaactgctggcgacgcccgtcagtccggactctaccgccgagccctggggcttcggcggctgcctccgcgcgacccggcgggcccgcctccgccgccgggtgcacgcgcagcctgcgcctcgtgccggagcagagcagaggccaggatgcggagttgtgcactttgagccggccccatgaccctgagcacgttggcccgcaagaggaaggcgcccctcgcttgcacctgcagcctcggtggccccgacatgattccttacttc

SEQ ID NO: 17676 - DNA, 2300 bp, Homo sapien
cttgaacccgggaggcggaggttgcagtgagccgagattgcaccactgcactccagcctgggtggcaaagggagactccgtctcaaaaaaaaaaaaaaaaaaagttatcttaattgcatagagggctttatttacagtttattctgaactttaccatacattatctcaagaatcttgtcagttagggttccattgtagagataaaggaattaaagctcaaaaagttcaagccatttgcataaggttttagagctggaactagaaaccaggtcttctgattcctatggtagtgctctttctcactgcaaggttaatggacttaagcctttcatcttccaaaagaatttctgaagagtatgttaccatgaaaaagtagaacatcattgttgccctccctgagtcagagaatcaacatacaagtactaagacctacagatttgaatattactttttctagaatgatactttggttcataaagcacatatatttcatttatttgagttcattcagcttctagctatgtgtattttttggctatgtatctagtttcctctttggtctcccatgcattggttcaaagttcttacttctgaaacttgccttctcttttcctgtttactacggagctctggggaaaacacagtcagattgtttaatctgtgaaccatacatctttgtttaattttgtctcacaggcactcctgatcaccaccagggggcaaaagcctaccagctggcttctctgcactacactctacataggactgtacagtacagggaccctcagtgtctgattcttgatggaacctccctgctaattatttcaaccacagggccccagggagagaacaaaggctcagcacagaggactcttgtggcgtttaaccgtacagcagccagaaagagctcatgacagccctgtcagtttaaaagaagcaatgagatccaagagtgtttgagtgacaaacaggagggggtgggttttaataactgcaaactcccaagtgtgtgtgttttctacagctttgatatgtacggtggtatttaccagctcatccactcaagctgagaaatagccttgtcaactctctttctttgtgtaaataatcagtgatatttgcattgtgcaatttttttcctttttaatcttgattttccattacattctttgcttatgttctgcagacaatttacccctgagaaaaccattcccttaaaatatcttttaatctacatttttacataggtctatgaaagaatgacatttagagacgaaggagaagaaagcttaacgagcaaatcctgtttaattaaaagactgtcttcacagcaggaggcaagtgagaggtcaatagcaggctggaccctcacaaccggcttcctcggactcccaggcgcgctcagcttctcttctcctcaggaataatgaataagtctttagacaggcaatagaggaagcatgagggtaccacaaacctttccagggtatcaaacggaaaatggttttctttccagaagtctcatcataaaacatagacggaagggggggaaaagttaagaaaaagcccccgagagccggggtgaagggagtaaactggtctagcccagttctgtctgcgcccagtgagagggtttgaaactccgcggagccctttcccaatagaaaacgtgtttgcttcaggattttcatctcagctgcttttttttaaggttggttaagctgtgcgccgccccacctcataaaatggttgtctctcaggagtgaagactccagcggccccccgccctgggacccctcaccgggctggctcccttcggccccttcccccaccccactccacagcacccagtgctggcaaaccgcgcgattccagcacgaaggaggaaacccaggagggtgcggcggcccgaggcgcacgcactcggccagcttccggcaactcaagggttacgaccaggcggcggcgcgcgccgaggggagaggcggtagctgacaggtggcgcctgcgcactgggagcgctcattgtgccccgcagctgcggaaccgcccgcccgccgcccgttcggagcgtcagtcggcgacagtctggtggtgggtgcggagtctgcggccgttcccgcggcctcctcctcctccccgttcccttcacccccaccccgcacccctttccccatcccggctccgtcaccctcccgtcccccacactcaggacaagaatgccctgcccggaacaacccagcagcgcctagatggctttggtcacggtccagcggtcacctacccccagcaccacctcc

SEQ ID NO: 17677 - DNA, 2300 bp, Homo sapien
gacgatcttagttatatcttttgggtaacttgctgcaacttctacatcagcacttgcagcttcaccttgcacttttaagttatggagatgtcttctttccttaaaccccatgaatcaacttctgataattttcagcttttcctctgcagctttctcacctctctcagccttcacagaattgaagagaagttagggccttgctctggattgggctttggcttaagggaatgttgtagctgatttgatcttctatccagaccactaacactttgtccatatcagcatatctgctatatgaattcttcaaacactttttgaaccttgagtgtttgttccttctgcttcaaatttcttactagtcttttactatccagcttcctttgtgaaaatgtccctaactaccctgggaaaattaactgcttatttctctgttccttaacattttgtgtgtacctctactcttgcactttgcagattgaattgcatctctttccctcactgaactgggaactcttttttttttttttgagatggagtttcgctcattgccgaggctggagtgcaatggcatgatcttggctcgctgcaacctccgcctcccgggttcaagccattttcctgcctcagcctcctgcgtagctgggatcacaggcacctgccaacacacccagctacttttttgtatttttagtagagacagggtttcactatgttggctaggctcgtctcgaactcctgacctcaggtgatccacccgccttggcctcccaaagtgctgggattacaagcgtgagcccctgcgcccggactaaactgggaactctttaaggcaggtcttattcatccttttaagacctaacctttgcctgcatatagaaagcacctaataaagtcttattgagttgaatttatctgagtgcatccaaaccaaatagattttaaaagaaatggaaggaagcttctcagcaatttcaggagatggacaccataagcaaagaaatgaggctgttgagaatatacagttgggagctatcacataaatttattttctattatttattatttattaagtgagtcaaaaagactttgaggcagctatttttaaatgttggaaactcttctctccaaaggcagtacttttggtttatttagctagaacatgtgttatgttgataaaaagaaaagggaatggccgggtgcggtgcctcacacctgtaatcccagcactttcggaggctgaggagggtggatcacttgaggtcaggagttcaagaccagcctggccaacatggtgaaaccctgtctctactaaatgtacaaaaattagccaggcatggtggtgagcacctgtagtcccagctactcgggaggctgaggcaggagaatcacttgaacccaggaggcggaggttgcagtgagccgagattgcaccactgtactccagcccgggcgacagaatgagactctgtaaaaaaaaaaaagaaaagaaagaaaagtgaatacgctagagcattagatacatactatttcaaattagagtctctagactgtaactgtcctggaggcagactgtgtgaatataatttactctttacacaacacctagctcatatatatacaaactcttaaatgatttttggcatggcagtgatttgataatctgtgaatctacagtcatttgcagtaaagtggggatctggtaattatttattttaatacctcaatataaatgaataaaccagataagtcacattcctctggaattctcccttcccaaaaaaatgccttttgagatattattattctattctctatctacctttcttgcatgaattaggtagccataaaagtttcactttacctcaccttgttatctcaaaaattaatgaggatgacaatcacgttaaaaatgcaattgcattactgctgctgtattttttttttaatgatagtagtaatgattactatggtgagttttcttgtctccctgagcaatgatctagctttggtcagtagcaacagtcataacagtaatacagttggaaaagttcagcagttgagaatttatcattcaatagaattgtggggtgaggtgagggcaggagtgagggagcttttttaacttctggagtactttgtgatgtttattaatattttctttctttttgttattaatactggtctagtaatattcttctataccatttggtgataacttttggagtccaaatgaatgagtcagcatctcaagaggaactcagacctgctcaggttcttgtcctacataggtttatcacatt

SEQ ID NO: 17678 - DNA, 2300 bp, Homo sapien
tctgaggatattcttttaaagactccttacatttgttctatttaatggtatttccttgggtggcattagttattctgtttgttgaatttagtcatggggatgatttttcttaaacattctgtgaatgtgtgcttacatttgaatttgagattctctatttgctttcctatagagttactgttttctatagtctgatgccagtgggggaaggacaagatgtgcagacagtgaagctgtcaataggtcattttctctgcgtgtggaaatcttgcttctctagcctaaacatctatataccttaactcagtgcaggggaaaacccttctggtgcctgatgattagctcaaatgggaattaagatacacaaaaaggtcagtctttctcctatgacccatatctacatcctctaaacttggggtgcctcaaatctgctcccaaattttatagtggtctccaccgtatctttttagtcctatagtttcttcaatcagttgaattcccctgctttacatttttcagagatcttcaaaattcctgactcctgaaggcccccttcatgattgtagtattcttgcgcattttttaaattttaaaaacatacacacaacttttcctgtcattgctagagattttggtaggggaggggatataggtgcctgttctcagtctaccatcttggtctaatatctccgtcctgcatttaaaaaatgaagacataaaggaagctgggaataaaatgaagagaaatgtatttaaatatacatgtgtggtagactctttgcttactcaccacacatttcctcaccttttttttttttttttttgagacaaagtctcactggagtgcagtggcatgatcgtggctcactgcagcctcgacctccagggcttaagtgatcctcccacctcagcctcctgagtagttgggaccacaggtgtacgccaccatgcctggctaatttttttattgtttgtagaaacagcatcttcctaatgttgcgtaggctggtcttgaactccagggctcaagcagtcctcccgccttggcctcccaaaatgttgggattacaaatgtgagccactgcgcccagccttccctacctttttgcctgccaactgaacctcagtgttgtagcagatgaaaatcacttgttatcagagaatttgaaccaaaccctggcaccaagaaataagttataatttgtctatactattcatagtaatcccatttccctttaccagcgattggtctgggcgtgggcatgtatcctagttagggcagatgaaatgtaaagggaagtcttagagtggggagtctgggatcttctcctcttggataataaaacagagcctcaagaggagaaaaaccctttgtcctctatgcttttttgctgtgaggaagtgatggctggagctctaatagtcgtcatgtgatcatgaggtacaagcaaaaaaatgaacgaaaataaacagaaacagcctacgtatttaatgaaatcactgaactgctaaatggcttctgattaagtcaacaataaatgtctttatggttaaagtcactttgtctgattttctgttattttcagctgacattcttccaatccactgtgtaaatggatataaaaattttttcaaatattattctaaagtcacatagattaaaatttacttctaacatttcttacatttcacttttttttcccctcagaattaaacctggaggggcagcgaaaaatttcacctggttcaataaaggactctaaaactgaagcctcaggtaatattgcaattagaaaatctgcaaaagtgatttttgctttagatgaaactgaactgaaatcaaagccagagcacacatggaagaaaaacctttttgaaagaatggaggcaagagcccaagcaatgcagcagaaaataatagataaggaaaatctgaagaaggaactagaaaaaaaggctgaaaaaaaactccctagggataatttggccaaagagtggtttaatactgacagcatgacactgaataatactgcatatttgcttgacaaacttctacccaccttagttcctggagtagaaaacatgttaactcaagtagaaaagaagaaggttttgacagaagctgatactccaagcaagtttgacccaattaattatttgggggaatatttaataagaaacaatcctaattatatcaaagacccaggaatgtctggttaccagaggttgatgaaagaagtcacagaagacctgaagatatatgttcctgacactatctgcaacaggtacaatctgttata

SEQ ID NO: 17679 - DNA, 2300 bp, Homo sapien
tctttttaaaaaccaagttactttttatagcaaaaataatttattgtgcatttatgacatagtgacaatagcacaaaactaggagataaaatggaagtatacttttctaagcttcttatactatacacaaagtggtagattcttactttaaggcagattgtgataagtttaagacatatattagaaaccctaaagcaacagcttatataacaagcaaagaagtatggtcaataaaccaacaaaggaggctgaagcatgaaaatcataagctgaatcacagttgggaaaaatagaaaacaaatagcaatcatactttttttttttttttttgagatggggtctggctatgttgtgcatgctggcctcaacctcccaaagtgttgggactacaggcctgagccaccccacccagcctgcaatcatagtcactttaatgaaaatgttttaagcatccaaattaaatggaagagactgtcagactggataaaaaagcaagacccaactattttctgtcaacaagtgatccaatttgaatgtaaatacacaaatagattaaaatgggttgaaaaagatacactatgctagcattaatcaaaagaaagctagttatattgatagcagaccaagcagacaaagaagaataaaggaataaagagggccacttcttaatgctatagaggttagtagaggttaatgcaagagaacgtaacaatcctaaatgtttacatacctaatttcaaaatacacgacacaaactgatagaattgaaaggagaagcaaattcgcaattatagttggagatttcaacatccttatctcagtaattgatctctttggctgctctgagactagctgggaatgaaccaagagtgaatgagtgcacagatgtgggcagagttttcaaaaaggtatcatatatgggccaggcacggtggctcacgcctgtaatcccagcactttgggaggctgaggcgggtgggtcacatgaggtcaggagtttgagaccagcctggccaacatggtgaaaccccgcctctactaaaaaaatacaaaaattagccaggcatggtggcggacgcctgtaatctcagctactcaggaggctgaggcaggagaatcgcctgaacctgggaggcggaggttgcagtgagccaagattatgccactgcactccagcctgggcgacaagagcgagactacgtctcaaaaaaaaaaaaaaaaaaaaaaaagtatcatatatgatcctgattcctatacccaatggcccgtgaacagtattattaataattttggtccttgggccgggcgcggtggctcatgcctgtaatcccagcaatttgggaggccgagtcgggcggatcacccgaggtcgggagttcgagaccagcctgaccaacatggagaaaccccgtctctactaaaaatacaaacttagccgggcgtggtggcacatgcctgtaatcccagctactcgggaggctgaggcaggagaatcgcttgaacccgggaggcggaggttgaggtaaccgagttcgcgcctttgcactctagcctgggcaacaagagcgaaactccgtctcaaaaaaaaaattttttttttaataataattttggtcctatgtaaggtattattaatacacagattttcatttttcgcctaattatcctgaaccagttaaagtgaacacttggaagggggtagggggaatatcgatagccatggcagtggttttcaaactttatcagaattacccgctggttaaaattcagataactcgcttcactccaaagtttctgattctgcaggtttggggtagggcccgagaatttgtcattttaacagtatctccggtgttgctgatgccgctggtcccagaaccacacactgcgaacaactggcctagaacgttgtcattcctttctcctacagattttgaggcagccggtgggctccgaaacaaaacagaggtcactggatccgattcccagtaccatagaagtgactcaaaccagcgattcaaccgacaagcaggatccgggccacccaaagccgcgcgagagtttacgtgacgacatcggcgtcagcgtcacggaggcgtcggccacgttcagcggacacgggagcaagatggcgattccgggcaggcagtgagtgatccgggagttagggtcaggctgggggatgagaaactacggcgactgtatctttggccgaggagttttaaatgcgctggaagtgaagggactgtgtcgtcaagggtagagacgggaaaaaacgagaagtcctgaggaacatagat

SEQ ID NO: 17680 - DNA, 2300 bp, Homo sapien
gttgtttaacgtacaaaacatgtcattgatataggccggagggaagtacagaggcctttttaaacaacacaaccactgactaccaagttcaggtttaatttagctgaatatttaaatatgttgacatctcatcatgtaataaaataataatatcccttggcctggtaaatggttacctatggtgggtgagaggatgtgtggttattttaaaagcctatcaagcctagttgagggccgaaggaagggggaagtggggggaggccaaggccaggcagtagcataaatggtgagcagggtgaggttatggagaccgctcttgtcagaattcatatccttctgagtggtgtttgcattcttgagcctggggtgggtggcggagggcccaacaagtgcggtacagcccaagacgtctacctccccttacacacacacagcccctagctacatgaagctgatttatctcttgttgctgtagatatttttggcaacaatcgatccctttaaaatttttattttccactttacagaaaaaatgcagcaaacgccaaaccctagtgactgacattgcctggtgttcatgtctaatccttgctcatgtttatagccatagtcattcttgtgaagctactattttgtgtcctgatttttcacttactatgtttttgtcttcacatgtgtaggtagctaagttgcagtcaccaaaaaccccaaataggtaggagacatccatgcgccatttctattagccagttcctagccatcctcctaactgttggatctggagggttagcctcagatcattgcagttataaacagtccatccctggctatcttttctagaagggtccagtgtcatctcagctaggcagaaacgtatttcaactcccaaactgtttcaagagtttgaaaagctcaggcccagaagaaacagagtgagcagttgaacagtcttacaactgctgcttacaactttataacaggccataggtttaaagtccaaaagggctcaaatttctaccccacgtttgacgactcagacctcaagccagagctgagctgacttccctgcgcccaggccacggcggtgaaatgaaggcacagcagccccggccaggccctcccagtggaggcacagggggacggcgacaccaaccaccccagcatcagtaacctgcacactcttctccctaggtctcctggaggcaaggcgaccttgcttgccctctcttgcagaataacaaggggcttagccacaggagttgctggcaagtggaaagaagaacaaatggtgagcagcagtgccgtttaaggaccagtcgggcttgcaaatgcataatgggaacgcagaaaggccatgtgcagatagactggacacagccggaggcagctcaaatctgccccaaccttcctaggggctaaaagacgagtgacagaatctgtagctgatgagctggggtgcctcacgaagggtggcctttttacctctgtcctttgcttttttccttttaaaatcatagctgtagttgatataaaatataactttgggtgtgcagcttaaatgatggtgaggactgtcctgcctgctgaaaggcagaaacgcctttgcttgtcattgtttccccaacatagcatccaagacaaagggggtgctctgtgacgctttggagcctctctcacattcttctgagctgctggcaaaccacaagatgagagtccagtggctcaaagggaagcgagtgctttgctctccagtccagcctgtgcaaaccttggtgatttgctgtctatttgtgttggttttattgtttccttttgaaattacttgattgtcatttgatgccctgtataggttgagaaatttagttgaatttatggactgccatgtagcaaataggatgtctcacatttaacagatgcatttgtaatcccgttaactaatgtagtttaagatgtatgatgagttaataccaaagatgagtaaaatgtctaacttttttctccttcctctgtgtgtctttccaacagagtcaatcccgacgtgtcaatcccgacgatagagagctcggaggtgatccacaaatccaagcacccagagatcaattgggatccttggcagatggacatcagtgtcatttactaaccagcaggatggagacgacgcccttgaattctcagaagcagctatcagcgtgtgaagatggagaagattgtcaggaaaacggagttctacagaaggttgttcccaccccaggggacaaagtggagtccgggcaaatatccaatgggtactcagcagttcc

SEQ ID NO: 17681 - DNA, 2300 bp, Homo sapien
gtcacactggacagacctggtcttggtagccaagcgctgaagtcacccctgcagccgtcctccgctttggcgcctcttcccagcgtccctgcccccctcctttggccctcctggaaaggacactttgcgttttctgttgcccttgcctatacagcacaaacatgctcatttaagaagtggaacgtgggaggcagcagacaactgtgttcatctgaaaggaggaggccccactcccgtgcaggcgctgcccctgggggtgaaattcccaagcttgttggggattctcccgcctggcgttgccgctctgaatgccagcacctaacccctaatgtccctactgcagccctcccagcatcccccctgcaacctcccagcaactccctgtacccctcctaggatcgctcctgcatcccccattatcccccccttcacccctcgcggcatcccccctgcacccccagcatcccccctgcagcccccccagcatctcccctgcacccccagcatcccccctgcagcccttccagcatccccctgcacctctcccaggatctcccctgcaacccccattatcccccctgcacccctcgcagtatcccccctgcaccccccagcatccccccatgcacccccggcatcccccctgcacccctccagcattctccttgcaccctaccagtattcccccgcatcccggcctccaagcctcccgcccaccttgcggtccccgccctggcgtctaggtggcaccagaatcccgcgcggactccacccgctgggagctgccctcgcttgcccgtggttgtccagctcagtccctctagacgctcagcccaaccggccgcacagttttcaggggtcagttcctccaagtacaaggggcggtggcttctctggagctgcaaacttgtcactgctatttcctttcggtcttctacttcctatcgttcctggcctcctcttggggagaggtagagccctctcctttccgcctcagggacaacccaaagcaagtactgcatgtgccctttttaaagttttaaataattttagcaaaaaggatattaacattaaatcaatttttaaactttttgaaaaaattatcaaaactacatgcacatggttcaaaacaataggctcctgctgggccctttcagataattcaaattgtcaccaggttggagtgcagtggttcgatcacggctcactgcagcctcgacctcccgggctcagctgatcctccacctcagcctcctgagtagctgggaacacaagcgcgagcaaccacgcccggctaattaaaaaaattttttttctagagatggggtcttgctgtgttgcccaggctggtcttgaattcctgggctcaagcaatcctcccgcctcagcctcccaaagcactgtgctcctttttgacgcagctttgaactgtagctggttaacaaaatgagaaccagttcttcattccttcattgtggaagtctttattgtgagactctggggacggagaggaattagacaagggcctctaagctgagctcacatcccagccggtcagtcagataaacgcatgggtatcgagtactgctaggtcccaggaagaaagagagagcagctttcgggatggggacgatggggaggtgtccgaggtcaagagaaagcggcacgagcagacccctgtgtgccgtcctgtgggcgcggggcggcaggggaggcgcacacctgctcctttgtgcagcctcccccctcccgcaaagttaaagagcaggaaagtcaggattcctcgctcggccctgccctgccggctgctccgcgctccgctcctccctgcgagcgtgtgtgtgtgtcgggggtccctcccctcctggctctggggtcgggcgcgcaccccgccccgtagcgcggcccctccctggcgagcgcaaccccatccagcgggagcgcggagccgcggccgcggggaagcattaagtttattcgcctcaaagtgacgcaaaaattcttcaagagctctttggcggcggctatctagagatcagaccatgtgagggcccgcgggtacaaatacggccgcgccggcgcccctccgcacagccagcgccgccgggtgcctcgagggcgcgaggccagcccgcctgcccagcccgggaccagcctccccgcgcagcctggcaggtgggtccgcttttcctctccgcctcgaacccacgtttctttccagaccttcttccccgcctcggggagggggatagaaccgctgcgccccaccgccctgcgaggaggcgaggaggtgcatgcgc

SEQ ID NO: 17682 - DNA, 2300 bp, Homo sapien
aatctctagacatcttttcatctacgtcctgaacttctcttcctgggtgtcctgtggggcatcctaattttgctatggcccaaactcagttcagatctgcacacttgcaaatatgcaaatatgcctatttttctgtatgccctctcttggttaatgacaccaccttccatcttcttattccgctgaaaacttcaagattatcaatgcctcttccctttccgcaatgtaaggcttttgtcctctcccaagttcactactggaagaaccttctaaccagtttccctatctccagagcccctcccctccaaattactctccccactgccaccaggtttctttttttacacagacttgagcatatttttcctttgtttcaaaacccattttgtcttctaattaaccataagataaagtccagatgctcaggcattgaacataaaaccctttatatcttggcccaaacctacaaaacttttccagtcctacaccttgcctctgctcccaaaacatgccttgctcttagccacatccgattatgatgcaccctttcttgaacatgattttattcactgcgccttcgctggtgccttgaatgcccttctcctgttctttgacttgtaaaaatctcatccactcttcaagatcatgctctcttgtcacttctattttcaggcaccctttggccctaattgacagtgctctcctcattgcttctacagtctacagcactattggtatgctactacagatagtctaaaagttgttttgcatctctttcctactacattgagtttcttaacggcaagattaagctttgttcgtctctatgtcatcagcagtttgtccagtgcctagtacatgttagatactgaataaaaatttatgacttgaattgggcaggatgcttgaacatcattttgtgaaaggaccagtgatttctttctgtataattttcagcctcttctttttcagatattgaaagaacctcagaataggatggttgatgggcccacttaagatagttgctatgttatagccccaatttttagccgagtctctctagggacatagaaaccgtgctttctcaaatgactgattggtgcctgagtatggatttttccagatatcagagttccttagaactgcgatgattttcaatctaagaagacctagattctaggttacacacacacacactcaacctcatcgttttgaatagcagatacagggtttcagtgtttttgttttactctctgtgggttctatcccagcatcttactaagggctgagatttcagggcatgaaacacggaatcaacaaaaacaaggtttttacaatctcaaaactttgggaaactgttgagttatcttgaaagcctagagggggagcatcagttagttttgtagagaactcggcgaaacaatattgatgcatacggctagcctctgtcatcctcctgagttaaacccaacgggacatgctggactatacaggagccactcgtggactccgtgaagaccagatgggtagtgttcttgaaatgagcagatgtctatttgtagaactctggtagtagctttggagtgggtggggaagagcttggttcccattccccctcaaagacaattatttgcttctgatgagaatccaagcaacaagttgccattgagaatgcagtgattggtcagcaaacgaagcctataggaagagccttcgggtgcattccttgtgacatatcgacccgtcctaagcccgacgcttaattatgggacctctcagctcctccctcccgcctcgagctcccttttggcttctcacaaggcttcctggggacgattccccgatgctagagtactgggggtctgggcccacagggaacccgtcagcctccctccttggagcgggcctgatcccgggagggcgcccgcgcggcccggaggcgggaacctagggggagaaggcgccggcgccgccctggcgcgcagaccatctgtgcggtcctgcgcgggggcaggcgcggcctcagcccccgggcgctggcggacccagcgcgtcagctaggccgcccccgtcggccctcccccgggcggggccagccccgacggcgctgactcagcaacgcgaggggggagttttgtccctccgcggaccccgtttctcccagcctcagcctccccgccgccgccgccgccgccgccgccgagccggtttcctttttccggcgctccgggtgcgagagacaggtcgggccccctaggcagcgagccgcagcgcaatcccggcgctcgcccaaggaccct

SEQ ID NO: 17683 - DNA, 2300 bp, Homo sapien
aactaataataattaatcattatttcctaatatcacctaatatccaattgtagaagttgctggtggtgctctactcacacatccttggcctacccagaagttacctgcaaagagttcccatatagccagtgacttcctgagcatcttttcctggacatgttggccagcttgagagagtacactttgccctcacagggcaggctgaaagtgccagagagtcaacaccttgagagtgtccctcagccggagatggagagaagttgcttccttccctatcagtagttgattctgaggtatgctgcacagaatacaacttgtccaaagctccagggatatagttgctcacggtagtaatctttaacacattctttactagtttcctcccttccctatcttacttccttactatgcttcctgagatcacttttttttttttttttttttgaggaagggtctcactctctcgcccagattggaatgcagtggtccaatcttggctcaacacaacctccacctcccagcctcaagggattcttccacctcagcctcccaagtagctgggattacaggcgcccgccaccatgcctggctaatttttctatttttagtagagacggggtttcatcacattggccaggctggtctcgaactcctgacctcaaatgatccaccctcctcggcctcccaaagtgctgggattaagggagtgagccactcaccgtgcccggccgagatcacctttaaataaactattggcactcaaagctctgtctcagggtctattttggaggcaccaagaaccaaaacatcactccattgctaaattcattttaaaatgacaatcttggatccctggagaggcaaactcaaaacctgtttgggtggtgcttgcaacccagccaacaggagctgctcttagctctgatttttgcttgaacaatgctatagtgaggttgtgttgatttaggatgccctgctcagcctatattaataataatagtaataagagctactgtttaccaagagcttactgtgcggcagattcacatgcttcatttcatttaatcctcacagtgactccgtagggagggtactattactatttccattgtattgatgaagatcctgaggctcatggaggttaaataacttttcaaagttacatagctagtaagaggcagattgctggtgtgcttcagcagtgtgttaaaatgtgtagataactataaatattcttctgttatatttttgtgtaaatgggaacaatagtacttggcagataaaatttgcatcgttaacaataccataaacatagtgtaatgcaaggatctcccaatcaggtgagagcctcaagaggataaaactgttccctaggccaaggtgggcagattgcttaaggccgggagttagagaccagcctaggaaacatggcgaaatttcatctctaccaaaaatatatatattaacaaagtttagctgggcatggtgactcacgccagtagtcctagctccttgggaggctgggagcagaggttcagtcagccacaattgtgccattgcattccaatctgggtgacagagtgaaaccctgcctcaaaaaacaaaacaaacaacaacaacaaaaaaacggctccctgccatgcctggcttggtacagcttatgcactgggcttgggttactagtggtaactaagacttttccagcattatttaagttgtgtagaatcttccaatgttttgacctctgttaaagtcaaacttctctttggactcgtcccttcacaatccccaggctagatgatcaaaacgcagccatcttacttaaatatgacaatattcagtgagatgcgctacagatttttgcacaagttcaagctttcttggaacaacacatccctgttagtaatatccggccccacctagtaaccgaggtagacatagaaacttagatcttaagaagatgtctttcccaattactatcttctctaagactccataaagaaaaacagactttgaacccaagttatcttatttatttgaccctgctgtcataaagcgttcaaattcaagtattataaaggattgtaacagggaaagcatttagggttttcaggcagaggaacagttggccaaggaagtcagcttctcagagctcaagaggtaagtggtaagactgtcttatatagaaagtagagagtcatacagattaaaaacaagccaagtgaggggaatacattttgaaaagttgctgtctcggtggagtggagggaaagagaagacatagatttgtccccttaata

SEQ ID NO: 17684 - DNA, 2300 bp, Homo sapien
tgaaggggctggaagaggtttcaaaggagagtgaacgtggtagaaaaggaaatatttgattagaagttaacatgtcctctggggcttctttgacttggattactgtaaaagtgcatggtgtaatagttgagcactcccgggaggtggtgggcggtctctctgtacagagttgtggctttgtttctgatgagttgcagctgctgtgcataatgtagactagatcaaatggggcatggagaagagccattcacaggaccggagtgacggtgctcgctctgatggcagaatactaaattaatcatcttcacctaaacctgtgctttctcctggcctgtacctcagtgaatacctgcaagttgcttaggctgtaacttgaagtcagcctacaatcctctttgtctccagatcctgtccactttcctttccgaaggtctttcagatccatttccttctttccacctccactggcactgccctcattcagagtctcatcatgtcttcctggattgcagcttccttccaggtctctcagcctcaagtcttaggcctcccattcaattttccgtgttactgtcagaggaatttttctaaactagcttaaaacccgtctgtggttctccatggccttccagatcaaatgtgctccctgaagactggcctgtgagccccttcacaccagtaatcctgaccctgcatgcaattcccagaacacaaggcatttgttctcaaatcctgcggctttctttgcttgcttctcctcctgcctgggatccttcccatcctccatggtttctctcctcctttcctcctcctcaagttcagatatttccctcacctgtaccccctctgttgtagcatttatcacaaactacactgaatctcttgactgggcagaagaatgaattgtttcccagcatctagctttgacataaaagttgctcaataaatacttgacgaatgaatgaactctattaaagtagggttcagtcatagttcagggaaggggccctgaaatagctggctctgaaagaaggtaatgccggttattgcgattatgttgttagatgggtagaatttcgcattcgattaagggatagttttgggtttcttcaagctaaagaaactaaagcctataaaaggtgatttaaaagacctcttctctagacttgatgaaacgctgtaattgccatctttggctgacactgaggagttcaggaatgccaagcaagtgtttccagaaatgtcaaacctgctgttttaaaatatgtcattccagggcacagttaaatatacaacttgctccgatgaggtgggagaagtgggccggtgagctgtgaaatgaaatctgcctaatgagggtcgaggccagcacacacagggacctatttgcagtaaaacaacgtggggtgacgcctaagaaatagacaacattaacacaaagggagcctactacgtagcacatttccgctaggcataaaagagacacctttccagaaagcaactctaaaaatgaatgcaccgcctagtgaggtgcgagccttcctccccacgaggcgtcccgtgcaaccgcacgcggacagcggggctccagcggaggcggggtggatgcggagacaaggcgcctaggagactgggctaaggctttgagtgtccgaacgaagattctttcgaacctattgattttttctagtcttatgattctttcgaaccttttgattctttccattctcggttctaagcattaaagcgcagctgagaaaggcagcaacaaagatgggaagagaactagcaggagttctcagagaaaaatgggtgataatttaggggagaagccataaagaagagactaagcgagaagcggagcacacgcagaagacgaaacaaggaggaggagaagagaagaagaaccttggcgaaggaagagagtgaccaaactcgtcccggacgggaggagggcaggcccgcccagagggaatcggctgctttaagggaagccccgccccctggtggtgacgctccaccaggcccgtccgcgattggctgcggccagagggcgggatggggttgctaggcgaggaggggatccggcgggcccccgccgcccggagcgctgagccgcgggagcggagccggggttagcggcgctgctggaagatggcgagcggccgggacgagcggccgccttggcggctagggcggctcctgttgctcatgtgcctgctgctgctggggagctcggcccgggcggctcacatcaagaaggcggaggcgactaccacaactacgagcgcgggcgccga

SEQ ID NO: 17685 - DNA, 2300 bp, Homo sapien
cactcacctggctctaatgaagcactccacccatcccccacttggacttctcgtccattgcacagcagcaatgaggctccctgccatggtggcagtggggaccacatgcggagcagtaacaaggcaccccctccctggggaatcagtgaaggccaagggagagcctgaacttccactgccacctggaagtagcaagcatttccctatgtcccccagcagcatagtgtcagaggaagtctgcttaaacagaagacataaataagatcagaatctcataacaaatacctgaaacatcaggatacaatttataaaaattgtcattccaatagcccagagaacttcgacttgagtgaaaaaaagacaacagaccccaacatcaagatgacacagatgttggaattatctgatgaggactttaaagcagctctaataaaaatactttagtgagcaattacaaacaaacttagaacaaatgataaaacgagtctcagcaaagaaacagaagatataatgaggaactgaacagaagttttagatacgaaaaatgcaataattgacatgaactcaacgaataggctcaacagcagaatggagggaacagaggaaagacatactttctgtcagcaaatctgaagacagaatagtagatagtaccaaatccgaatgatggaaaatagactgaaaaaaaattagcataacttcagagctatgtgggacattaacacaagatctagcattcacgtcatcagactcccagaaaaagaagagaaacagtatgagacagaaaaagtattggaagaaacaatggttgagaatcccccaaatttggcagaagacataaatgtcagaatcaagaagctgaggatatcccaaacaggataaatccaaagaaatctacaccaaggcacatcataacttctgaaaactaaagaacagttcttgaaagcagtgagagagaaaatgtattttagctacagtggaaaaacaattccaattttagtcaatttcttatctgaaactatggaggccagaaggaattggcacatttttcaagtgctgaagaaagaaattgtcaacttcagattgtatatctggcaacaatatccgatcccccaagaatgaagggaaatcaagacattctcagatgaagaaaaactaatagaatttgtcaccagctgatctactctttaaaaaaaaaatggctgagggaaattcttgaaacagaaaggaaacgattagaaaaaggaatcttgggacactaggaacgaagaagagtaaaatatgcataaatcaagtaagctttcctcttctcttgaattctctaacttatgcctgacccttgaagcaaatattgtaacactgatgtggttctcctcaatgaatgcagaggaaatacttaaaaacaactatattataaatgagtgggggaaagaactttacaggaattaaggtttctacacttcactagaattaagtcagcaccggtagactgtgataatttatgtatctataaagtgtgggtttggacagcagattttatcaggttgagggctcaggccgagagcatgtagaagcagttagctcactctttctagatgtggcggctgacaaggacaaagagggctgggactagaactgctgtagacaaggaaagcagccagtggagaagagcgcatacgccaaagaacgtggatgatggagcacaggcggggaggtaggatgaaggaaatggctctgggaagaaagggtctctatgtctgagaaaggaagaaattggctgaagatacaaattagagacaaggtgagggaaattgagggagttgcctgaggatgattctcctcccagtcaagtaggcacctgctgagagaaaggataagccgagatgagggagatgatgatggtttggggcgcagaaagcgggaatgaaagacaggagctaaagccgaagttttttctctctcgctacttaaaagctgtaagataacgaattgatcagcaggtggcagtgtccgcggaggctcgcatcccgtcggccctggctctcaaggcggaaacacgcaccatggtgactttccggcctgcatcgcctctgctcccctatcccggctgacgttggacgacaaagatggcggcagggaccagcagttactgggaaggtgagggcgagaaggcctccgggtgcgtcctacgagggtgagaggggctgagtgaggacagatcttgggagaagcagcacaggaaagaaccagactcccggagcggccgagctgagcagcggggcttgcctaagtgggatccc

SEQ ID NO: 17686 - DNA, 2300 bp, Homo sapien
atatctggcaacaatatccgatcccccaagaatgaagggaaatcaagacattctcagatgaagaaaaactaatagaatttgtcaccagctgatctactctttaaaaaaaaaatggctgagggaaattcttgaaacagaaaggaaacgattagaaaaaggaatcttgggacactaggaacgaagaagagtaaaatatgcataaatcaagtaagctttcctcttctcttgaattctctaacttatgcctgacccttgaagcaaatattgtaacactgatgtggttctcctcaatgaatgcagaggaaatacttaaaaacaactatattataaatgagtgggggaaagaactttacaggaattaaggtttctacacttcactagaattaagtcagcaccggtagactgtgataatttatgtatctataaagtgtgggtttggacagcagattttatcaggttgagggctcaggccgagagcatgtagaagcagttagctcactctttctagatgtggcggctgacaaggacaaagagggctgggactagaactgctgtagacaaggaaagcagccagtggagaagagcgcatacgccaaagaacgtggatgatggagcacaggcggggaggtaggatgaaggaaatggctctgggaagaaagggtctctatgtctgagaaaggaagaaattggctgaagatacaaattagagacaaggtgagggaaattgagggagttgcctgaggatgattctcctcccagtcaagtaggcacctgctgagagaaaggataagccgagatgagggagatgatgatggtttggggcgcagaaagcgggaatgaaagacaggagctaaagccgaagttttttctctctcgctacttaaaagctgtaagataacgaattgatcagcaggtggcagtgtccgcggaggctcgcatcccgtcggccctggctctcaaggcggaaacacgcaccatggtgactttccggcctgcatcgcctctgctcccctatcccggctgacgttggacgacaaagatggcggcagggaccagcagttactgggaaggtgagggcgagaaggcctccgggtgcgtcctacgagggtgagaggggctgagtgaggacagatcttgggagaagcagcacaggaaagaaccagactcccggagcggccgagctgagcagcggggcttgcctaagtgggatccccggggccttggggataccgaacggtctggggtaggggtctggcctggccggggcgtgtgagcgggacgtggggcaggggttgggcagagtggacagagcggggatgtagaggaagagggctctcaatcgcctgggtagaattgtgttgagggagtaatggaactcggacgaaggggcttggggtacgaactctgagaggaaacgaatgttgagggagaagatccagagccccggagactggaggagtcagcgcattggagctgaggtcactattggaaaactgagtgggaaaagagaaggaggaacttgcattccggtccgtcggaggaagtatgaagagaataggagacagaatgtctcttattgggtctccatgacaactacaggttggggacttccaggactgggtgtttgaaggaggagaaaataacttacccttctgctctagagtctagaatcggttttattgaaaaagttgagagaacctgtgtgaattgcagttacatttgctatacttctcccaccaaaaaaaccttcctgtgatttgacaaatgcatttgtttaattcctgaaactatagtcggataaagtgagcttacataaaactcattcgtggattatgatgatcaacaagagcagagaaagctcacctttttctcccaactgtctctttgctttacagccgcatagaaactactttccaaattcctttgacctgtttttattgctatacactgaagcctctagaaaccacagtattgtcactatcagccccttggtctaagaaactcaattctaaatttatccagatttgcctatcatactttcaaaatgcttttacttatgtttcctactagagaagacaattattccaatcacagaaaagcgtgcttatagtttaaaacatgtattacaatgcccatttgaaatgtgtgtaccagctagaaaacttttttttttttttttttggagactcgctatgtcgcccaggctggagtgcggtggcgctatcgatctcggctcactgcagcctccgcctcctgcgttcaagcgattctcctgtctcagcctccttagtagctgggac

SEQ ID NO: 17687 - DNA, 2300 bp, Homo sapien
gagggactcctgtcagggcccggtcacccaccctgggcagcccccatcccatctcagggctgacctttctcagctccagcagaaagcaccacctcgagtccaggatgggcagccccattgtgcagcctgaccacccccgacaccaggggccccagtaaccttggccacgctggctctgcactccctcttctcccaggtcctgacccctcctgggagtcagccccacaggaaggcctttgtcctcctttccctgtgccttctcctgggctgagacctgagctggatgggacagagccagtcctttctggaggtcgactccctgacccggatggctccaggccctgtgcaggtcctcagctctgcctgggttgccttacagtgagaagaggctgccccctgtcagctcccgggaggcagaggtaagagcctggtccagggacggggggacgtggcgggttgttgatgagcagaggaggcagtgggcctgggcggtggccagtgaggataacacgctgtcactgggaggggtagcaatccctgctggacctgacctcaggttgctgtatctctggcagtttgatgaaattccaaagtgagaaccacagtcctggcttggggatggctgcccacttgtgttaggaccccacctagaggctgggctctgacctacgactggtgtgtctgtggcctgaggatggcacgtcccagggtcccaaggccagcccactggtgctcattcgctcaaaggctctcagcccttagggtctgcccttccctggctttttctagctgggtcccaccagggctccagagcccaagacccagcatccagggacggctccgggaagcctggtagctccgctaactccaacattcctcatttgacagcaaatgcagcaggagatgagacgcaagagcaagtggatggcaatgctgggaaaatgggagacatatcagaacagcaaaaaggtcatgtgtggagggagaggcccccagaatcactttctgcagaaacagggcacaggcacccatggctatgacctggcagcgtaagcctctcagagggcaggtggcacactgtcctcacctagaggaccgcaggcctggttgccagctttgctgcctgttcatgcaagcgtcaccttgctgagagagaatctatatctagggctggggccaccgggagctcagggctagggaagcctcctggtgacctgaaggaaggaaaaggtccagatcagagttcagactttgagtgtccatcccctctttcagtcctgggaagggagaccctgtcccagcttgacatcacctctcctgacgaatcatggggccaaaatcaaagatttccagaatcctcgggctctggttctcgctggggttgtcgcggggcctgtgacaccagatcgttttctgcccacagctgatgaagcgagtgtataagggcattcccatgaacgtccgggccgaggtgtggtcagtcctcctgaacattcaggaaatcaaggcgaaaaaccccagacaataccgggtatgctcagccacagcacaacaaacaggccaggccgtgtcagcggcccaggtctccagctggagggaacgtcaagccccgctttggagggtgggtgggatggtcagatgcacatcctgagcacggacagtgacacaggcaccacaggtgagctcggctctggtgaccctccctggcttccgaaacaagccaaaaagcagctttctgcagaaagaaaccttccttctttccttccttcccgaagtgctgactgtgggctgactgccatttggggcagggagtcttccatctgttctgaggctgtttcctcctcttggccctgccctacaggtcatgaaggagaagggcaagaggtcatctgagcacatccaccagatcgacctggctgtgagccagacactaaggaaccacatgttcttcagggatcgatatggaaccaagtaagcctatgggagccacagggtcccagcggagatggggtgaatgagagggatggggatttccccggagcagaagccagggtcacccaggagggatgacagagctgccaagagctctcctggtccagggagcaggcggcaccatggactgagcacctcccaggttccaagccctgggccagactggaacatggggggccagaacccaagaggatcctgaggagacagacggcagcaaacaaaatcatgcacaatggtgaaaggtgctctccctgacccatggggacccatggtaggaccctcgggagggtggcaggttggagggcccg

SEQ ID NO: 17688 - DNA, 2300 bp, Homo sapien
cgtccccaaagtgtcacagatattgaacccactgatttgaaaactgacgtccacatgaaacctgcaggccaggttcactgcttgattcctcgtcactcacacacggagccttcggggatggccttcaacacgggaatggggagaacaaggctggtcctcccttcaaacggaagacccagtgagaaaagggaacgagccagtgatgcccgcatgaacgtgggtggatcctaggtgcattttgctaagggaaagaagccagacccaataagctaccaaagtaggattcccattcttaggccattgtggaaaaggccaaaccatagggactgagaagcagtctgggtggccaggggctgacggatcggggagaggctgggtgcataggggccaccctggagacttggaggatgaaggagtcgctccaggaggggctggagtggtagccgggagactctgcacattggtttagaaccatggaggacctgtacacccaaagactgaattggcgtgtgtgcaaactgaaaaaaaaaagatcattcagagtgaaaaggatcaggcaagtcactgtacaactgggctatttgcatgtcacagatgtggattttactgaaacatttcttcaacagtcaaagtccctgaagagctcactgcttatctggtgaatcatctgaacctgaaatgggatttgttgttagggtttgtagacaaagtgaaactaacagcatctgcacaacacaaaccaaagccccctttctctgtttcccaggcagcaggaactattctacatcctcctggcatattcgaagtataacccagtgagtattcctggcagtgaggttcccaggccgtatttccatattcacaggagtgggtgtctggtgggagtgtcgttgcttcttttaaagttagtatttgtgacccaccaggatataggaggtaggattccagctcaccgctggcataaacctccagcaagggggtggtctcaaggggtcaagctgagacacagaggagtcagggcctggactcctggtgtcacctgggcctgaccaccacttatcggaacaagcccctcctcctggggctgccccaaagcccgggagcttggcagcatcacacacagaatggtgctatcaggagacattttggacaaggtgctgaagtgcccgatggatatggctcttgtcatgaaatgaatttgcatcctgaggaagtctcttcttcagaggaagccttcccagtcacctctgccctctccgatgacatgagtcctcccaggtgacctcagccctcccaagtgacttacttccacggtgactctggctgttgcaggtggtgggctactgcagggacctgagccacatcgctgccttgttcctcctttatctgcctgaggaggacacattctgggcactggtgcagctgctggccagtgagaggcactcctgcagggtaggtgaacagctgcccctggggcttcacgcagccagacccggggatggccaccctggccaggtgatctcggctttcagccaaggcaccttccttgtgtcgccagcttgttgggagcctttaggacgtctctgctgacggtcccaaaggaacccggaactgaccccccagagcccaagtcagacgcctttcatccccatcagcagaaggcatctcatcctccccgtggctgccctctgtgtcctggagccacgccctccggctctgattctgtgcagctggctctccgcaacctgagagtcctcctgcccttcagttgctcaggctccagctgcccttggtacccacgaaagggtaccaagcccagatggcagcatctccccatcccgtgtcccttggcccagccccacttccaggagacgaccacaaagcccagcacccaccctgttctggccgccccctgtcgtggcctcaaagtcaggcttgccctcccggcaccctggcccaggaggcctccaggggcacctccagccaggctccaggggatgttcccacccctcctccccagggccaaggccacatggtggggtcaccagatgggagggtgggaggcctcggggtctggggggctctgcagctgcccagctcttccagctgatggctccacatcttgggggaaggctctgatttcatgacgggctgggggcttctcaggattccacagcccaaatggcgggacagttcaggggctccaagaccatcaggagcatgtggtacccacatcacaacccaagaccatggggcatctggtgagtttatggtcccctcggctcttccccagaggccct

SEQ ID NO: 17689 - DNA, 2300 bp, Homo sapien
agcatggagactccaggaaactgtcagctgaaggcctgatcacccttcccacctgcaaacccgaccaccacccaccttgctcttcaccctgtggctgatggtatcaccactcacacagtcgtcggaaccagaaacccagggccatcaatgcccactccttcatatgtgttcacccgacacttactgagtcctgactgtgagccacgcttaccctgagatccaggcatccagtcctgctgttttgagctataacctctcttctgcgtgcaccaccttccttcccctgctgccccaccccccctccaccccgcaggacttctctggccagactccctactccagccccctgacgcatctctctggccccaccctgacccctctgatccatttctccctctgcagccagagtgaatgttctaaaatatcttgatgttcattcccctcttcagctccaaatccctccatggctccccattgcctacgtgatctagtccagacgctttaacttggcattcaaggctcctcagtcagactccagcctgcatggtcagtttcacctcctgcaaacccccacaggttcccacattcacacctcctgaacttcgctggtgctcagacaccaacttctccctgggtgaagcgggtccccaggccgccccagcaggtacccgggtgcacactcactgggcgtcctcaacccccagcaagcggcggtaggtgtcaattagttcaacttctatggaaaaagtagggaggtatctcaaagaactaaaagtacaactacctttcgacccagcaatcccactactgggtatctacccaaagggaaagaaatcattatataaaaaggcactgcactcccatgtttatcgcagcataacttacaacagcaaggtcatggaaccaaggtaagtatccaccagcggttcattaaataaagaaaatgtggtacatatacaccacaaagtactaggcagtcataaaaaagaacaaaatcaagtcctttgcagcaacacagatgcagctgaaggtcattatcctaagcgaattaatgcagaaacagccaaatattgcatgttctcatgtattaagtgagaacaatgggtacacatggacatgaagatggagagaatacactctggggactcaaaatttgggggggaaagttgaaaacgtacctactgggtacaacctccaatatttgggtgatgggtatgctagaagctcaacctccccattgtgcatgtgatatacatataacaaacaagcacgtgtaccttctgaatctaaaataaaatagaaaaagaaaaaagccaaagaaaaacatcccggtaatccagggagcagcggctactgcctccactgctcactgcagcccgcaggttccacgccggcagctcctgcctgcggggcagtggagctgcggagaatggtgggatgggtctaggtgccagggccagagcccaggaggggcactgagtaggggcctggccggcctctcccttgcaccggagcaggggtgcctggtgaaacggacaatctgatgctctctgggccctgcccatgttccccttccatccaccctcctttgcatctttctgtgcctggggtccccataggaagcggtcacatccagactcaccaggcctgagatgctggaggatggagaagcgcttgccacgggaaaaatcctccaggaacacatgaacaaaacttcgcctgcacctgggacatccttctctacggctggcctatgaggcaagtgttctgcacacgctccttggctaactccaatgcagaggagcacatgagcccaacctccacggcaggtgcagatctttgcctcccttttataatgtctgtattcaaatgacataccctggaagcctctttctgataggatgagagcagactctgtactacaacacagattggataagtctccaactctgattagttaagattatccagtcagagcaggagactattatccaataagagttgtcgaaaaaagttccttctcacccaatcaaaacaaagcttccaagatacagcggttgagtacagccgttataaaagggaggcgaaggcccattccgccattttctctttgtggaggctgggttcgcgtgctcttctgagctgtggtcgtcatggaccggaagcgtgtgcggcgcgcctgccttgaggccagcatcagggaagggtgtcccaggtgcaggcgaagcttccttcaggtgctcctggaggacttttggctcgcaagcgcttctccattctcccaacgtctcgggcctggt

SEQ ID NO: 17690 - DNA, 2300 bp, Homo sapien
ctaataattaaattttagcccaaaatcctgagtatatatattgtacttttgtctatatggtaacattatattcacctatagaggttgccatctacccctctcagcaaaacatgctgaaacttgtttataaatcatgtatttgttagtgaagtcaaagttttaatagaagctaatagagccctctatttaactttcaattataaaagtctttactttttcttttatgtggccatgtatgttatattacatgaggtttcattaaagtgagagcatgtacttctctgtgtataagaaaaggtaatacttctgattaatttctggcccaggaatatttggacagaatgtttgtgacatgtacacttaaataatacaatatatttcataattttgagtaattcagagttaggctgtcttctagaaggtccataattagcaatttcttattatggtttaatgtagagcttcccaaccttttcatatcatggtacacataaaaaatattatggcacactggactaaacaggtgaagttgcttaagccagtggtgcattgctctgaggactgaggtaatcgatatatgtatttcagcatacctgtaaaccaggcttattagttggacaactggtttaatgtgactttaaaaaaaatgtttggtttgggtaattcagctacttaattactggattctggctctggaattacatgccagtagatatataccaagataggtcgggtaggtgtatttgaaaattggtacatgcatactgaacaatattttagttcatgtcttttcatttgcaagcaacagagaccaagttcaaatcggcttaatttttaaaaagggaatgtactgatttgcataatgaaaagcccgggggtgggcattttttaggcacagctagatcccggggctcaagtttaccttccatattccttatttgaaagctttagtccttacttcagtggtttaggcttttctctatactaggtgaatttttctgatattgctaatttatttaattagcaatactttagactaaaactttgacctcttaatgtcattgaaatagagctaggattctactgacatcattatgttattatattatctttttgcatgagttgatgccatgttactaattggctgtgatagagcctttacgtacttgcaggtatatccacagacaagtacagtaatgcttctccctgcactgcttgtctgcaggaggtgaagtgaaatctgcaagagtcctgctcgttcaaggcctgcatacaggaaagaagcaggggaaaagcgttagaaacagcttttgttctacagcattttaaaatataataggtaggtcaaatttttggtctgtcagccttgacactatcccttgaaagtaggtcatgtcattgaaatgtatttaaaatgtgactgtgataaaagttgtttttttgttttgttttgttttgttttttgagacggagtctcgctctgtctcccagtctagagtgcagtggcgcgatctcggctcactgcaagctccgcctcccgggttcacgccattctcctgcctcagcctcctgagtagctaggactacaggcgcccgccaccacgcccggctaattttttttttattttttatttttagtagagacgggatttcaccgtgttagccaggatggcttgatctcctgacctcgtgatacgcccgcctcagcctcccaaagtgctgggattacaggcgtgagccactgtgcccggccatgataaaagtttttaagattctttttcttggaaagaagttatttaataaactcccttagtgttattagacactagctaccaaaatagcctttttactaactagaattatagcccagcttgagagtggcagatgtgataaaaatatactaaaattgtttttaaaaattttactttcaagattttttaaaactttatattcaatcctgtggattaactcatgtattttgcataatctagccaggctctgaagcatatttgtaactttagggtataaaaagaacaaaagaaaaattttacgcccactgccttataactaccaacatacttatgcagccattttcatttttaggtatattgaaaagtctgattcagttacaatcagtgtatggaatcacaagaagatccataagaaacaaggtgctggatttctccgttgtgttcgtctttttccagtgccatcaaccacctcaaagacactggttgtgagtagatactactgcttttcaaattatatatatatatgtgtgtgtgtgtgtgtgtgtgtgt

SEQ ID NO: 17691 - DNA, 2300 bp, Homo sapien
aagagaaaggaatgggaaggctagggaataacattaacatccacacactgtgtactgtgctctctgcttggtgctttgcccccagtgataatttcttcatatagtgcaatgtagtttgtaagctggttttatatccatgaggtctcaagtactctctgccttttaggacagatgtagatccggttttgtttttgtttttgtttttacagttttataagagtagaagtgatgctgttttatttgaagcctgagagcttctggttccataaccagaaattgctacctggctcttctattggaatggagggcttttccattcttagtccatccaactctgaacttgctctgaatctcaaacctttctattcgcagaacaaatgctcaaatgctttcaagagtttttctgtagattaggtttattagcaccaacttcatgacttctaaaatgtgactgcttgaatacaggtatctaccagtgatatggggtggataattaataatgcttggctacctctataaagacagtgttgcttatttttcagaactttttttttttcttttcttgttttttttttttaccaattatattcttcccttctccccaagaggcgggcagaaaagcattgttaatctccttttacaggtgaggaaaaacaagatcagaggtgctaagtgctgtagcctagtgccaggtcttctgtccccaattctgggttctccccaagcccatgtttctcctttctcgcaatctttactacttccgctgaccttcagcaccacccaaaatacttttaattctggaaaagaagcccagctgcacactggcacacttgaccttcatgcagtcagaagctttggatggttccccatccaaaatattagagatgaatgaaagtgaagtaggcatctgacaaaagtcactttttcccttctgcatttaggacctcaagtaatgtttatccagaaactgctaccataccatagattcattgtatatttaacaacataggcatacaatctggcaaattaaaaatctcctaacctacaccctggatccctgcccaaatttaagaaaagaactaaggtggacacagtgtttttttccatgtcgcatcttctgtgatggggctatgatatgtgggagcagagaatggggtgggtgggtggagcacatgccagatgaggatctatcagcaatgggagggggcatccctccctgctcctttagcatctccaccctgctcctctcagaggaccgcctttcattgcattcagctgcgatggtagcaagaacacgggcacactgaggatgaggagagtgggagccttgtgctctctctgcatatgaggcaggacagcacagggtatggagcagtctgcagagaggccagttcatcagctcatcagggaagcacttgtcttccaccttgggctttgactgagcactgggcaattggcccctggggatcaacggaataatcctaagcagagttactctatgtcacactatggaatgttccaagtaggtggccatgttttcaaaagatgtcttttcctcctttcgttgttgccgtttcataggtttaggtttgggtgtatgtttctcctctctgaatggcactcgaatgtttgctgactcttactctgtgtgactggggcatacagctatggactgagtatgaaagatgatcaaagatatttcatgatcaaagcagtctcttcttttctgacagctgaagaagcatctgtagggaatccagaaggagcattcatgaagatgttacaagcccggaagcagcacatgagcactgagctgactattgagtcggaggcgccctcagacagcagtggcatcaacttgtcaggctttgggagtgagcagctagacaccaatgacgagagtgatgttagcagcgcactaagttacatcttgccttatctctcactgagaaatctaggtgcagaatcaatattgttaccgttcactgaacagctattttcaaatgtacaagatggagataggctcctgagtattttgaaaaacaatagaaagagcccctcacagtccagccttctaggtaacaaatttaaaaacaaaatatttgaaaaaaaaattagaaactgcgcaaccacaggaaaaccgcctggcaaagattcaaagtgtaggcaaaaacctgcagagagtgaacagagtcctcatgggcccaaggagcatccaggaaaggcacttcaaaaaggtgggaaagcacagcactaggaaagaacaggatgcccaggcatttgtggacaatgctgccaaa

SEQ ID NO: 17692 - DNA, 2300 bp, Homo sapien
ctgctcagggctggagggtggggtggggacaaaggcctggagcaagagaacaaggaggtgacaagcttttcctgagcgtcaagttctgttcccttttcggtactgctaggtttatagaaagctggctgcctggagtgccctccatctcaaagccttcatgggtcttacttgctactgtcagtatctcaaactgggaaattgaggcgtagagagatgggatgccctcctccatacccagtgggtctgcagtcaaccacagatggatgggatctgttttgcactcaccaactcctactttatacccctttggtcccccagatccaggtgtccagcctggccacccagattcaaggctggacagctctgcagccatgaaatcctgggcatgaaggaggaacgaaagtgacccatccctccattttgaagttctctggggccagatttgcctaggttctggctttcaagaatcccttcccagtcatgaaaagacagctgtccatagaaggcggtggagggtgacaggctgccacagctgtggtgcgtggtcacctgggcagcctggaagtctggtgtccctgcccttcctccagtttagccacagcgacgtgcttctaggaagggattcttagaggccaagttaattcccgtgcagcctatcaattcaggctttcttagatactcatttttcccatccagatatgcctcaagttttgtggatttaccactcctactcaggaacccttttccctttcctcattcattctgcaaagcgcctggttagcaatgcactctcttccctggacatgtagggaatgggggtttcccccatccccatcctcagcccgtccccctcctctaaaactcagatcagggtttgtctgccctgctgctaagatgcagcccaactttgaactttgagctgtctgctttaacatttgggcctcacttgaatggattcccttccctgaggattccaagccctccccagccatcagtcttcccatctttcataaaatggagccagcagccccgcttcagggactcccccctccccctgttccctctacgccaggattcttcccccgacttccatttccctccagcccccaccctgcacaaagttgcctgttctgccgaagtgcctatttttggcttggggcccagttttatagccccagctataggtcttggcagtcacaactttcgctctccagacagccaagccgggtccaacagccttccccaccccagagagggggtgcgggggctccctctgcagcctcaacccgaaacctgcccctcgccttacttggtctgatgcctgggaacccaagcctgcttcttgccctacttcttagagtccaccagctgcaatggagttgttaggtgttgaaaatccatgccgggtttttactctttcagagaacataaaattcaatttttctcctcgcaccccctccccaaaagcaagactttgaggcgtttatagatacaaaccttcccctaacgcttccctccgcccctgctacccggtcagctccaagcccctgtcccggtggcccaggatcttctgctaagggtctcattccgtcccgcgctccagtcctggcttggcgtgcctccctcgccttttattgtaggtctggtctcccagggtagcggcctcatcgcattcccttcgcagcgcccctggatccagaaaccgcttttacctgtccgctccggtgcagccagcacgccgaatcccgtcgtacccgagtccagccctccttttgcccctcccccttgcacgtcgctgccaggaagatgagggcagcccaagtcgcctcagccactaagcatcccccttccagaactccccccatgcgaacccaggtcccgggagttccgggctgggtcttgcttgttttcactgcgttaggcctgacgcattactccgtctcccaagaaagaatccggcccgaaatttgcgtgccccgggtgcgtttggccatgtcgcatctaccccccaaccccccgctccaacaccgtttctcccatctttatctaatccaactcgggttttgcacaacccttccagatctccccatttgcgccctccttccccgggctcggcgcctttccttttacttcactggaaaatccgctccgggtcttccttacgcctgtctcccttccccgactccccgctccaacgcgggggtccagcacgtcgctttccctctctctgcttttccagggaggaggcgagaggaggcgaaaggaaggaaactccagcacgggttttcgggccggctcct

SEQ ID NO: 17693 - DNA, 2300 bp, Homo sapien
aggttgcatagacactcaaatacagtgtgggcccgggggtgggggctcttctggccccccaggatacccccacagctcatcaagcccaacctggggagccagccctccctgggttcaagcccccttaccagttgggtgtccctgggtatatctcttcaatgacaggacctcactttcctcctctgtaagctgtgggtacaagcatctctccttcctaaatggttattaggattacatgagctacacatggaagctgttcgggctgggacttggaggtgtccgccactgtcccaggcatctcaggtgattccttgctggagagcccagctagatgccctccctgtcgtttgctgtttcctgtaaatggtttctttaaagttctgcggctcaggcccttgcccccatctctgcctccctcctcactctctgtgtgtcctgactccctatatgaatttcctaggctcccacaacaaattaccacagacgggacagctttagcaacagagactttattggtttttttgtttatgtttcagagatggggtcttgctctattgcccaggctgaagtgtagtggtgcgatcacaggtcactgcagcctcaacctcccgggctcaagtgatcctcccacttcagcctcctgagcagctgggactacaggtgcatcccgtcatgcccagctacttttttatatttgtttatagagctggggtctcactgtgttgcccaggctcgtctcaaactcttgggctcaagcaattctcccgccttggcctcccaaagtgctgggattacaggcgtgagccactgcagccaacaacagaattgtgtcgcctcccagctctggaggttggaagtccaagatcaaggtgtcgtcagggttggttccttctgggagccttcagggagaatccattgcaggcctgtctcctggcttcttttggtcattaactggcaatcttccctggcttctagaagcatcactctgatctctgccttcatggtcacatggtcttctgtgcatgtctgtgtccaggtttctcctttgtataagggcatcagttgttggattaggacccacactaatgacctcattttaacttgattatctctgtaaggactccagatgttcccaacacagtcacatttgagttatcaggagttgggacttcaacatatcttttgtatttttgacatggggtcccactctcttgcccaggctagagtgcggtggtgcaatcagagctcactgcagcctcaacctcctgggttcaagcaaccctcccacctcagccttcccagtagctggcacgtgccaccgtgctcggttaatttttgtgttttttgtagagatggggtctcactatgttgctcatgctggtctcaaactccaaggctcaagtggtcctcccaccttggcctcccaaagtactggggttgtaggtgtgagccactgtgcactgtgcccagcctgacattttttttttctttggcggtgggggtcgggggctgtaattcaatccgtaacacctccccctccagaggcctcagggatggtcaggcctgggtctcccaggggacacccaccacctgccaagctgaggctgggccctgggggtgtctggagcttcctaggggagccacgctggggagagggcgtcgtgctcctggggaactctgtctgtacccctaaggcaatggcaccctgcctgtgggggtcaggcgtggcccgccaggtcacagggcagatgccccatctccagctatcctcactgccatccttagtcactcccctgtgactaagtaagtttttgcttggggacccactgtgtgttcaggggaccaggagacaggagtcagggaaaccaagttccagcctcaggagtttccattctcctgggagtagaaagaaaatctagaaggctgggtgcggtggctcatgcctgtaatctcagcactttgggaggctgaggcgggtggatcacctgaggttgggagttcgagagcagcctgaccaatatggcaaaaccctttctctactaaaaatacaaaaattagccaggtgtggtggcctgtgactgtaatctcagctactcaggaggctgaggcaggagaatcactcgaggttcttgaatcacttgaggcagaggttgcggtgagccaagatcacgccaatgcattccagcctgggcgacagagcaagactccgtctcaaaacaaaacaaagaaaaggccgggagcagtggctcacgcctgtaatcccaacactttgggagatcaaggcaggcagatcacctgag

SEQ ID NO: 17694 - DNA, 2300 bp, Homo sapien
ggggccagggtaggtcactctgctgcggtgaccttgcggctgagccctgaacaatgagcagccgcagccaacatgcagggatcctgcttgggggctggaactggaatgttgaatgtttcaggaacaggagggaggacagaatggggcttggagagcttggtggcaccagttcacccacagcctctgggctctagtgaggaaatgagaccccagcagagaccagggggtcagttaatgttcggatcaacatcattatgtggtcccttagctctgagtgaagggcggattgggaggcgggcaaggaggccaggacaacatacaggtgacataggatggcggcatgggcctgggtgctgtgcttagagccagaagtgggcaggtcgcgagatacttgagaggcagagcccacaggacttgctgatggcttctgtgagggggatgacagggaaggtgaggaatcaaggcagagtctcagctttgggatctgagattcattcaacaaataattcagtgccgcgtgccaggcctattctaaaagttgaggatatgaagacaacaatggtgatggcctcaagcagtaatcccagcactttgggatgttgaggcaggaggatctcttgaggccagaagttcatgttcagcctgggcaacatagcaagacctcatctttgcaaaataaaataaattagctggacgtgatggcgcatacctgtggtctcagctactagggaggccgaggcgggaggatcgcttgagcctgggaggtggaggctgcagtgagccatgatttcaccactgcactccagcctgagtgacagagcaagaccctatctctaaaaaaaaaaagtaaaatttggggatgcggccaccatgagcaaaacagttcaatgatccctgccccatgaagaggacattctatacaccaggtgaatagttccatctgagcaatggcctgaaggagccggccatgtggacagtgggttggcagaagctacaggtggaggaagcgacaggtgcaaaggccctggggcaaggcctgctgtggtccaggaatagcaggagtggctggagcagacatggggtcagggagctaactgggccaattacaagggttttggttttcagcagggaaatggtaatgggggctctgatgagaaattccaggctggacataagagatttgaaagtgctggctcaatgatggtactgagagcccaggacagcctgagatgggacaggctgggatgacagctggatgtgacagagcaggggttcccatgctggagggcccgcctcagagaatgtgtgtttctggccagcacagtggctcacgcctgtaatcccagcactttgggaagccgaggcaggcggatcacgaggtcaggagatcgagaccagcctggccaacatggtgaaaccctgtctctaataaaaacacaaaaaaattagccaggcgtggtggcgagcgcctgtaatcccagctactctggaggctgaggcaggagaatcgcttgaacccgggaggcgcaggttgtagggagacgaaatcgcgccactggcactccagcctgggcgacagagggaggctccgtctcaaaaaaaaaaaaaaaaaaaaaaaaaagcaaggctcgcaaaacaccggattccttctcagctttctgagctgaaaaggtatagatcctcaagaagagaagagtgtatgtaagtacttctcaaccagtttacctctctgaccgctcttacggtgtttgggggcaaaaaactaaggatctagactctctaaaccgctcgctgggtccttctctccccacaatgcaccggggccagcaggaaggccgctccgacccctaattttcccgcgaattcagttcaaagaggcggccgggcccgcgatcggcagcgcgcaccggccaaccaagccgcgcctccgcgagaagcgcctccgcgtgactgacgggggaatccgcgggccaacgggctgggcggcccggcggtgcgcgctcccgccggccaatcagagcgccgggcgggggaagtgggcggagcgaggcctgggtagggtgagcggcctccgaagcggagcggggctctgaggagacactttttcttcctccctccttccctcctctcctcctgccttcccttcccctttcctcccctctctcctccttctcccctcggtcagccggagcctgctggggcgagcggttggtattgcaggcgcttactctccggggccgcccggcgagtagctggccggggaaggaggcaggaaccgcgatggcgcctcagaagcacgg

SEQ ID NO: 17695 - DNA, 2300 bp, Homo sapien
gggttcggcggcgacggcttcgagcggcaaatccggcggcgggggctgtggaggcggtggcagttactcggcctcctcctcctccgcggcgttaccggtgaagaagtcgaaaatggagcacgtccaggctgaccacgagcttttcctccaggcctttgagagtgagtgcgtgcgaggctttgagggcaggaagacccactctgccaacaccggggatgggacactctgctgggcccccttcctcctcgggagtccacttgtgtggtagtggagggaggaattgaggggatgtccccctttcggagattacgtctccaggggatccggagtccagggccttgggagagctggaaaagagggtccgggcgggttcttgactcccccaagattgacgcaagaggctcgggactggggccccacgttcagagcaggcggcttttagatgaggaggtagcagttgaactgagccgcagtcacatcccgagactggttcttgttttctttcatgcctttcggactctagaaatacaggggtttcggttgtagcttttgaggggcaaaatgaagcctgtgaagggatgagtgcagtggaaccgaagaaagtgtccttagtctgaaatgccttcgcgctaacttggtgctgcaggttcctatggcacctttggatgcttaaaacccttcaaatctatccacccattttgtggatatgtaaactgagccagagagtggtcaagcatcttctctggagacgaccccagaattctgctttttctactcggcttacaggacattttcttgggtcaatttctgtttctaaggtctgtctggtaggtgaaactgacttatttggaaaggagagcaaggtgtctggaaataaacaatagaatttattaaaaacatcgtgactatgaataatcctgattgttctttaaggaatgttatatcctgattggtttccttttttgcttttgtgtgttataatttgggtgatctttaatagctaagtaatcttacagaaacttgaataaacttggctctaccgcccagtgtccttatttacagtttcactgtggcatatattaagggcatggtatcagctgtgcttagaaagaccgtattatgttgtttaatacccttccttcattctctctcattagtgcttcatgaaattctaattggaacttaatagaaggagtttcagtttttatcgaaacgaatattgaccttgcttcagagagattcacattattcacatatttcttaatatactttgaaatatctagagaggctttaattggaaataggatggagaactgaagggcagtggtgacaataatgatacttgtttgtaccccttctaaagtatctcatctccctttagttaatttaagataaaactaaccaattgaagatttaggtggaaattttaaaagttctttctgaatgttaagagaagacacattctccaagaaagttttaactatttgcgttctgatgagtcgacctcagggaagtcaagtgtcattaagagctagatctggtcataaaacaacttgaagttgtttactggaaagtttaaatacttgaatgtaattattcacagttatttctatttggtttattctgatactgctgtataatgacaacgtgatactaataggtcattaatgtaactaatataatagtatatgtatttttcatccacttaagtcctgtataacaaattacattttaactaatttgaaatttaattcaactcattttaagcgttagacggttttgtgaatctgtcaattgtgtaaaaaatgtattgaggtaatatttatattgaacaaaatagataaaactttaaattataattaggaatatttattgagaattttttctgcagtttgtgtccgagatttatttcaacattgactgacttttgagtgcagtggatcccacctgtaatcctagctactctggaggctgaggcaggaggatctgttgagcccacgagtttgagaccagcctgggcaacatatcaagaccccttttcaaaaaaagaaaaaaaaaatcttgactgactttcatcatacctgtattaggaatgtctggatctgtattaggatgtcatcatatctgtattaggatgtattaggattctgttttggctgactacaattttttttttttttttgagacggagttttgctctttgttgcccaggctgcagtgcaatgacgcgatctcggctcacggcaacctccgcctcccaggttcaagtgattctcctgcctcagcctcccaggtagctg

SEQ ID NO: 17696 - DNA, 2300 bp, Homo sapien
ttctgatctgaatccaactctctggttataacttgattttccagctattgtgatttttttcaacaattatattcctgttgtaaataaataaattggcaagctgcttagtttgtttcttgtgagtcttattagcaagagtctgttccctggaatcctctgggtacacttgaaaagtcagttctggaccaatgtgatgccatggagatatctctgtaaaactctgtctgatggctagctgacatctacttctaaaccagtttcctcgagaacatttactctttaggaattcatgctctaaatttaaaaacaatgcatctaaaaatgtcaagtctaggggtaagcagttttagaatatttccttcaattttcttatttgttttgtttttgggtatagtgtagatatgttagatacacacttcttgccttccatcagactaagaaaacaaagttgaatgagaccaagattcatgtcctggttttatggaagttttccttgtaattttacttatttatttatttatttttatttttatagacatagggtcttgctatgttacccaggttggtctctaactcctaggctcaaggaatcctcccacctcagcctcctgaattgctgggaccacaggagggcgccaccacccgcggctaattttttttttaaatctttttgtagagaggaggtctcctcatgttgcaaaggctggtctcaaactcctgggctcaagcaatcctcctgccttagcttcccaagattactggtgtgagccaccatgccctgcccataaggttttattacatacagtcacacctattgtgacagataccttccggtctggcaagcccaagcccagcttattcactacggtccttacagataacacttgccaacacccttcttggacttgtgccagaattgctgtcctgctggtcatctcttgggcctctctcttggatcccccattcgtccacgagcttctgggtggtgacacctgggttttgttgttgttttttgagaccgagtctcgctttgttgcccaggttggagtgcagtggcacaatcttggctcactgcaacctctgcctcccggttcaagcaattatcctgcctcagccctcgagtagctgggattacaggcgcccaccaccacacccggctaatttttgtatttttagtagagatgaggtttcaccaggttggccatggctgctcttgaacttctgacctcagtgatccacccgtctcggcctcccaaagtgctgggattacaggcgtgagccactgctccccgctgacacctgggtcttagtaaattcccctaaggcctgctctgctcttaaggaccagggcttttgtcatcagatctgggctcaaattctgcggcttggaaaagtcgattcgctattttttaaaatttttaatttaaaaaaaagtattttttatttagagacagggtctcgctctgtcgcccaggctggagtgcagtggctccattacagctcactgcagcctcggcccccgggctcaagcgatccactgggaccacaggcgtgctccactacgtgttgctagtagtagcagtagtagtagtagtaatagtaatagtagtagtatttttggtgagagagggtttcgccgtgttgcccaggctgggtctcgaactccagagctcaagggatccgcccgcctcggcctcccaaagtgctgggactgcaggcgtgagccaccgcgcccggccgattcccccctttatccctcaatttcctcatctgagcaatggagatacaggtagggctgaaggtcaggcaagaatgcgatgagctgtgagaagcacttggcaaggtgcgggttatcaaccttgccaggcctcagcacgtttcccaaggaggcccaaccagcggcgctgtgccgcagcacggaagaggcggggtgagccgcggggcgggcggcgctgggacccggacgccacccgcgcgaggcgccgccgtgcgcccgtcaatcaaggtcgtcgtggggcatggggcggcggggctgggcggtgcttccgcctgcgcgaggccgcgccgggccgcttggaggcgcccggtgcagtcgggaacccgcgctaggtttcgccggccgcgcggccagatgaggggggcgatggagctggagcctgagctgctgttgcaggaggcccgcgagaacgtggaggcagcgcagagctaccggcgggagctgggtcaccggcttgaggggctgcgtgaggcgcggaggcaggtcggagggccacacccacaggggcgctgtgggcccgggg

SEQ ID NO: 17697 - DNA, 2300 bp, Homo sapien
actctgggaggcccaggcgggcagatcacgaggtcaggagttcaagaccagcctgaccaacatggtgacccatctctactaaaaatacaaaaaaaaaaaaaaaaaaaaaaaaaaagccaggcatggtggcacgagcctgtaatcccagctactcaggaggttgaggtaggagaatcgcttgaacctgagaggtggagattacagtgagccaagatcgcgccattgcattccagcctgggcgacagagccagactccgtctcaaaaaaaaaaaaataaataaataaataaaaagttgagtgaaaaaaagcaaattggctgggcacagtggctcactcctgtaatctcagcactttgggaggccaaggcaggtggatcacctgaggccaggagttccagactagcctggccaagatgttgaaaccctgtctcttaaaaatacaattagctgggcatggtggtacgcacctgtagttccagctacttaggaggctgaggcaggagaatcgcttgaaccggggaggtggaggttgcagtgagcagagattgcgccactgcactctagcctgggtgacagagccagactccacctcaaaaaaaaaaaaaaaaaaaaaaaaagcgcggtgccggacgcagtggctcaagcctgtaatcccagcactttggggagccgagttgagcagatcacctgaggtcaggagttcgagaccagcctggccaacatggcgaaaccccgtctctactacaatacaaaaattagccccgcatggtggcacgcgcctgtagtcccagctactcgcgaggctgaggcaggagaatcgtttgaacccgggaggcggagattgcagtgattcgagatcgtgccactacacttcagcctggtgcaacagagggagactccgtctcaagcaaacaaacaaacaaacaacaacaacaaaaacgatgcactcaaacaaatgtaacatgctgtatttaatgtaattgcaactttaacgtaaaaaaaaaagagctattttaccaaggacccaccaacatggggcgcgttcgcaccaaaaccgtgaagtaaagaaggcggcccgggtcatcatagaaaagtactacatgcgcctgggcaaagacttccacacgaacaagcgcgtgtgcgaggaaatcgccattattcccagcaagaagccccgcaacaagatagcaggctatgtcacgcatctgataaagcggattcagagggggccagtaagagagaggtatctccatgaagctgcaggaggaggagagagaaaggagagacaattgtgttcccgaggtctaagctctggatcaggagatcattgaagtagaatcctgacactaaggaaatgcagaaacttttggacttcggcagtctgtccaacctgtaggtcactcagcctacagttgagatgaatttcaaaacgcctcggggagctgtttgagtctttctgtaatgctgtaatattttcgataaacctgggacagtgaaaaaaaagaaaagagaaaaagtaaaggctaaccaaacccatgaaaacaatgcaaatgatgcatgagatcagaaaccagcaaactactggtaggtaccctgcgaggactgaacgcaggccaaccagatgaagcaatgactcggctgttcgagaggatggaatccacagaaagaaatgccttcttagtcgaataggtacttcgacttttataggtataaaagtcgaatttcggatcctgagaggacgtatattgaggtggaaagctcgcccaaatattagcattttattgtgcatggtaacaatgtaaatcaattatttcctttttctgcatttttcaaatttcgcctttaaagaggggctagcctagggcgttaaaagtctaaattttaattctgtcaacaactgactaggtgacttagtgaaatcacgtcctcaacggtgaaactgataggacagaaattcaaatttccaaactcccgggttggctttcaattccacggtgcaatggttccgcctcccgcgggttcgccgagggagtcattttggccctctcggctcaccgtccgcgcagcctcctgaagcagccgtaaactccgccccttgcgcgcaggacggcgcgaaaacccaattgacaagaattccctccgaagctctgtggtccgatctgcggtccgcttgctttccctgcccggtcccgagcgctcagcctgaagcgccgctttcgagggcaccctgcatacactggccgcgcctcagggatctcattgcccgcgctttctcattgcctctttccgtgttcgattcgg

SEQ ID NO: 17698 - DNA, 2300 bp, Homo sapien
atgtatgtatgttcatttaactgcgaccagttgtttttttcagaatctggtgacttgtctacttagtttttgtttttgtttttttttgtctacttagttgttatgctgatattcctttgctaaatcaaggcagttagttactcagcttgtcttctggtacttgatgtacacagttcttgatttctatgtggtctgttttatcaatctttccgttacagtttctggttttggtgccctaatgctaagaaaccctatttcataataatgatacttaccatttaatatgttaggggtaagaaccttaaacacattattttgcttaatagcaaccctatgatctattgtctgtattctacaaatgaaagaaggtaaaaagtagctaaaagtaagttaaattttttgaaaaattaaatggaaaagttaaaagtaatttgcttaacgttttacaccagtaaatgtcagagccagcatttaacttagatttgcctgactccagagcctatgtatgttgcctttgatacaattgcagctttataaataataactgaatggcgtttttctaatacatgtatggtttctttttgttttttgagacaaggtcttgctctgtcacccaggctggagtgcagtggcacaatcttggctcactgcaacctccgcctcccaggttcaagtgattctcctgcctcagcctccggagtagctgggattacaggcgtgcaccactatgctcagctaattttttgtatttttagtagagacagggtttcaccacgttggccaggctggtctcgaattcctgacctcaagtgatccacccgccttggcctcctgaagtactgggattacaggcgtgagccaccgcacctggcctggtttaactttaaagcctattttctttctaatatatcacgtttttcacctaaaggaggcttcctttttttaatcctattatgtaaactattagatccatgtttaaaatttatattttgtattatattgcttgaaataagtgcctttttctcttttaaattgccagccatgcaaaaagcgaaagaaagatgatgacacatctacctgcaaaacaattacaaaatatttatcaccactagggaagactagagacagggtttttgctccaccaaaacctagtaatattctggattattttagaaagacttcacccacaaatgagaagacacaattagggaaagagtgcaagataaagtcacctgaatcagtacctgttgacagcaacaaagactgtacgacacctttggaaatgttctcaaatgtagagtttaagaagaaaagaaagagggttaatttatctcatcaactaaataatattaaaactgaaaatgaagctccaattgaaattagtagcgacgatagcaaagaagactatagtttaaataatgattttgtggaaagtagtacttctgttttacgttacaagaaacaagtagaggtacttgcagaaaacattcaagatacaaaaagtcaaccaaatactatgacctccctgcaaaattctaaaaaagtaaatcctaaacaagggaccacaaaaaatgacttcaaaaagttgagaaaaaggaaatgcagagatgtagtagatctatctgaaagcttacccttggcagaggaactaaatttgcttaaaaaagatggtaaagatactaaacagatggagaatactacaagccatgcaaactctagagataacgtaactgaagcagcccagttaaatgatagtataataactgtctcatatgaggaatttttaaaaagtcacaaggaaaataaagtggaagagataccagactctacaatgtcaatttgtgttccttctgaaactgtcgacgaaatagtcaaaagtggttatataagtgaatcagaaaactccgaaatttcccagcaggtacgctttaagacagttactgttcttgcacaggttcaccctattccgcccaaaaagacagggaaaataccccgaattttcttgaaacaaaagcaatttgaaatggaaaatagtttatctgatcctgagaatgaacagacagttcagaaaagaaaatctaatgttgttatacaggaggaagaattagaattggctgttttggaagctggaagttctgaagctgtgaaaccaaaatgcactctagaagaaagacagcaatttatgaaagcatttaggcagccagcatcagatgcacttaaaaatggagttaaaaagtcttctgataagcagaaagaccttaatgaaaaatgtctatatgaagtaggaagagatgataatt

SEQ ID NO: 17699 - DNA, 2300 bp, Homo sapien
ggcgccacaggctgggccccaacaggagctcctcaatctaagtgtctaggagaaacccagggagtctccacgaaggaggcactttacccactacagactaaaactggcctcggaatcgccttcctggagattcggcccagcggctctcaggagtcggtaggggcaagaacgtttccccggtgcagtggaagaagactgcgggccagccagggactcgggatccggggacagggcctcggcaggcgcccgcctggaagcccgcagcccagacgcggacgacccactgctcagcgggacacacctcgggccttgccccggaacgccgcttggacaacaacctttccgccgagtgcaggccgagcgcttttgggcgcagcacgcaggaaccggaagtcaatggaggaagactggacctactgattcaacttggagatgagcgggtctgtcctcttcacggcgggaggtagggtgcttggaacactggggtgatttcccgtctgtcattagcctctgaccctagaggctaatggaatacggcgggaggtagggtgcttggaacactggggtgatttcccgtctgtcattagcctctgaccctagaggctaatggaatacggctggaggtattctggaggaacctggagtgtttccttcctcatgtccctcatgtcctagagtgtttccttcctcatgtcccttgttcaggcccctctcttggggccccagcctagctgacggggcagttttcggaacatttgtgcttccccggcctcagggtccacgggtggctcctcagagtgggcggatggttcacattctcacagccgcttgcttacctctggccacattactttcctgtggctgcgatgttagagtgacttcccactggttttacaaagttatgcattgtatggtgtttctcatacttgcaaaaacgtcatgtagaagtcttgaaaagtgtacggaagaaagtaaaactgcccttaaatctatcacttagctgaaacatttcttataaacgtacaaaatttaattttatttagttccaccagatgagatactaaaatgtgaaaatggaagtgaagacaaaacccttttttttttttttttgagacggagtttcgctcttgttgccgagactggagtgcaatggtgcgatctcggctcaccgcaacctccgccttccgggctcaagcgattctcctgcctcagcctcccgagtagctgggattacaggcatgtgccaccacgcccggctaattttgtattattagtagagacagggtttctccatgttggtcaggctggtctcgaactcccgacctcaggtgatccgcccacctcggcctcccaaagtgctgggattataagcgtgagtcaccgcgcccggcctaagacaaaccttaacaggaaatattagttacaaaaagattcctctaaattaaaaatatcagaaactttaagcagttggaataattatttcaactacttgcttcctgatgggtataaaatacaattttctaggtagtaaaacttcggactgatccataaatatcgggagacatctctcgtgacttgaaaacaacaaaagctctatttaaaactctatataatatagtttaaaaactaatcctcttttaaagatgattctcgggccgggcacagtggctcacgcctgtaatcccagcactttgggaggctgaggtgggcggatcacgaggtcaggagatggagaccatcctggctaacactgtgaaaccccgtctctactaaatatacaaaaaattagccgggcgtggtggcaggcgcctgtagtcccagccacctgggaggctgaggcaggagaatggcgtgaacctgggaggcggagcttgcagtgagccgagatcggccactgcactccagcctgggcaacagagcaagactccgtctcaaaaaaaaaaaaaaaagatgattctccaagacaatttaatattgtcctctattagttcttaaattccaggaaagtatttgtgactttgcaaaggatctagtcaagcttgcaactaaccccaaaggaagtaggacatccaacttatattttgctaaattttccttttagagaggtggagatgctttctgaccccgtcgaggtcatccctgtactgggccttacataatttctgctgtcggaaaaaatccactacacctaagaaaattactcccaatgttactttttgtgatgaaaatgcaaaggagcccgaaaatgcacttgacaagctcttctcttcagaacagcaggcttccatcttgcatgtgtt

SEQ ID NO: 17700 - DNA, 2300 bp, Homo sapien
cccgggttcacgccattctcctacctcagcctcctgagtagctgggactacaggcgcccgccaccacgcccggctaattttttgtattttttagtagagacggggtttcaccgtgttatccaggatggtctcgatctcctgacctcgtaatcccccctcctcggcctcccaaagcgctgggattacaggcgtgagccaccgtgccggccttcctgtcctcattttaattagttacatctacaatgaccttatttggaaataataaggtactgggggttaggacttcaacaaatctgttttgagggatgcaattcaatcataacatctcagtaaactgaataagccctacagttgaggaaattatttcctcctgatttggaggattttgcagaaaaaagttgatgttatttcttgttagattcctaagttccccagaaactgccaaggtttctagacttcctatgagcaattttttttctttttttgagacaaggtctggctctgtcccccacgctggagtgtggtgacacgatctccactcactgcaacctctacctcccgggctcaggtgattctcccacctcagcctcctgagtagctgggataacaggcgtgctccaccacacccggctaattttttcgtagagacggggtttcgccatgttgcccagggtggtctggaactcaagagctcaagcgatccgcccgtctcggcctcccaaagtgctggaattacactttgggagccactgctcccgaccagcacattttattaatacttatgattcccctacatccccactgccttccagacacaaacaatcaacccattgctgcctcataaaaacgcaaactcatcacctttccctccctcctgaattccccgtttttcacaaaactggctccccatcttccagaaataattcttttctttccactctccttacatctcctaggttcaattccttacggttggccaggcgcagtggcccacgcctgtaatcccagcactttgggaggccgagtcgggcggatcacctgaggtcaggagttcgagaccagcctggccaacatggtgacacctgtctctactaaaaatacaaaaattagccgggcgtagtggcgctcgcctgtaatctcagctactcgggaggctgaggcacgagaatcacttgaaatcgggaggcggagtttgcagtgagtccagatcgcaccactgcactccaacctgggcgacagagcaagactgttaaaaaaaaaattccttacgcttgcctctcacctgggaagatacactctcttcgcgacttctcattgctcccaggctcttcacctgcaatccagcctcacattcgctatacagtatatggccaattttctaggaacactctccagtctgactgcaaatcataaacctcggggacttcaggcttcctatctggtggagtattcaactgctccacccattattcaaggaccaactaaattcggcgctacattcatctccctttatcccttctaagaggaataccgctccagcgccaacgcaatctcctcctccctcgcctttacctaatcccttgcctgccctgtttccccgctgagctcctcaaacacttcgcatctctccccgttattccagtctacctggtgaaaaggttatttgaggaccttgtctacgctgcccctacctgatcccgctcccggcgccacaggctgggccccaacaggagctcctcaatctaagtgtctaggagaaacccagggagtctccacgaaggaggcactttacccactacagactaaaactggcctcggaatcgccttcctggagattcggcccagcggctctcaggagtcggtaggggcaagaacgtttccccggtgcagtggaagaagactgcgggccagccagggactcgggatccggggacagggcctcggcaggcgcccgcctggaagcccgcagcccagacgcggacgacccactgctcagcgggacacacctcgggccttgccccggaacgccgcttggacaacaacctttccgccgagtgcaggccgagcgcttttgggcgcagcacgcaggaaccggaagtcaatggaggaagactggacctactgattcaacttggagatgagcgggtctgtcctcttcacggcgggaggtagggtgcttggaacactggggtgatttcccgtctgtcattagcctctgaccctagaggctaatggaatacggcgggaggtagggtgcttggaacactggggtgatttcccgtctgtcattagcctctgac

SEQ ID NO: 17701 - DNA, 2300 bp, Homo sapien
ctgaaatgccacattaaggctgtttgatgggaacctccagaaataaggaagggaagaggggaaactaaaggaatctctcaatctctggctcctcactatgaatgagatactgtatgttctcttggattggctattttttttctttttctttttctttttttttttaattttttttttttttttttgagacagagtctcactctgtcgcccaggctggagtgcagtggtgcgatctcggcttactgcaaactccgcctcctgggttcatgccattctcctgcctcagcctcccaagtaactgggactacaggcgcccaccaccacacccagccatttttttgtatttttagtagagacggggtttcaccgtgttatccaggatggtctcgatctcctgacctcgtgatccgcccccctcggcctcccaaagtgctgggattacaggcgtgagccactgcgcccggctttttttaaagtttctgagattcaaccagagcctacttagaactgggttggcttttgtgggacctacagggaggtggcagtgagacctaaggtgtcagagaagcaaaggagcacagactggtgaaggctcgggtgccgaggaagcacccccagcatcacaattttgtcccagtgttgggcagaggagaaatgtccttagcttgtctcctcttctccctctctccctctttcctttgccttcataccttaagttgactttcccatctttctcctgggagatttatttctgtcccttttttcatctaaagcaacggaaatgaatcatctttcagccggtttaataaacagccccatgccccctgaccccagctgactctctcactggttcctctgtggctgctcctgggctaggcctcaccccctcacaggcaagaccccctcatggctggctattcttggtaatactctccaccctcccttcctgctcagtcctggcagcttgacctcctccaccccagggatgacgggaatcacacacagcattccaagcgacaattccacaagctgaccataggggcaggggaagcaaggaggccaccatgtttggagggtttctttgtgccatttcaatgaccctattagtggatcttacgctctccatttaacagttgagggtttggaggctcagagaagtgaaggaacttgcccagagacaaacagttgggaaatgtggaaatgaaggagtcaacatttaaagcctgaatttctggattcctgaattcattccattacaccatattgctgtgcgtgtgtgtgcacgtgtgtgcttgcgcccgcatgtatgttgaatgggagtgtgggcaggtcagctagaacatcagctgcaattcaccaggatggaaacctgattttatcctgaaggttaacacctgtctatcatatgcatatggcttaatgcatctgtgtgcattaaggtattaacctacatagaagatggcaagtatgtacagtatatatttcaccaggaggcccatgagtcattgcagatgatgtcaaggagtaacgaagatgatgtcaagcagtaacaaagatgggagagagggaaagaggaaatgaaatgcccacatttaagaccacctataccctgccttcacctcgcggtgatggaacttcacaggttaaagtgcctggctgtgtccaccttggtgaaaccacacttttctggtgaacaaaatcatgcaactattagttggacttctaaaaatgtgcaggtatcatttataggagcaatatggaatacagacataaaactgctgacgtcaaactccctggtgtggacatgtgtatgtgtctgcggtcagagagtggaattaacacaagtatataaataaccgtgatgcaaggtagatagaaagtgctcaggtccaaaacaaatagacagatactacaagagtattcttggagacccagaggctggaaagattactccaggcagggtatcacagagggcttcctgaggaggtggcatttgcatataaatacgtctccaaatagatgtaagatcttacattaacagaacgctttaacagaagttagattctggttaattttccaagaagcgctgagatgcagacatatgcccttgttcctctttcatagacgcggaaactgagacccacagaggttgaataggttgtccacagtctcgtagctaccaagtgacaggccacgatttgatctcaggccagtgtgttaaactccaatttgcgtgctcctgtccctccccgcgcgtcggcggagctcggggccggactggacctgccgagggaggggcg

SEQ ID NO: 17702 - DNA, 2300 bp, Homo sapien
ctcaggtcaaaggtgattttattttattttttaatttttaatttttttgagactaggtctagctccttccccaggctggagtgaagtggtgtgatcacagctaaccacagtcttgacctcctgagatctcatggctcattacagcctccacctccctggctcaagcaatcctcccacctcagtctcctgagtagctgggatcacaggcctgcgctaccatgtctaggtagtttttgtattttttttgtagaggcaaggtttcaccatgttgctcaggcaggtctcgaactcctgagttcaggcaatccacctgcctcagcctcccaaagtgctgagattacaggcataagccaccacgccccgccagtgatttcattttttaagttggaagatctgagcatgtttaagtgtttagtatcatgcccgttttacagaaaaaaagaggctcttagaaactacgattttactccgatgcggagattctagaacaagatccaggtaatacatcagtcaggataggctaggttatgctgtagcagcacacacccactaaatctcagtaagctgaatacatcctagttttcttctccctcttactacgtatcctagggtgcgttggcagggagtctgctcatcttagccactcagtgacccaggtcaccggatgatggtttcatctccataattggggcagctggcagaaagggatacaatggccggctcagtcgcctttaaagctggtgggaagtaacatattacctctgtgtgtttcaagtgggtcagggaagtgccagtcctaccatgtgcccagaaagggaaagcactggaaacgttgatgagcagcgctgcctactccatgacacttccagtattagaaataaccacaaacgcttttttttctttcttttctttcttttttttctttttttttttttttttttttttgagacggagtctccctatgtcgcccaggctggagtgcagtggcgcagtcttggctcactgaaacctccgcctcccgggttcaagagattctcctgcctcagcctcccaagtagctgggattacaggcatgcgccagggcgcctggcttttcttttcttttctttttgtattttcagtagagatgagggttcaccatgttggccaggctggtcttgaactcctgacttcaagtgatccaaaggtcggctacaaacttgtattatctgatacctactttgagcccaggccagaaaggataaagtaaagcatgagacgttgttagttcatttcaacagattggggagttgtgggttttagtctctgacgcttcattgttaccatgagagcctgcaagtttttcttttttctcttttttttttttttaacctctttgggtcatctgggaggacgtggtgctcttttagctctaacattttctggttgcaatgcgtttaggactgggatgcgaagtgagtgagtgagtgagccttctcaggaaaacactttctagaattttgtccgagtgtctgttgggaaacgcgcttacatcccgcagaaggcggtaaggacacagcgcacaactctgcattatacctgcgagttaaaaagccaagggttcgctcactcaaccttgaatgcgcgtcagaatcacctgggggaggttttacaaaatacccgtgctccacccaagacaatgaaatcagactccctgcgagcggggccgaacatcagcatttttgaggacgctccctgtggctgtgcatcggtgatctttaatcccctgctacttgttagaggagctggatgacacttcgtgggctcattctcataaataagctgctgaatggagtcctctcctcccaagagttgtcggtgttgcatcttttttgttgtttatttttttttaagccaacggacgaagacatccaacggtgctgcatcttaatggagggacatccagctaaagggaatcttggagacctccgcgggtttctagcagctcgcggcatgttggtttcccagggcaagaggccgccactgaaggtcagctctgtctttccagctgggcactggaggctctaagtctgttttcagcaggatcggaggaaggagacggggtggcgccaaggaaggaggagaaaaggcggccgagaaaaggaggagggcaaggggaagaggaagggcgagggaggagcctgaggagactcgcccggctcaaccccgacgtccgcgccccggccgcctgttggccatggcgggcctgggcctgggctccgccgttcccgtgtggctggccgaggacgacctcggctgca

SEQ ID NO: 17703 - DNA, 2300 bp, Homo sapien
ctttagctctaataatacttgctttacatgtctgggtgctttagtgttggtgcatatatatttacagttgttatatcttcttactgaattgactccatcattataaactttgtcttttattatagattttgttttgaaatctatttgtctgatatatgtatagctaatcctgctcttttttggtttccattggcatgggatatatttttccatccctttattttcagtctatatgtgcctatagatgaagtgtgtttcttgtagggaatagatcattgggtcttgtttttttatccagtcaaccactctgtgtcttttgattgaagatttttgttcatttacattcaatgttattgataagtaattcttgccattttgttatttgttctttggttgttttgttttgtggtcttctcttccttctttccttcttttctgtcttcctttaaatgaagatgattttctctggtgctatgatttagtttcttgctttttattttttgtgtatccattatatgatttttgatttgaggttaccatgagcttgcaagtagtatcttataacctattgttttaagctgataacaacttgacactgcttgcatgaactacctaacaagcaaaaagaaaactaataaaaactctacacttcaaattcatcccctgctatttaattttttgttatttctgtgtatatcttatactatctatatgtttgaaagttgttgtagttattttttattggttttctgtgaccttactattactagtgaggtttttgttttgttttgttttgttttgagacagagttttactctgttgcccaggttggagtgcagtgacgtgatctcggctcactgcaacttccacctcttgggttcaagaaattctcctgtctcagcctcccgagtagctgggactacaggcatgcgccaccatgcccagctaatttttgtatttttagtagtgacagggtttcatcatgttgtccaggctggtcttgaactcctgacctcaagtgatctgcccacctcagcctcccaaagtgctgggattacaggccacctcctgggttcaagcgattctcctgccgcagcctctggagtagctgggattacaggcgcccaccaccacgcccggctaatttttgtatttttagcagagacggggtttcaccatgttggccaggctagtctcgaactcctgacctcaggtgatccacccgccgtggcctcccaaagtgctgggattacaagtatgagccactgcgcctggccttcttttctttttgattgaagtattccctttagcatttcttgtaggacaggtctggtgttgataaaatcccttagcttttgtttgtctgggagagtctatttctccttcatgtttcaaagctattttcacaaattatagttttctagggtaaaagttttttccttcagcactttacatatgtcatggcactttctcctggcctataaggtttccactgaaaagtctgctgccagatgtattggaactcccttgtatattatttatttcttttctcttgctgctttaggatcctttctttaaccttaacctttgggagttttattataaatgccttcacatagtcttctttgggttaaatctgcttggtgttttataaccttcttgtatgtagatattgatgtctttctgtagatttgggaagttccatgctattatttctttgaataaactttctaccactatttctttctctacctcctcttaaggccaataattcttagatttgcccctttgaggccattttctagatcttgtaggcatgcttcattctcttttttcttttgtctcttcttactgtgtattttcaaataggctgaattcaggctcactaattctttctaatacttgatcgattttgctattgagagactctgatgcattcttcagtatgtcagatgcattcttcgattccagaatttctgcttgatttttaattatttcttttttttatttattttttattttttattttttttttattgatcattcttgggtgtttctcgcagagggggatttggcagggtcataggacaatagtggagggaaggtcagcagataaacaagtgaacaaaggtctctggttttcctaggcagaggaccctgcggccttccgcagtgtttgtgtccctgggtacttaagattagggagtggtgatgactcttaacgagcatgctgccttcaagcatctgtttaacaaagcacatcttgcaccgcccttaatccatttaaccctgagtggaca

SEQ ID NO: 17704 - DNA, 2300 bp, Homo sapien
gtgtgtgtgtgtgtgtgtgtatgtatgtgtgcatatacatatgtgtgtgtgtatatgtatgtgtgcatatacatatatacatgtagtatatatgtattctcaaatatatatgaaggatatatatatttgagtatgttggtaggggttcaaacataacttcttgtgtatgtctgaaacattggtaaaaattcctggtctaaatttattttgtagacttaaaaaaaatgaaacgttttaaatatgtgaaacttacagctaaatgagagctgatgcttcatttccagttaatttaaaagtattaagaaatgattgatatctagaatggcaaaaaaaaaaggtgtcaggatttacataccttttaaaatttcttagtacccttttctggttgtggtggatttgtggacaacatgtttttatttaggtgattggggtctttaaggtggcagttaaagagcaattacgaagggataagaatggtataatatataaaactgctgtgacaaaattaaaagttaaagaaagattaaacattattttgagtgtatgacggctctatgaactacttaactgtagctcagtttatcatcaacctgggcgtttagaagattagaccaagatcaagacattagaagtggttttcataatggatttataaggtgacttagcataaccaggtgacggtcttttgggtgggtctttccattggaacataaatgggaattcctttttcaacaggttttctgtgtgtgtgtttgtttctatagaattcttgtgtatataatgtaaaaaatactgttagtctttgtaatgggattttagcccagatgcatatgctaaacaaactcacataagagctaaagaaattaataaacagaaaaggagtaaatttagcattgaatgttaaatatattaagagattgtctcttttaatgtagtatgataccacagcataggtatatattgaccttgtgaaaaagaaaaaggcagaaaactgagctagaagttcttagtccaaggtatttaaaggcatctgagaagttcttgtatttctgggctgacggggtaaccaacaggagagaaaggacagtgggattggaaaaaacaagttgcacataaaaatgaactgttttcttactcagcaaactgaaaaattataggtcaaacgtctgacattatccctagttcaatttagccaatgtttattgaagacttaatgtgctactgttctaaaccctggctgtataaaggagaaagaggcatgaaccctgtcctctgagaaggaagggcaaaggcctgctggcaaagggagcatgccgcatgggaaggactgaataggagaggagttgctctgcagaatccactgtgtagccaacttagcagcacccatttattttgcaaagagaaaagtgtctgtatttttggttggataaccagggactgtagtttaggggcatggatttttctttgtgtttcttgtgactgtttcattgtattaatttatttgacttttttcatgtgcagtaatattgaatttatcaaatatttattgagcacctacctgatgcaatgttctactgggttggagtggaaaatacaaagactacgatatggtctcctccttttatcaattcacaaataagtagacagatggcatacggttgtaaaattattcagctgtaagtactgtaatcaaagtaaaaccagcatgctttgggtgacattgttccttactgtaactttcagggtcaggccagtgttatatctcttttacagatgaggcatctgagagaataaatgagttgctcctgaatgaattagtggcagaactgatgcaaacccagattctacagtttattcttggcttcttattaatacttttttgtgtgcatgtcatttgaaatggttagttaaaaaataataatgacagctaacatttgttgaccattcatgtgccaggcactatgctgtgagttttgcataattatctgatttaatccttaaaaaatatgaggattcacatattgccatatatgagaaaaccaaggctcacggataaattccttaagaccaacaactattaagacagactaaagtggtctaaaagttttggagagaaagtgactgcatgttggcaatgaagtacaccagtgtttcgtagtttttgaaatctgaattctttaaatgataggtttgatttctaatggattgtggaaatttattgtcactctatagacatgagaatctctgataccagctaatgttttcatttctttctttgttgatttcaaatagatcagagg

SEQ ID NO: 17705 - DNA, 2300 bp, Homo sapien
ggagaaacatagatagacattcatttaatattcatccatttctttccagcatagtcatcattctgacatcatctaaaagaaattagtatctgcattgcatccttaaagaagaagggacaaaagacatgtccaaactgtctgtctgttctagtggaataaaacattaatttaatatgtattttggacaaccaccaacctagagattggaaacttttctcaaggatatatctctctgtatgtgggctactggctttgtggcttttctgtaggaaaattaaaattctagttttgttctcccttatcacccagtgtctgtgtggcttaactggctgattagcgcgtgcttggaatgtgtaaattcattttaacattggcctaggggcctgtgtggtagctcacccctgtcatcccagcactttgggaggccaaggcagggggatcacttgaggccaggagttccagaccagcctgggcaacatagcaagactgtgtctctaccaaaaaaaaaaaaaaaaaaaaaattagccaaagcagggtgacactcacctgtagtcccagctattcaggagcttgaggtgggaggatcacttcggcccaggagtctgaggctggagtgagctatgattgagccactgcactccactgcacagagtcagaccttgtctctgaaaaacaaaaacatttgcctaggtaaaatgtatcgaggaagacaaattttaaaattactcattccaggccaggtgcggtggctcacacctgtaatcccagtactttgggaggctgaggtgggcggatcatgaggtcaggagttcaagaccagcctggccaatatggtgaaacaccgtctctactaaaaatacaaaaattagccggctgtggtggcgcatgcctgtagtcccagctactcgggaggctgaggcagaagaatcacttcaaccgggaggcggaggttgcagtgagccgagatcgcgcctctgcactccagcctgggtgacagggtgagactctgtcttaaaaaaaaaaaaaaaaaattagtcattccaaagtccaatgtcagacatagattatccgttgttttggatgtaatcctcttcctggaaaactggcacaacccaattacacatgaaatcctttcaactctggtattggaggtatagggaaggactttgttttaggagacccatagtctacctctattgttctaggagttaaaccacgttggtttacatcctgactttgccacctgtcaactcagaccttgggcaaatcaaaggtctgagggaggagtgcaggctcccagcgttcccacgggggtggggacgtgacgtattcatcagttcatgaagttaatgatatgtattgaaaaggtttgttcaaggatttaaataagacgatgaatatattgaattaataatgaatgcaaggccttaaaggtgttttgagggtggtgaaacttgaatctctcatcaactgtgcaatagttatattaacttggatggctatgagttttgcagaggaaagctgggcttaaatcccaatgctagacctggtggctagaccttgattgccaccgggtctagcattgggatttaagcgacctctaaaaaaaaaaaatcacggaatctctctttggccttccttttttgtttctcagcagtctaccaagctacgaagaacctgaaaatcggaggtcgtgtaccttattttttctgagagcttaagctgagagcacagcctccccaggagattagcggcagagatccgcgcgctgggagaaaggctagccccagggcgccctaacttccaactccgggagcaatccaaacccggaggccggcgggggaggggacagctgtagggggcggtggggatgggagtggatgctcccgggtcagctctggcactcgccagctgagcccagcgccagtctaggtgagccccacggcggtgagggacgctcgccagacggcccagaggagttagatgacgtcacctccaggaggactcgctttttcattaatgaaaccggccggcgcgggcgcatgcgcggcaggccgccttccctctcgcttccccctcccctttcccagccgcgctctcaatctctagctcgctcgcgctccctctccccgggccgtggaaaggatcccacttccggtggggtgtcatggcggcgtctcggactgtgatggctgtggggagacggcgctagtggggagagcgaccaagaggccccctcccctccccgggtccccttcccctatccccctccccccagcctccttgccaacgcccccttt

SEQ ID NO: 17706 - DNA, 2300 bp, Homo sapien
ctgccctgcagagttcaggtctggcagttcctctagggctaaagtctcctatgggagcaagtcgagccttgggggatgggcactcctggccctgttgcactacagatgctccagcaccaaaacctctgagctctgccctggctggagttctgcccctaccacttctctaagcagctttccctgccagctcaagtgtccttggtggttgaggggtctccttgtggtggaggagtctccttctgcagggattccagagtcccctggtgagagtgggttgctgcttccctgttcaactcaactgcctcttcaggagtcactgggggccaggaaaaagtcccggtgcgtggtagccctgtgcagggttccttacttcttccctcgtcagttcagcatctgtgtcttccctctgtcagcactcagtgctttccctctgaagatctgctaagagtgtgccagtcatcctgatcctctgggagatgttcctactggctgcagctagttggccatcttggagccccctccctgtggcttttcatgatttctaataattacattgatgttacattctgtgggctgttcttattgaaatgtataaatttaacaaatcagttgttggtgtaaacttgctgatattttgtttaggatgtttgtatctatgagtaagattggtttgtaattttcttatatagctgttgtctggatttcatatcaaggtgattctagccttataaaatcaattggggagtttatataatctatttaatctctgtgttaactgaagttgtgtctaatatttcacccctaatgtttatttctttattttttcatgtttttttttctgtttgtgtatttcgtttttatttttttgagacagggtcttactctgtcatccagactggagtgcagtggtgtgatcactgttcactgcagccttaacctcctgggctcaagcagtcctcccaccttagcctctcaagtagctgggactacaggcacatgtcaccatccctagctaatttttaaattttttttgtagagacggggtctcaccttgttgcccaggctggtcttgaactcatgggctcaaatgatcttctttcttggcttccaaaagtgctaggattacaggcgtgagccactgtggctggcctcagtgtatttttaaagactcatttctaggccagacttggtgggtcatgcctgtaatcccagcactttgcgaggctgaggtagatggatcacttgaagtcgagagtttgagaccatcctgaccaacatagtgacaccgtttctactaaaaatacaaaaactagctgggtgtggtggcagacgcctgtaatcccagctactcaggaggccgaggcaggagaatcgcttgaacccaggaggaggaggttgcagtgagtggagatcatgccgctgcattccagcctgggccacagagcaagacttcatctcaaaaaaataaaaagactcatttcttagctttttaaactttgttttctgttttgttaattttgttgttacattttctttccttgggtttattctgctatgcatttttcccctaactttttaatgttacttatttatttattttttgagacggagtttcactgttgttgcccaggctggagtacagtggcgtgatctcagctcactgcaacatttgcctcccgagttcaagtgagtctcctgcctcagccacccaagtagctgggattacaggcgctcgccaccatgcccggctaatttttgtatttttagtagagatgggatttcaccattttggccaggctggtctcgaactcctgacctcaggtgatccacctgcttcggcctcccaaagtgctgggattacaggcatgaaccaccgtgcctggccttaatcttatgtttaaatgtggaaaaatgcacataacataaacgttaccatcttaactgttcctaagtgtatagttcagtagtattaagtacattcaccttgttgtgtaaccaatctacagaactcccttcatctcaaaaaactgaaaccctttactcattaaactagaacttcccattcctccatgttcccagccactggaaaccaccattctactttctgtttctatgaatttgactaccctggatacctcaaataagtggcgtcatacagtatttgtctttttataactggcttgtttccgttagtgtaatgtcttcaaggttaatccacattgcagcatatgtcagaatttcctaccttttaaaggctgaataatattctgttatttgtgtaaaccacattttctttatcc

SEQ ID NO: 17707 - DNA, 2300 bp, Homo sapien
atagcaaatgttacctataataatggaaaactgaaaccactgattagcgtgggatagctattccttggcagatgctttgtgatacctttcacaatgttggggtaatatatcctaggacacaaaagaatacgtaaattaatttactgcttaatctagaatgtaaaagttgcctaactatcattactgacctagacagcctaatagaaaatgtaatgagtctgaataatatttaaaataagttgtaacacatacttatgcctctaaaaaatattttttttgagtaacagtaatacagtattattttatttcatgagaatttcttttatttatttatttatttttattatactttaagttttagggtacatgtgcacaacgtgcaggttagttacatatgtatacatgtgccatgctggtgtgctgcacccagtgtaagagattgttagaattcaaatatattgaaatgatctccctttttctttttgagaattttacaataatctttgaataatatgaagcaatttggtatgtcccaaacttgaaatgagaaacattgccactactattgcactggaattttctattatatacaacagaaactaaacttgatacagcctaaacccaaattcatttgaatccattaatgaagtaacatgtcttttctttcaaacaaaagtactgttaagtgtaatgaaaatgcataactctacttctacactgacttaatgaggtttcctaaaattaagagatttaagtggtcggtaaattgaccctcagtcacatctttagaagtgcagcagtgtatatatgagcttaaatagaactctaaatgtcaatgcattccctatttccacaatattgctgaatgtagtatttttaacacattattttaagcactatgattgatggctggtttcctaaatccacagtaagaatccaattgagagttcaactgaaccctcaaagtaaagtggcaataaagcacccaatcaacaataaacttctatgttgcggactcttaaaatgcagatacttttcgaggaacattagttttatacaaaaggtggctcctagagtatagtttctcttgtaagaaaataaacttcaaattttaatacaacaaattctatttgtggtataatctaaataatgctaatataatttagagaaaaacaaacgatttagtaacaaggcataaagagactttccttacacataacatgctaaatattactcgtttttaaatggtgccacttggtaacgaaaataccgtaactttatttgctttctttaaacttgccattctggaaatcagatttgtgttttaacagatttacacaagcagtccactgaagagtggagcaaaatttatcataaatctgatctcactttataaaactcatgatgaaaaattttccttttatatcatttcatgtaattttaaaactataaactactttcccagaaagatgaaatgtgcaacactctgaaatcacctaaattgatactgctattcttaaaacataaaatcaaataaatggtcattcatacagcaccaaaaatgtctttggaaaaaacaatactcatatccacttaccacccaaggttgcataaagaaaaaaaactttaactccaaatatataaaataaaacatgtttattttacataggaactgataatctgaagtataagatgctaatttccaaatgtatcctggcttgtgtgtagccttggtcaaatgatcattgtatcagaaagataaagaaaaaataatcgtatttcagtacttctatacatcctaaaagggaagacggaacacttaagtggttgataaatttgaaaagctgattaaacataataatcaccatgttgggggaagacataaaagtcataaaacagattttttataatattaaaaaagtgacatgaaaattatacaattttagaaaggaatataaaaaggcaggagttaaaaaatagtgggactaatatcatagaaaactatccatgaggaaggtcaaatttattttcaacatgtaaaaaggataaagagtagaggtattttaaaaattcacagattcttaatgaggcaaatgttaaaatatggaacccaatctcagacaaatacatagaaaggagtaagggccaactctcatgcataaggtatcccatcctatagcaaatcagatatataggtacgcttgatgccacaaattttttaaaaaattgtccattttgttgcgtgtgcacctcttgccataaatttgagtcagcaccagcgacagctctgcagtcctcct

SEQ ID NO: 17708 - DNA, 2300 bp, Homo sapien
ttaggcacagtggcttacacctataatcctgggaggatcacctgaggccaggagtttgaggccagcctgcacaacaaagtaagagcctcatctttacaataaataaataagccagccagcgagcatagtagcatgtgcctgtagtcctagctactcgagaggctgaggcaggaggattgcttgaggtcaggagttcaagaccagcctgcgcaacacagcaataccctgtccgtaaaaacaacaatacttccaaaaaccagtgaatcaaaagctttatagcatttgattatattatgctttatagtaggagcccataaaaaaaaactattctttttgcaccaagctataagtaccctgaagttaagaacaaggtcataataacctgtgtttcccgcagtgaccaggaaaaagcagtgcatgggttaacacattccgtacctactataatatgcatcatccaaggcactttacatttatttaattccacaataagcttataaattaggaattatgatctccatttttcaagagaggaaaggtgacttactcaaagaaatttttattcagatggactcactcctttcaatacactttgtttagttaacttaaaaattttttgtattttaaatttttgtgggtacatagtaggtgtatatatttaaagggtaatgagatgttttgatacagtcacgcaacgtgaaataatcacatcatggagaatggggtatccatcccttcaagcacttatcctttgtgttacaaaggatccaattacacttttagttattttaaaatgtataattatggtattaatgacagtcactctgttgtgctatcaaataggtcttattcattctttctattgttttttgtacctattaactggtaacaccatctccccaacccctcattaccctttagtaacaagttaactttagttaacttcttatttaaaaaatgatccccaatttattttattttccactgagaagtaactactttgtgggtaatcaaataaatagttgagaacttgaactcaaaagtcactagtaaaatatttggtcaaaataatttaattacaaatatacaaatggcaaacaggcatacgaaagggtactcagcaccactgatgagagaaatgcaaatcaaaactacaatgatacctcatctcaccccagttaaaatggcttatactcaaaagacaggcaataacaagtgctgggaagggtgtggagaaaatggaactctcgtacgctgttagtgggaatgtaaatcagtaaaaccactatggagaacagtttggtggttcctcaaaaaactaaaaatagagctatcatatgatccagcaatcccactgctaggtatatacccaacagaaaggaaaactgtacaaagagacatctgcactcccacttttgttgtaacactattcacaacagccaagatttggaagcaacctaagtgtctataaacagatgaatggataaagaaaatatggtacatatacacaatggagtattattcagccataaaaaagaatgagatcctgtcatttgcaaaataatgtaattatacttttaccctggactttttatattatgaggaaataacattacatttattggttacctgcagttggtgaggcatttatacatgttatattatgctatcttatttaatcctcacaataacccaataaaatattcctttagaggaggaaacggtgactcagaagtgcagagtcttgcctaaggtcatacaagtaaacagaacacatcactcacttcttatgagaagaaatctcactgtaagtgataacccaactggcagcttttcttcttagaacatgtaattttctcttcgggactccatcctaaatatttaatttacataatcatattactagagtatctcaaatatttatttacataattaaaagcactcaaatcatagggctccaaaatgtatttcaaaataagttctgttaaagtaatatatttcttagtcactttgtggtttattgcacttccggaaccagctattgataaacttcctctttttctacagaaactatttcagtttgctagaggaacattttaaatctgaattgaaccacccattttcctttcttagccaaatcaccaaaatgtccagttagaacaagaatttagcattctgcaaaagaagttaacagctgaggtaagaaaattttcacacaatttggtttgatcttgctttatataaaatttattttaaaaactgtcattagtgttttaaacttaaactctgatagtctaaag

SEQ ID NO: 17709 - DNA, 2300 bp, Homo sapien
atagaagatacagtggctgaatcaggtaaggaggaatgcagactcagcaagaggactgggcaggccttatggagaaaggcaaaaaggaaaagaaacaggtaactagatgtgttgaagagacagctagtctagccagaatggaggattcaggtagagaagttttgagagataaagctgggaaaatacagaatagtcaaattgtggagagaccataactgcccaaccaaagggcttaggttttctactaggggctcaccatttctcagcatatgttctgtggactactggcgtcagaatcaactgtggtgcttgataaaaatgcagtttcctggtcccaacctggacctactaaatatggatctatgtagtggggcctggaaatttttatcttttttttttttcccttaactcaggctggactgcagtggcacggtcacagctcactgtagccttgacctccccaggctcaggtgatcctcccacctcagcctcctgagtagctgggactacagataagcgccaccatgcccggctagttttttgtttttgtttttttgtattttttgtagagacaggattttgccatgctgcccaggctggtctcgaatttctgtggctcaagtaatcctcccgcctcagcctcccaaagtgctgagattacaggtgtgagccaccatgtcctgcttttataatttttaaacaatcttctcatctgatgtttatgtacacaaacatttctgaatcattgttgtatgtattagggaactgttcaaccggttttattttcccttaaagaaagggtggtatgaccaaagacagtgatgtatacaagatataagaaggattcagggctaccgaaaaggcactgtagagtctaggtatgacctgataaggatctaaaatagtactgttgacagtaaaaacagggaaaaagaaactgatccaacaatatgaaggaaggaccaacatgattcaaagtctgatcaggactgagaggacttaaattaaaatgatgtgttgtatactaagcctctgatattagaatgttgctatcatgaacagaaacaagaagactgtcacaggcagcctcctttaaagaaaaaataaagttctttttatttcattaatttaattaatttttaagagatggagtcttgctatgttacccaggctggatttgaactcctgggctccaccagtgatcctcctacctcaacctacctagtagctgggattacagatatgtgctgccatatccagttctttttttttttttttttttttttttttttttttttgagacagagtcttactctgtcttcctggctggagtgcagtggcatgatcttagctcatgcagccaagatctcatgatctctgcagcctccacgtcccgggttcaagctattctcctgtctcagcctcccaagtaggtgggactacaggtgcatgctaccctgcctggttaatttttatatttttagtagagacaggttttctctatgttggccaggctggtcttgaactcctggcctcaagtgatctgcctgcgtcaaccctcccaacgtgctgggattacaggtgtgagccaccgtgttcagcccatacctagttcttaaagtctgtttcagtcatgttaaacttgaggtgatgacaggatgtttgacagttgtgtgtgtgtgtgtgtgtgtgtgtgtgtgtgtgtatacacacactacaccacacgaaagcattttctgtcccatataatctaagtttactagatattttctcaaataattgctgcagttccacaattgttacattatctgatcagtatcccatggactccaaactcacattttcaaatcagtctgtagatttcaaataagtcttttagagaagatttgaaatggaagataccatttcaaaacctcttttgaatgacactaaagcatgtagcaggcctatagaatgagcatactgtcaaaaggcattaagtggaaaaccctccctgctctggaggcggggattggttctacaaagcctcctgtcatgccagtggccaactagagaagttggagctttttcgttgtttttttttttttccctcctgtgacatgtgctttagttgcagtggaaaggaaatgtgtcatctgtggtttggttttaaaagtggaaaactagctgcacatatccttttttactgcagatttactttaaggctcatattctccaagtctattctgctttaaaaagaagacaagaaaagaagtggtttatcaaaatcacgttataatcagattttgaccaagcatttt

SEQ ID NO: 17710 - DNA, 2300 bp, Homo sapien
gtgattaaaaaaataaaagcatcttgagttttctttgaagtgacaaatttgctggaaagatcagtactttctgctgctggagagtatattctgtttataaacatgaatgaggatgtgaataaggctagaagatgacctctgctggaagtttctggtatgatttggaggaaggagcactagtcttccctggtggctgctagcctttcatttagttcaagcctgccagcctctagcttttccttgcaacttgtcttttcatttttcttgtgctattttctgctatgatagcaaactttgcataacaaaatgtgaagttttccatgtgacattaacttagtaaacattttagcaattgactattaaaatgaaatgtgcataaacaatttgccaggttgtatcttatcacaaatatagtcatgtgctgcataacaacattgcagtcaacaacagaacacatatagacagtggtcccgaaagattataatactgtatttttactgtaccttttctgtgttagatatacaaatagttagcattgtgttacaactacataaagtacacaatatggtaacctgctgtacaggtttgttgcctgggagaaacaggctataccatatagccttggtgtgtagtaggctatgctatctaagttcatgtaagtacactccacaatatttgcacagacaaaatcgcctaatgattgtttcctagaatgtgtccccgttgttaagcgacacatgactgcaatgaaattcagtcctggaaggaaaagaagaagtaactggctgttctctttttctccaggaatcgacaaggagaacgttgaactctcccctaccactggccactgtaacagtggacgaactcgccacggatccgcaagccaagtgcagaagcaaagaagcgctggcagtttcaaacgtaatagcattaagaagatcgtgtgaagcttgcttgctttcttttttaaaatcaacttaacatgggctcttcactagtgaccccttccctgtccttgccctttccccccatgttgtaatgctgcacttcctgttttataatgaacccatccggtttgccatgttgccagatgatcaactcttcgaagccttgcctaaatttaatgctgccttttctttaactttttttcttctacttttggcgtgtatctggtatatgtaagtgttcagaacaactgcaaagaaagtgggaggtcaggaaacttttaactgagaaatctcaattgtaagagaggatgaattcttgaatactgctactactggccagtgatgaaagccatttgcacagagctctgccttctgtggttttcccttcttcatcctacagagtaaagtgttagtcctatttatacatttttcaagatacaagtttatgagagaaatagtattataaccccagtatgtttaatcttttagctgtggactttttttttaaccgtacaaaactgaaagaaccatagaggtcaagcctcagtgacttgacaccataaagccacagacaaggtacttgggggggagggcagggaaatttcatattttatagtggattcttaagaaatactaacacttgagtattagcaataattacaggaaaataagtgcgaccacatatatcttaacattactgaattaaaactatggcttctaagtccttatccaaactcagtcatccaaactagtttatttttttctccagttgattatcttttaatttttaattttgctaaaggtggtttttttgtgttttgttttttgtaaaccaaaactatactaagtatagtaattatatatatatatatattttttcccctccccctcttctttcctaactaattctgagcagggtaatcagtgaacaaagtgttgaaaattgttcccagaaggtaattttcatagatgtttgcattagctccatagcaaaatggaatggtacgtgacatttagggtagctgatatttttattttgttaaataatttccaagaatagagtatggtgtatattataaatttctttgataagatgtattttgaatgtcttttaatcttcctcctcctctccaaaaaaatcagaaacctctttaagaaaacatgtaggttatatatgctagaattgcatttaatcactgtgaaaagactggtcagcctgcattagtatgacagtaggggggctgttagaattgctgctatactggtggtatggattatcatggcattggaattttcatagtaatgcagatccaatttctttgtggtacctgcagtttacaaaataatttgact

SEQ ID NO: 17711 - DNA, 2300 bp, Homo sapien
caggctgagcgcggagagccatttctgcagcccccaccagggggcagccccagctcctggccatctcctttctgtgctgagccccttgggtgagagaaaatggcacgagctgaccttggacgaactaatatcggggtcccaggggcaggcagcagcccccagcttccactccctacctccttgccagggggctggctggatctccagcagccagtctctcccagccagctgcttgtccttattctccacttccacctccattttgcagggtaggtcgggggaaagcagcattgcttagattcgctctcatcttcagttgccctaaaaggaaggtactattatcctcacggtacaggcgaggaaaccggctaaaatatgctagtatcctgctgagcggcatccagctagcagagacgctcctactcagccgaatacccctactccactcccacggcctcccctttcccgctttctcacatttcggactcctcaatcctcagaaccacaggtctctcttcccaagaggtgttgcctttcgtggctctcagacgaactgaagggtcaaaggagagtagctaaaagccaggttcatcccaggagccggggctggaaagaagaggtccccgcccactgtcagaaggcaaatggcagtccctgcgcaggatatattcagggttgagcaggaagaccacagaggtacaaaccgaggcccagctaggggaggccatgcagttcaccccgtactccctgtctgcgccactacgttgctcccggctcctcacataatgggcgggcccatcccctctgggtggggcttcctctgggcccactcttgcctggagatcagggacttgaaggtaattaagacatatcttgccctggagggcttcccagcatggtaggggaaatgggcatcccactagagaattaagaattaactgggcacctggaagaagggcttagaactcagaatagaagataagatggcgtgccatcagagaagccttcccggaggaggaaacctctgtgctgagcatgacagcataggtgggagtagactcagccaaggcctttttttgggttggggccagtcgttgccacaaagacctgatgtgccgagcaagaaggtggagagaagagcccggccgggtcctgcagggccccgaggctgggctgggaagttagcacaagctggggtggaggctccgctgagcactaatgggaggaggccagggtcctgacctagagcctgcggccagcgggacagagattctgtcctggattctctgagcttggggcatgcgggctgccagggaggtgtgatggtgggaacccggcgaaagggaggaagcctcttccaggcgtggagcagccttgggccctgaacaggcaggcctctggaagcgcctcgcttttcctccctccggcctcatcctggttttctcctcatctccccgtcgcagggtcccgggtccaggctggggttcagttgcctgctcctcctctctgtgccctcccccgcccgatggccccacaagtgctgtcttgcaggagagcgccgggagaccgcagggcggaggtgaagaacggagtccagagccctccagagatggcagcgaatcccggccctgcctcttgccagctgtgtggcctagagtgagtccgacctctctgggcctcagcttcctccgggatgaatgcagtcacggaacgcgccaatgcaggaggcccccaggacatcctgagcgctcgggagacgccaggcgcggcagcgggcacggatagcggaaaggggcgcgaccccgcggaatcctccggcagggcagggcctttgggtggctccgggtgtccagaggaaggggtgggctcggggacgcggagggaaactggggacgcggagggaaactgaggtcgcggaggacgcggccgttggcagctcgctgcgcctgccggccccgcgtgggccgccccactcgggaggacgcgggctccttttgtctgcagcgtccccgccgccgccgcccccgccgcctccccctctccctcccattttcgccgcggcccccgcccctcccctccccgccccctattgcccctcctccttcccctccccactcttctccttccctcccctcccctcccttcccctccggagcggctggggctgcggcgccgctgctgacacggatcggccgcggccgccaccgggcggaggctgcgcggcgcagacccagacgggcggccccggagggcgcgcggcgatggcggcggcgggcaggcggcgggcgcggcgggcgagg

SEQ ID NO: 17712 - DNA, 2300 bp, Homo sapien
caggcgcagtggctcacgcctgtaatcctagcactttgggaggccaaggcgggcagatcatgaggttaggagttcaagaccagcctggccaatatggtgaaaccccgtctctactaaaaatacaaaaattagctgggcgtggtggcacacaccagtagtctcagctacttgggaggctgaggcagaagaatcgcttgaacccaggaggcggaggttgcagtgagccaagctcacgccactgcactccagcctgggcaacagaatgaaatataaatctcaaaataaataaataaataaacaaatagagacagggtcttgctgtcaaccaggctggagtgcagtggtgccatcatggctcactgcagcctcaaactcctgggctcaagtgatcctcttcagcctcccaagtagctgggactacaggtacgtgccaccacacctgcctaatgtttttatttctaattttttggtagggatggggtcttgctgtgttgtccaatctggcctcaaataccttgctgtgttgtccaagctggcctcaaatacctagccacaagtaaccctcctgctttggcctctcataggcactgggattacaggcatgagccgccacatccaaccaacatgtgtgttctatatgatacaccacagtgctcctgtgtgttagagactgtgggagcggacccaaacaagagaaacagtctggcctctgcacatatatctctgaacagcaaggcatactttccgaggagagggctggggcagtggagtttctcttggggccacagctctagctcctctcttaggtggctctggccaggaggccctcctgtacctaatgctgtcccatttggaaagtccccagcagttctgggagctccagcggctgctttgcctcagagacaagccctggtaaacataggggccgctgcgaatttactggcaggagagactgagaaggaagttgacagccaagaggcagagaagtgggcaaagctggtgcgtgtgtgcatgtgtgtgtgtgcatgtgtgggtgtgggtgggtgtgtagggtggtgcaggaccaaagcacccagatgccccactggtcctgcccgtaccaaagtgccgttgccactttgttggccagtgaagactcagggaaggcaaaggtggctttgagccagacaggaagataaatctctcccctcactcaagttatatagtgcaacagcaggtcaaagggcaaccacatttgcaatatttgccgctttacattcatctcatttttgtctttttaaagtccagggcatggttaagagtgatggggggatggggagtacatttttaaacatttaattttttgtagagacgagatgtcgctatgttgcccaggctggtctcaaactcctggcctcaaagatcctccgcctcggccactttgtctgagccactgtgcccggcctgaggacacatgtttgacataaatagtatttactagcattcaacaggaagggtcctctcctttttttttttggttctttagttctcgttgccgcttggttctttgtgttcctgggctggttatggagatggttccgacttcacatgaaaaggctggaaaagttgtgggtaggactctggatgaaagtcagcctaggcgcccccggactcattagggggtggaggcggcggcggaccgtgtggggcggggtgcgcagtgtgagccggggagcgccggccggaatctcacagtgcggtgacaaaaaaccgtgagggtggcgcagaacgggcaagagactacagcgcctacctggcaggggcgcgagctcacacgccgactcctggagtcccagccagggctgccctgagctgggcgcgccaggcgagctccacctccggaggcggggccgccgcgcggccattggtcggcgccctggagccacctgcccctaccttgggggcggggttacctgggccccgccccgcggctcgggttccggggccgcgtccctgtcctccgcccccgcccccgccccgccccggcgcgaaggccccgcccccgagtcccggggcccaggcgcctcgtgatgtcaccgcagcttgatacaaagagcccttcggcccacgcgggtctcccggcaacgggcgggggcggggccgcgccttccactggtgcccagaagtgcgagcggacaggccggccgcgattgttcctgcgcttcggggctgcccgccgtccccgccgccgccgacccgcgccctctggcttccgcgcctctgccggggagcggcccgcggatgcgcaccccgccagctct

SEQ ID NO: 17713 - DNA, 2300 bp, Homo sapien
gttatttctgtatggtgggatgattttttttgttgttgttgttgttgagacagactctcactctgtcaccaggctggagtgcagtggcatgatctcacctcactgcagcctccgcctcccgggttcaagcgattctcctgcctcagcctcccgagtagctgggactacaggcgcgtgccaccatgtccagctaagttttgtctttttttttttttttttttttttttgagacggagtctcgctctgtcgcccaggctggagtgcagtggtgcaatctcagctcactgcaacctccacctcccgggttcatgccattctcctgcctcagcctcccaagtagctgggactataggtgcccaccaccacgcctggctaattttttgtatttttagtagagatggggtttcaccatgttggccaggatggtcttgatctcctgacctcgtgatccacctgcctcggcctcccaaagtgctgggattacaggtgtgagccaccgcacctggccagttgatcattttaattacttcccatctactctgctatattttctatattgagcatgtactcccataatcagaaatgttatttaaaaacagtattaagacctaagtgacttcccagtgaagcagtttcacctttaactttggtgttggcagaaaggagtcccttccatctcagccctcaccaagtctctcgagggatacagtgctgtggggtggtgggaagctgccaccattgtggctgaggaagccgagggggttgcaagtggcagccccttaccagaaggtgatggttacgactgctgcagggatttggagagggaagagaggggttcccatgttggttgaaccacatgaaattgacaacttttaatcatttccatcttcaaaaaagtaatttcatgtggttcaacctagtatatctcaatgcagggtttctcaaactcaagtgattctcagagtcctgatgttcttggtggggccctttgggtctgtggatggagaagaggggccgtgctgctcgtgctgctctctgggagcagccttgtaatcccagcagtttgggaggctgaggcgggcagatcacctgaggccaggagtttgagaccagcctggccaacatggcaaaaaccccatctctactaaaaatacaaaattagctgtgcatggtggcaggaggctactcgcagctactcaggaggctgtggcaggtgaatcactagaacctggaaggcagaggttgcaccaatgcactccagccaggcgacaaagcaagactctgtctccaaaaaaaaaaaaaaaaaaaagacaaacttaaaaaataacacagtataacaactatttacatagcatttacattgcattaggtatgataagtaatctagagacgatcgagtatacaggaggatatgcataggttgtatgtgaatactatgccatttcatatctgggacttgagcatcctcagattttggtgtccacagggggtcctggaacaaatctctcttggatgccaagggatgaccatactcagtcttacagtatctaaaattttagatccatttatattcattttctgtattactccgaatgtttttttttcctctccttaaagtgaaagcaagtttattaaggaaataataaaacaatggctactacagaagcagagcagctactccgaatgtttttttgtttgtttttttgtttttgttttttttgagacggagtctccctctgtcgcccaggctggagtgcagtggcacaatctcggctcactgcaagctccacctcccgggttcacgccattctcctccctcagcctcctgagtagctgcgactacaggtgctcgccaccacgcccggctaattttttgtatttctagtagagttggggtttcaccatgttagccaggatggtctcgatctcctgacctctgatccgcccgcctcggcctcccaaagtgctggggttacaggcgtgagccaccgcgcctgccactactacaaatgttttaacaaacctttcaacaactatttgatattccacaatttaataatttactaacattataatttaataattataatttgatctagctgtagctagacaattaggttgtaagcagtgttttgctactgtggagtagcatgggtagaattggtttgaactgtagaaatggtttctgtggtgagatgtttccctttagatagggtccctgaaatgtacttaccaggtcaagagctacaaacttaatcggtagtgccaattaaagggaaatgcctgtcagtttccccacc

SEQ ID NO: 17714 - DNA, 2300 bp, Homo sapien
tacttgagttctgctcctggggcttggggttgctaccttcgcaccctgattaggggtcaggagttcctcctgaattaactgacctaggaggctgcacactgggggccacggggctctgtgtcatcttgtatcctagaacctcagtgttgaagcatccttccaagtgacccctgtgatcccttctcacccacctgagtcaccactttctctgaaatgagctcgcagtttgccttagctgttaaatgggtatgcctcactggcttctctttgagcgtgttggagaagggatgatctgttgctatatttccactccctgcccctcccccgtaacaaggttcaaaggtactggggactcaagtaaagtcagctcagcagggtggtgtagggcaccagactggacagcagttaaggtggtgattcctttccctcatgaatcagtgcggggcagacgcctaggaaaatgcggcacgtgtacaacagcgaattgctagatgtttactgctctcaatgctgcaagaaaatcaacctgctcaatgacttggaagcccgactgaaaaacctgaaggccaacaggtgaggcccaggcccagctggggggtgagaggccggggggccagggcagggcctggagggagaagctacgggcatggcgaggcgacccctgctgtctgggcaggtgagagctctcagaggagggttgatccaggggctttttctgccacaggaaatcaggctgtttcttctcaggaccaagctgactagtgaattcctttcagtgggagggaagagccttgtcctgcactgtggtgtcttacagctaggacagagtaagggagtggactagaacccctctgttcaatgactgtttcctttctctctctagccccaaccgaaagatctccagcacggcctttggacggtaaggcccgcctcgagggagggcaaattgagtgctgtccccatgctgcccactggccggggctccctgccagcagcccggactcagctggtgcccgcatgtggctgagtgagcagaggggaacgaggccatcccagggcagtgcagccagggcagcgtcacttctgaaaaagaggggccagctcctccctgctctctccccaccccttgtcccttcttcaaatcctaggtcaccttgacttcaggcaggcatgccagggatgccctgagagagacagagcaccccacagcgttcagtgcccttcctgcctcttggagctggcagccatactcaataaagagaccccgggtttcctgcaggcggggatctgggcatgagtgtgcgccattggggctggtcactttgctccgattaagtcctgcggcagttcagtgtggccccaggtccacactcagggctctgggagctggcagcaagggcccaggagctaggtgggttggcctcttggcagagaccctggctgctgcctatcagggagctggaaggggatgtcactgggggtggcagctggattttgcctcaggcacgggttagctcagcaggcccagtcccaccccagctcactgctctgcaaggcctggagaattctctgcctttgccatcccccagagttcccagagacgtagcaggagccagcttggtggagaggctcaagcctcaggaggcccagaccctcttccagggccatggagctgggctacctccttgggggcttccccactggaagaggagggggctcacgtgccagctgaggtcactgggtagctgcaggccagcatgctggcgtgaagagggttctgaggccgcaggagaagctgtgcgtcattggctgtgtctgccaggggaccccgggggtctgtacagcccatttgccatcctctgggcggggtgatccgctgagtttggcaacattcttcctctcaggctgagtgagggcagcctccttaaaggggcagaccccctggggtactggatgctcgcctagccagtagtgtgagtaggcccctgtctctggaaggcccctgcagccagacaccctcctcccacccctgcaggcagctcatgcacagcagcaacttcagcagcagcaatggcagcaccgaagacctgttccgggacagcattgactcttgcgacaatgacatcacagagaaggtgggccttgggtggctggagaagggactgaatgcatgcctgctcccaggggagatggggtgcactcaggctactgtctggggacttgggagaccctgtacctgcctaggaattgggggcaggtggccctggtcacgtgttccccactcccccaccccacacatg

SEQ ID NO: 17715 - DNA, 2300 bp, Homo sapien
tcctacctcaacctcccaaagtgctggtattataggcatgagccattgtgcctggccagagtttttaaaaacatattcagaatattaatatcttgtttctcatttgttgcaaataattttacccccagccttgtttgtggtgattttttttttttgagacagagtcttgctctgtggtccaggctggagtgcagtggtgtggtcttactgcaacctctgcctcctaggttcaaacagttctccctgccaaagcctcccaagtagctgggattataggcaccttttgtggcgatttttgatgcccagaggtattttgtgtgtgtatgtgtgatgtctgtttttaaaatgctttggaagctcttcctggtgctgagaacaactctttttccccaagcagttaattttgccaacactatttgggcagttatgtttctctctgctgatttgtgatgttacctttattatatattaaatttctatgagtattagagtctactttagaacatttttattttaagcttttgtactgttttctttttctttctggttttttttttttttagaccaagtctcactctgtcgcccaggctggagtgctgtggggcaatctctgctcactgcaccctccacctcccgggctcaagtgattctcctgcctcagcctcccgagtagctgggattatgggtgtgtgccaccacgcctggctaatttttgtatttttagtagagatggggtttcaccatgttggccaggatagccttgaactgacctcaagtgatctgcctgcctcggcctcccaaagtgctggaattacaggagtgagccaccgcggccagcccctgttttcttgtcatttgttttaaaataagaaaaaaattcctctttttcctgtcccttaagtcctgggatgtttaacattcttaatcttatttggcactttaattttacgaaagagatatgtagattagggagcaaagaggatagtggtagtctccttaacacaaggctataagggtggtcacctggggtcatcacatccctgtatctgattctcaatattgcaggttatgaaaacacatctagctagtacacctagagttgcactgttagaaacagtagctccaaggcacatgtagcaatttaaatttattagaattattcaatttattcacattggccacatttcaagtgctcagtaggtatatggttactatattggacagtacagatagtagaactttcatttccacttccaccattaaagaacgttctattggacattgctgacctagaggcagttagccttggggatactgactcctgtgtaggaacatctacatatagaacaaaaataatatcgaatattgtgtgtcagttttatgctaaattttttcaaatgccttttgtgttgtacaaacaacacagtctttgagggggatgaaggaagagggtctcatgtcctgatgttgacgtgattagcacaccttgagctggtttgttattagaggttaggcactgtggggaaggcagggaaggctgtctttccagttgggctgttcccagctcaggccctgcctatccccagaagccacctttcgaggcaaaatgggaaataattaggttgtcggtatcaggcgttgagcatggaaatacaggaatcccgaatgttcaggattattatgagtaagcgtcgtggcctgtattctgtgtccactgcatattgcagtttgtgtcttaatcatctatcttggtttctaatggattaacttcaaagacgatcattagctcaaggtggaggtcactgggttgctcatgtgtcttacccacgcggggttttgaagctggagcacaccccgagtggccgagtagggtacgcttggcgtttcacacgcagctagtcgtgcagccttaggatatgcaccgagaggagtttccaaaatccgtctccgagattgtttcagatttcgcgctgggagggaggggcgggctccgcgaggccgcgcgccccgccccctgcgccgccccgcccccgcttgctcgtgacacccccgcgccccgccctcttggccggtacccaccccctccccaggctgattggcgcttctgcggcggatcctcgggcgggcagccgggccggcgcgtcacgtggcccacggcgtccagggcgaccagccgcgggccgcagggcatggaccttcaggccgccggggcccaggcgcagggggccgcggagccgtctcggggcccgccgctgcctagcgcgcggggggcgccccccagcccggaggtgagcgccgcg

SEQ ID NO: 17716 - DNA, 2300 bp, Homo sapien
tttactacctttaaaatttgtatgtgggccaggcacggtggcttatgcctataatcccagcactttgggaagccgaggcaggcagatcatttgagatcaggagtttgagaccagcctgagcaacatggtgaaaacccatctctacaaagttacaaaatttaggtgggcgtgatggtgtatgcatgtggtcccagctacttgaggggctaaggtgggattctggtaggtgaagactgcagtgagctgttgtttgtgccactgcagcctgagcaacagagcaagaccctgtctcaaaaaaagaaaaaaattgtatgtgacttacaataatgtccttagatctgatgaaaacagtaacagacacttaggtactcatcctctaaattgaacatttgttatcatttactcatttgcttcagaatactgtttctaattttagataacgtagccaagctttgcagttagaaactgtctgtccgaactgcttccccttttgttaaaggtttttttaaaaaattgtttgagtgggccgggcgcagtggctcatgcctgtaatcctagcactttgggaggccgaggcgggcggatcacgaggtcaggagattgagaccatcctggctaacatggtgaaaccccgtctctactaaaaatacaaaaaaaattagccgggcatggtggcgggtgcctgtagtaccagctactcgggagactgaagcaggagaatggcatgaacctgggaggcggagcttgtagtgagccgagattgcgtcactgcactccagcctgggcgacagagtgagactgtctcaaaaaaaaaaaaaaaaaaaaattgtgcgagtattaaaattggatcatttggttcttttcttgtctgacttgattaatttattgaaatgaaatctgatggtttttcacttacagctttgtggattatggcagccaaatgggaaatggaagatcgattgtcttcagaaagcgcaaggcaactatttcttcgcgcactgcgctttcatccagagtgcccaaaactttataaagaagtgagtgtgtatgcacataggatgagacagtgatgtttcagtttggtcctctggagacatatttttttttcctggattcaagcaattcttacgcctcagcctcccgagtagctgggattacaggtgcccgccaccatacctggctattttttttgtatttttagtagaggcggggttttgccatgttggccaggctggtttcactttttttttttgagacagtcttgctctgttgcccaggctggagtgcagtggcacggtctcggctcactgcaagctctgcctcctgggttcacaccattctcctgcctcagccttccgagtagctgggactacaggtgcctgccaccatgcctggctaaatttttgtattttttattagggatggggttttaccatgttagccaggatgatctcgatttcctgacctggtcatccgcccgcctccacctcccaaagtgctgggattacaggcgtgagccactgcgcccggcccatgtattctttattaaataaaaaaggcttcaatttatggaggctaggaataagtgtggaggtgtgggtaaggacaaacatcttttttattttttgagatggagtctcgttctgtttcccaggctggagtgtagtggcccggtcttggctcattgcaacctttacctcctgggttcaagcaattctcctgcctcagcctcctgagtaggtgggatcccacgtccggctaatttttgtatttttagtagagatggagtttcgccctgttgggcaggctggtctcaaactcccgaactcaggtgatctgcctgcctcagcctctgaaagtggtgggattacaggtgtgaaccaccatgcccggccagggaaaaacatctttttgtaggtgttgacactgcagcttctaagttagttgagaggttggaacccccgcctccttcctgtggttggaaggaatagggaactagactctaacatttttttagctgggagccagatttagcctctttatacttttgtttttatttttttttcttgttcccttggttctccaaagaagccctcttctggcttctttgccttgtcttcctcttttctccatgttctttctgtctccttttcttgagatagatacctggtagtacttcctttctctcttcggggacttactcccttatggatggtgccttagaacatttgagggccaagctttagataaaatcccaaataagagaaagaatgtattggaagctgcactgttttctgagt

SEQ ID NO: 17717 - DNA, 2300 bp, Homo sapien
atttttagtggagacggggtttctccatgttggccacgctggtcttgaattcctgacctcaggttatccgtggcctcggcctcccaaagtgctgtgatgacaggtgtgagccacagtgcctggccagcgaggctcggtcttaaaaagaacaacaaaacaaaacaaaacaatataaaggaggagcgtatttatagttagtttgatttaaaaattgggcgggcgcgttggctcacgcctggagtcccagcactttgggatgctgaggcgggtggatcatgaggtcaggagattgagaccatcctggccaacatgatgaaaacctgtatgtacgaaaaacacaaaaattaattgggtgtggtggcacgtgcctgtagtcccagctactcgggcggctgaggcaggagaatcctttgaaccaggggagtcgaggttgtggtgagccgagatcgcgccactgcactccagcctggtgacagagcgagactctgtctctaaataaataaataaaataaaataaaataaaaatcatggttaatttatgaaggtctctatcaaatttactttgaaatgattacagtctgtcataacttgctgacttccttgtacctaaagaaatttagcaagtaccttttcttagtgtcatgcatttattaactgagtacttattatatggtaggcactgctataagctgtagagtatctagccagtcaaaaaggaaaaaattccctgcccatatggagtttactatctagtgtcatctccactcttactgttaacacagccccagagattttacttttacaaataaattctatctttgtcttacattcgtgatttccttccacttctgacatgtcttacagctgaaggattcaagaaatggtgtagcacaagccaaccctcgtctcagttctgagatgagtgggtaaaatgtgaaaggaaagaaagaaatgcaaggcacagaggtggaacatggttttgctgagcccattctcctttcataaatcacacacaggatccaggtgctaatgtgaatgttgaaataagcagatttagcaagaactgctgctttggcttttttatatccagaactaaaaaagaactgaaccatgtagttatcatttgaggtttactaactataccagcaatattgcctccaagctgtgttgcctggtgtttctcttagaaatgctaagttgcttgggcaatggtttaaggagggtgtctataccttagtgatttattttggtaattctcaaacttttcaatacaaaaatctccttttctaaaaagaatttatagtgtctgatattcacctagggacatatattttgaaagctattgcttacaaagacaggatattgatttaaataataaacaattctattttatttatttatttatttagagacggagtttcactcttgttgcccaagctggagtgcaatggcgcgatctcggcctcccaggttcaagcgattctcctgcctcagcctcccgagtagctgggattacaggcgcgtgccagcacgcccagttaatttttttgcatttttagtagaaacggggtttcatcatgttagccaggatggtctcgaactcctgacttcaggtgatctgcccgcctcggcctcctaaactgctgggattacaggcatgagccaccgcgaccggctttcaaaaatgtttaattgtacaatatcctcctcctttgcttttttttttgttgttgttcttggtgttgggaagtcaggacgtgggatgggagacaatattctgaagaaaatgcatctcgtgtccctttcaggcttgagcagcccacctctctacacctggaggcgcttttcctgatggctgtccaagtctagcggcgcgcgcacttaacccctccctcccgtctagccccgcccctcaactcctgtccgctagagtcgtcctgcccaagaccagggcgggttctcgctgcaatcccacaatcggccacagggaggggacggtggctgtagaagccgaagggccttcccctaagtaggaggtggcggaagcggaaaaggcgggacctagggagcacgttacgtccggacgcgtcggtggtagggctgggtctccgaacctgaaaccgggagcttcctgctcgtgttcgctgttgagaagctacccgcggggttgtagacctcggacctcatggcagagataattcaggaacgcatagaagatcggctcccggaattggaacagctggagcgcattggactgttcagtcatgcggagattaagtgagagagggttggggagaggg

SEQ ID NO: 17718 - DNA, 2300 bp, Homo sapien
caggagaatcacttgaacccgggaggctgaggttgcggtgagccgagattgtgccactgcactctagcctgagccacagagtgaggctccatctcaaaacaacaacaacaacaataacaacaaacaaaactctttatttttctggcatgatagtgaagcatgagggctccagagacactgcctgggttaaaaatcccggtttgtgcaagcttcttaacaagtcttgctgttatttcctcatctatgaaatggagatattaataaatgtctacctcagaggattggtgtgagaattgaatgttaagcttgtaaaaacttaaagtattgcctggcacatagtaagcactcagtcattattatcctaatttatatttgtgcgctggtgtccaactttattcatcaagactcattggatgaatcctgattctatgccaggcacagtgatagacacctcagctaccaaagcatccatcatccgtgccccaagagcttaacagtaaagtagaaagaaaaagacttgctgctataacacaaaggttcttaacttgaacaggcttcaggaagtctgagaacttgaatgacaaaaaatatatatatttatttacactaacctctagctagaatttagcatctccttcaactactaataggtgacaaatcatagtagtgttagcagtgcctgtggctttgttaccaagagaacttactggtatttctctcgggaggccaaggttgcagtgagccaagatcgcgcccttgcactccagcctgggtgacagagcgagaatccgtctcaaaaaaaaaaaagactacagaggatagtgtaacaaacaagaggggattctgaactttttgtctgaatataaaatatagcttgtccttaacaacaggcattccttatttcaggtaagaaggtatacctaatttcagatgtgttcctgaaatgccaaatactatatacgtcatttgcagagatcactttcttaagtagcaaaggctttgataaaacctgtactttaggtatttaatcattacaaagataactagttttgtaaacaacttgaataaccattccagagacacttgttttgtaaacagtgttttgcagttaactatagagaacccaagtagacatttaaaaaatgctgtttagagtatgaaatggttctatgtttataggttgggatttttgaaattttaacgtaatataaaaattggaagaacatccttagagatcatcttgtccaacctgaaattcaaatcattagctcaactccaaaccaatctgtgccagaagactgaaatgggcctatgtgtctatcgttcaaagcaagacctggccaggcgcggtggctcacgcctgtaatcccagcactttgggaagccgaggcaggtggatcacgaggtcaggagatcgagaccagcctggccaaaatggtgaaaccctgtctctactaaaaacacaaaaaattagccaggcgtggtggcgagcgcctgtaatcccagctactctggaggctgaggcaggagaatcgcttcaacccgggaggcgcaggttgtagggagacgaagtcgcgccactggcactccagcctgggcgacagagggaggctccgtctcaaaaaaaaaaaaaagcaagactcgcaaaacaccggattccttctcagctttctgagctgaaaaggtatagatcctaaagaagagaagagtgtatgtaagtacttctcaaccagtttacctctctgaccactcttacggtgtttgggggcaacaaactaaggatctagactcgctaaaccgctcgctgggtccttctctccccacaatgcaccggggccagcaggaaggccgctccgacccctaattttcccgcgaattcagttcaaagaggcggccgggcccgcgatcggcagcgcgcacgggccaaccaagccgcgcctccgcgagaagcgcctccgcgtgactgacgggggaatccgcgggccaacgggctgggcggcccggcggtgcgcgctcccgccggccaatcagagcgccgggcgggggaagtgggcggagcgaggccagggtagggtgagcggcctccgaagcggagcggggctctgaggagacactttttttttcctccctccttccctcctctcctcctcccttcccttcccctctcctcccctctctcctccttcccccctcggtccgccggagcctgctggggcgagcggttggtattgcaggcgcttgctctccggggccgcccggcgggtagctggcggggggaggaggcaggaaccgcgatggcg

SEQ ID NO: 17719 - DNA, 2300 bp, Homo sapien
ccctaaattttttgtaagccaagatattctagatagtaaataatatcttgatttttgttatcccatttaaactgtagagaaattctggggaaagcatctaaaaatagctctgatagctctgtctctacgttttataatgtttaatgttttttgaaatccattttttatccttttggccacaagtcttggtcagatcaagaactttttagtttagttgtctctgtgcattcataatgaaacatgtataatggtaactgatttaattcaaatgttatcttaatactttttctagtagattttaggagaagaaaaaaattgaagatgcttattttgaatgtggttgtctcctgcaacttttttttttttttttttttttggagatggagtttcgctcttgttgcccaggctggagtgcaatggtgtgatctcagcttactgcaacctctgctccccaacccctggttcaagcagttctgcctcagcctcccaagtagctgagattacaggcatgcaccaccatgcctggctgatgttgtatttttagtagagacggggtttctccgtgttggtcaggctggtctcaaactcccggcctcaggtgatccacctgcctcggcctccctaagtgctgcgattataggcgtgagccaccacacctggccctcctgcaactgttttcatttatgctttctgccaagaagctttaactgtatttgtcaaaattacttttgactagcagtgtattatcataaatgttaaatcttcaagccggcccagttgcatgtgcctgtagtctcagctacttaggaggcttaaaatgggagaatcacttgagcccagaagtttgagaccagcctgggcaacatagccagacccttgtctgaaaaacaaacaaaaatattaaatcttcaaattagaaatattcagtaaatatggccgggtgtggtggctcacacctgtaatcccagcattttgggaggccaaggcaggtggatcacttgaggtcaggagttcaagaccagcctagccaacatggtgaaaccccatctctacttaaaattaaaaaaatcagctgggtgtcctggtgcgcacctgtagtcccagatacttgggaagctgaggtgggaggatcactttaacccgggaggcagaagttgcagtgaaccaagatcgccctactgcactccaacctggttgacagaacgagtctctgtctcgaaaaggaattaggaaatatatatatgtgtatatatatgtatgtatgtgtatatatatgtgtatatatatatatgtgtatgtatgtgtgtttgtgtgtgtatatatatatatatatatataaatagaaatgtgtagatgtgttttagagacaggatctcactccttcgcccagactagagggcagtgacaggatcatagctcactgcagccttgaactccttggctcaagagatccttccacctagcctctgaggtagctaggactacaggcacatgacacccaccacacccagctaattttttcacattttgtagagacgaggtttctgtgttgcgcaggctggtcttgaactcttggccttaagtgatattcttgccttggcctcccaaagtgttgggattacaggcatgagccactatgcctggccagtgaatattttttatacttacaacctgggcatggtggctcacgcctgtaatcccaggtactcaggaggctgccgtgctgatgtgtgaggatcacttgatcccaggagcttgtgattgcagtgagctgtgattgtgccactgcactgtaccttgggcaacagagcaaaacctatatctaatggaaaaaaaaattacagcatataggacggtaattatatttgttttgtgagtggtttatttacactatatataaaggcttttaaagagtttgctgtaagtttggaactgatttgaggaaaaaagaatgagtgaacttttgagaagtcttactgtgggaaatctctgtttgaagttccctgacttgttagcaaaatgaataccttgttcatatattttttaaatatattttaaaatactgattttctatttagataagccatcaccaaactcagaaaatgaacaaaattctgttaccctggaagtcctgcttgtgaaagtttgccacaaaaaaagaaaggtaatgtcaacaaaatgatattggtagattaaatggaataatttgcttaattggacatctttatgcatatatattgtattttaaagcttagttttaaattttgaaagcttaagaaatgtgttgatggcctaattat

SEQ ID NO: 17720 - DNA, 2300 bp, Homo sapien
ccctacacaggcataccatttttatctttgttgttgttgttgttatggagtctcactctgtggcccaggctggagtgcgatggcacgatctcagctcactgcaacctctacctcctgggttcaagtgattctcctacctcagcctcctgagtagctgggattataggcacgcaccaccatactcagctgatttttgtatttttaggagagactgtttttcgccatgttggccagactggtctcgaactcctgacctcaggtgatccacccacctctgcatcccaaagtgctgggattacaggtgcgagccgctgcgcctgggccccattgttatcatttatacagtattttaactacaccttttccatgtttatatacacaaatacctgccattgtgttacagttgcctttaatattcagtacagtaacatacagtacaggtttgtagcctaggctataccgcatagcctaggtatgctgtaggctacaccacctatgtttgtgtaagtatacactatgatgttagcacaatggtgaaatcacctgacacatttctcaagctcttcacatggcaagcaatgcatgactgcatatgaaagctcttaaatagggattaaatttctaaattaatctcaaaagaaaacagtaattatttactatttatggatttttttttaaaaagggagcaaaagtttcatttcaatgggaacttaatttggggctagagtgttttatttaactttcactccaaagttgcaaagtgttttgaagtttttccctgtaaaataattattttaattcaatttaaatcaaacccaccaaggaaacttccagctttaagaagtctagcttcctgtgaaatgtgagaggaagttagcactgatttcagaaatctgattataacaatagatccatccctaaatgaggcgaatcttggaatcccttcaattttattttatttttttgagacggagtttctctcttgttgcccaggctggagggcaatgttgcgatctcggctcactgcaacctctgcctcccagattcaagggattctcctgcctcctgagtagctgggattacaggcatgcaccaccacgcctggctaattttgtatttttagtagagacggagtttcagcatgttgatcaggctggtctggaacttctgacctcagtgatccacccacctcggcctcccagagttctgggattatgggtgtgagccactgtgcacagccccccttcaattttaaaaccatcactatgcaccccgtgcctgtgctaggcactggaagaagatgaagctccttcttggggtttacatgctgataattgtgccagacagtaataaaataggtaagggctgtgggggaagtcagctgggttctagttatagtcgcatttcaggaaatgatttaacatgctgactttaacaacctaagcctcttctccatgtgtgcacacagggtagatctctgaagggtggcgctgtaacttcgagggtaatggctgtgttgagttaaggcaggatgacagttcagcctcctcccaggctggtgcaaagggctgttccctcggattgaagccttctctcccagactgaattgcccacccccaacacccctcctacagaaaatctggagtcctcgcttattccctggcagcccctacctaatagggtggtgaattaattatcaaacatgcgacagtttagcgaaaacggcaacattttggaataaatgactgtaacgcgcgtcctgcctgccaccctaactggcgcccattttgcaggtcagttgctctcccctgaaggaagagtattctcggatttcacctcagaggaggaagaattcaggctgccagaactggactagcacttctgaagatcccaaggccaggtcccgtgacttccttgggaagctctgccgtgcccccaccccaccccaccccaccacagcaggccgctggagtcctgggaccaccccggtctgcggcccaaatccttcctcactaaggggaggggaggggtgttccggcctggcggggtgggaaggggcgcttgggcgggattgtgacataaggttgccctggtaacatggaacagatctggacccaagcctaataaaggtgacataaataaaggtgtcataaagacagggcatggcacacgcttataaggggcatgagcatctcagggctgccagaatggcttttgctgagtgcatagcaccagcgtgtgtcatgtcttggctgcgtttctggggcccatggcccctccttacgtggcaactattgtct

SEQ ID NO: 17721 - DNA, 2300 bp, Homo sapien
tcacagccttcacttggtagagaggaaactgaggcacaactaggtgacatgagttgcctagagtcatgcactaggaatggcagagcaaagctcagcctcagccatgccgtctgtgccaggtcattgcgtctctgtgggccttgcttttttttttttatctacagagtaacgggattggaataggagctctgtcagggttcttccaactcaaacattttgtaacactaaaattctgagggctacttttccctgaaagatcaggtaaccaagcctcctgaatttcacatttccactcattgaggtgtggggggaggagggagatgaaagcaccttatttacatctacccaggaacgcgacttcattatctctcagtgaacaaggagtatgtctttcccatctccctctttttcctaacacggacagggatagagttgtttttgaaagggctttctcccctgtgctccttatggacatcaaataactaagatggtgaaattctgcagtaaacacaacaacatatttgcctcaaaacctgtggattaggctgggcgcggtggctcacgcctgtaatcccagcactttgggaggccaaggcaggcggatcacgacgtcaggagatcgagaccatcctggctaacacggtgaaaccccgtctccactaaaaatacaaaaaaaaaaaaaaaaaaattagccgggcgtggtggcggacgcctgtagtcccagctactcgggaggctgaggcaggagaatggcgtgaacccaggaggcggagcttgcagtgagccgagattgcgccactgcactccagcctgggcgacagagcgagactccgtctcaaaacaaaaccaaaacaaaacaaaaaatctgtggattacaactttttagtgactttttaatataataatgatagctgagatcagtagagcacacgctctgagtctggcactgtaccaaatgcttgacaagtattatagtatttattactcacaaccatctcaagaggaaggtattatcatcattatttccatgctacagaagaaggaacagtggctgagggaagtaaaaataaaagcacttagtcgagatcacagagctattatgtggagcctagattcaaacccaggaaatttgccagcaactcttaactgctgcaagagaccacatgacttctcctaggagaaagggaagttggtattacgcacatttcattccctttaagtgtttattgtgtaatatttaagatagaaaaaatgtacattatgcacagatagtgcttcctcattaatttatgtattttatatttcccactgtgtgccaagtattagggatgtgatatatattcgcacgcgtatgtatatatatatatttgccattgtgtaccaaacattaagcatgtaacaacaaattcctccagatggagagggtcacgagaaaattaaggcaatgttagaaaaatcatctagagtttattatcgagtgccacctccgtgtctagcattacgctgggtaagcctgagtaaagaagagtgtccgaaaaccctgccataaaataaactacatagacagaaaaaaagtcacttagtttggttataaagaaaggagtcttgttcacacagcgtaaaaacgaatcttataatcgtattttataagcatcagaggcaaaagcaactagggtgacgggctttggggagtggaaagcgccggatcctgggagccagtcgccctactcgatcaagcattttctgacggccctatccaataacgtggggacgcagctgaaaaccatgcaagctgatcgctgccctcccggagtttatggtctggtgagaagatccctgctctgagtcactgccaagctctagctatgtgactttgaacagggaatttctgtccctatctataaaataaacggggttaaaccagggaatccgccattcaaattcctggcccaagtgtctccggggtcgcggtgcccaaaggagggtgggcgaggctccctgggcctgcgctgcggcggcctgacagcgggagcgctgttccggcgcagagcgcgttcgcgttccgaaagcgcgtgtccctcgccgcgtgccgtcgtccccgccgccgccgccgccgccgccgccgccgccgccgccgccgccgccgccacagcccgctgggccggaggaggcggagctggcgctgtcccggctctcttgcggggaagcaactgagggggcggcgcggcgggccccggcggccgaagaggctggcaggtggcgccgtggggtgggtgctcctggtgagaggagtccactcc

SEQ ID NO: 17722 - DNA, 2300 bp, Homo sapien
tcagtgaaatgtgacctgtggtcagccatttgaaaaaggcctaaaccttcttacacaagtcaattgaaaaggcctgtagaaatcagagctcgaagacacctgttaaatcatctgatctatccctctaccagcggtactcggttgttcatagccctctctaagctgttttcactctccttcctgtgttccagacattcattattttcccagagactggacttgtgttcacccttttaatcatttaagaagggaatgtgacttttcttaactcaaaaaatttcatttattttatatttagactttaattttggaaactgttgataatggcagagattagtaagcatgtggactgttttcctctagattcacaaaaggatttagttgatgaatgtctaacaatagtaattatatgatcagaaagtgacgggaatacaagtcaaatttcataataaaagttaagattttaaagtttgtgtataaaaaaattgctagaatagaaaatgtaataggagactttctttgcttttaccttgttactaaccctttaaatatgatgctctatggaagaaagaatgtagagatgcagagaaatgagcattctgatattctgtttatgaggatgtaaattggtttattcgtttttggagataatttaacaacatcagttaaaaataaaaaagatcttgtgcactaacttgagttctacttctaggaatttattctgtagaaatactaattgttgcattgtttataaaagtgaaaacttagggccaggtgtggtggctcacacctgtaatcccagcactttgcgaagctgaggcaggtggattgcttgagtcaaggagtttgagaccatcctgggcgacatgacgaaaccctgtccctattaaaaatacaaaaaaaattagctggttgtagtggcatctgcctgtagtcccagctactcgggaggctgaggtgggagaatcacccaagcctggggaggttgaggctgcagtgagccaaaaaaatcacaccactgcactccagcttgggcaatcagagtgggaccctgaatcaaaaaaaaaaagttaaaacttggaaaccattccaatgttccttgttaagagtttattttaataaattataatacatcatgcagtggattctaatacaactatcaaaaataatgcaggatggctgggcgcggtagctcacgcctgtaatcccagcactttgggaggccgaggcaggtagatcacctgaggtcaggggttcgagaccagcctggccaacatggggaaaccctgtctctactaaaaatacaaaaattagctggacgtggtgacacatgcctataatcccagctactttggaggctaaggcacgagaatcgcatgaacccaggtggtggggattgcagtgagccaagattgcgccactgcactctagcctaggcaacggagtgagactccatctcacaaaaaaaaagagatttaaaaaaatattaatataaaatgggtttattattgctgcttttaaaaattggttaaaatacatgtaacaattattttaactgtaagtatacaattcagcagcattaaatttattcataatgttgtgtaaccatcaccactatctgtacttaaaacttttttattatcctcaacaaaaactatgtacccattaaccagtaacttttgtcttctcttctaggagtttttatgtactgacatgaaatactgcccaaatgcataattaagtgataaaggaaaattgcaaagtagtgtgataactatgattccattgtggtaaaatattgcaagttaatataagtataggaaaaatctgggagaatattaaaatgttagtagaggatgttaggagggatttgtacttttacagaatatattttggcaagtttttaaaaaagagtatgtgtgacttttctaaacataaagatatacttttaagtattatactaaaacttaataatttggatgccttagattttagctaatgagtaacagactgccttatgtggttgccaaatttgagcttatgtagaacctaacactttattaaagtaacgatttttcttttcacagctagagttgggaagacatcactgattatgtctctggtcagtgaagaatttccagaagaggtaaacattttgatttccatatttaaattttaaaaaatttatcaaaatcaaattaaaatgaactgaattctgtctcttttggcatgtgttatgtgcttccttttggacagttgagacttttttttctcccttctttagagacagggtctcactc

SEQ ID NO: 17723 - DNA, 2300 bp, Homo sapien
actcaggtaatgaatatcctcttgtagatgaaggtgtaggttaatttaatagacttgaaaaaagatacttactgagcttttacaaatgttcagagaggtggtcttttctctgtagcagtaaatgatcctttacgattcttatctcatttatgtctgtcaacctctaccctataccccacccagtgcctccatctgacagttcttcgtccccagattactaagttgggttccataatacctgtggctgttgaacacttgaaatgtgactgttctaaatgaaaatgtgctgttaattgtaaaatataactggattttgaagacttagtatgaaaaaaggatgtaaaatatgtcattaatttttctattgagtacatgttgaaatttaaatacttttgatattttgggttaaatgaaaatttaattttaccttttttacttacctttttaaaggttgctactaaaaaattgaaaactatgtatgtggcttgcattatctgtatgttggacagcactgtactgaaagctgagggaggtgaatgacttctgctacaatcagtctcataactagatttatttacagaattattcttcaatatgtgtagccatataattagattcacctcagtattagaattgaagccttaacccattgattacttaacatatggaaagatattaaaaatatggcctgttatttagcatagtataaaataccattgaattcatgtatgatattagtttatatgtcagaagtaacaggcatttttaggggaagatatatgtaacctaaggtggtctaaatcagtatgccagtaattgctttgctcttcaattatttgctttctatcctagctatatcattcatatccctgcatgcgtggaattgcaggcacacccacccattgagaccagttctagctaaagatacatgctagagagggaattctcatcacttcattatcaagctacagttttgcctctgggtcttggttattattactcccacctgctatctagatcttaagcttgtattacccagaatctcacctgccttttgatcctgtgtgtatagactctttgtccgagcttctgactcttcagcacccagtctgctagcttggatttctgaagtcctttgcctgacccttttcaactctggaccagatgctggcctagatttattacacaatgcttctgctgttccatgcctgagttatccttttatagactcgtctttcagggccagctgccttatcgtagttgaaccttttccttcccctggctttcccttgtgtttgctacaccatgtcattttgagggatgttagatgagtgttgcatagaatttagcttggccattagtttttatgaaagtgtctgcaatatgaaacattgacttcctgtcatttgtagaagcagaacagagtgatgaacaacttcatcaagaaatatctcaggtgagctttaaaaaacagaggtgtggggttttgtgtagaaaaacagtgatgattttatgagcctgcctttttcattctctttgtttgttggtttttgtgttttttttgggaccgtgtttcactctgtcacccactctgtcacccagtgcagtggcgcaattttgccttatcgcaacctccatctcgcaggctcaagcgattctcatgcctcagcctcccaagtagctgggattacaggcatgcaccaccatgcccagctaatttttgtattttagtagagatggggttttgccatgttaaccaggctagtctcaaactcctgccctcaagtgatacaccccgtccctttttcattctcttaattaccaaaagttcttttgcagttctttattgttatggctgttactgagtatgtgtttttgctttaagtccttaggaacattttctcttagaggcaagctaattctttttttgtttttttgttttagctgttaaattttttcttcctttcacccgaatatattaataagttgctaattaagtgctgtctatgtttttattatttttagatacgattaatttgttaatttttcttctaggctaatgtcatctgtatagtgtatgccgttaacaacaagcattctattgataaggtaggtgtgatctttttttccctatagttggtttcagtggagtgcttccaaagttgattctcagtttagaattttaggggtctaagggaagagtgttttgtaaagatccttatcatggctaagcgcttgttaattttcattttaggtaacaagtcgatggattcctctcataaatgaaagaacagacaaag

SEQ ID NO: 17724 - DNA, 2300 bp, Homo sapien
gttttgctaagatctatcaatctatcaagcaccagcttggaccactgaattaaacaattttggctttaccatgacagcttcccaagtagctgggactgcaagtgcgtgccatcacacctggctaatttttaaaaaacttttgtagaaacagggtctcactatgttatccaggatagttttgagctcctggtctcaagcagtccttccgccttggcctcccaaagtgctgaaattacaggcgtgagccactgatgcacacctttggttacaaaccactacatttttggaaaccctcctggttctggtaggaatttatatttgggctatatggtggtcggtcttttcaagcataatggcacaccaagggttaggtaagctaaatgctttcaagtgcttctcttgcagtctagagttccagcaggatgatttgctttccctccaagctctcttgcaggattcacaacagttctccactaggttggtcctccttaatatccccattaagatttttccccacagacttatcagatttaacttgtctaaaagaaaatctttaattccctgcctactcgctgccaaaaacagaaacaaaaaatcattcttaatcttctgtatcttctgagatctacccatttttttccagccaaaacctaaatatttttcttggtttctgcttttccctcaatcttcacatctaacctatcagctgtttctgtcttataaaatatatctgaaatttgaatattttccttttcatctttactgtcactgtcactagtccaagttactattatattttttaaaattttcactaagaaatttttaaaaatttgttagtgatagtgaaaaaatgtaacatatactgaggtacatacctgttatccagcttcaacaattaactcatggccagtcttgtttcatctattacccctcccattgagatcattttgaagcaaatagagacattattttcatgctgtatttcagtatgtagctctaaaaatcactgcatttaaaaatgttaacccccttcttagaatcattcaatgacttcccattttacactaacaataaaacctacactccttactgcagcttgtaagtccttatgtgtctgacctttgatcctctttctaaccccattttatacctttttctctttactcagtactctgtagccattctggcattttcctgttgtttggccccatcaggatgttttttcagtttggggcctttgcacatgctgttccttcctcctcgcttgctcttccctgactctacatggcagatttcatcttatccttcaccccttggctcaaatgtcacctttacatagggagttttccttaattactatacataactagctccttcccactactctatccccctatttatttcctgcatagtacttactgaattggaaattattttatttgcttattgctcattttctgtttttcactattggaatgatcaggtttatagatctgcccaggcatagtagctcatacctatcatcccaacactttgggaggccagaagtttgagactagcctaggcaatatagctagacccttctctacaaaaaaaaaaaatttttttttaatttgctggatgtggtggcttgtgcctatagtcctagctactagggaggctagggcaagtggatcacttgagcataggaatttgaggttgcagtgagctgtgatcctgccactgcactccagcctggacaacagagctagaccctgtctcaagaaaacaaaaaacaaaacagaatgggtaggaccttctgtcttgtgtccttaatacttaaagcagtatgtggcttataataggtgctcaatagataacatgttgagtaaatacgtgctatctagggggctcaacctgactgtagagaaaggttcatgttgttgagaagattaaataaaagctttttagttagaatgggttatgatataaattaaaatataaatttaatgtcttttgccttccttattacaatgtgccctgtttattttaggctgcctttaatattggttgggaacaaatctgatctggtggaatatagtagtatggagaccatccttcctattatgaaccagtatacagaaatagaaacctgtgtggaggtatgccttgtaatttgatttgaaaatttatttttaatgaattcttactaaattcgggttttaaataggggggacaatgtgggatggaataaatttcctgctatttgtgaagtcacgtaaaccaaataaaacagagaagttggagttggcctctgaact

SEQ ID NO: 17725 - DNA, 2300 bp, Homo sapien
tgactgtcacccccaattatccatttctggagggcagggtctggttcttatccacctctgtattctcaaagctctgtcattggtacttagtaggagcttaatacatgttcaggaacagaactgagcctgctaagctcccttccccacgaagggatgacagagttggatatgttgataagagctgtccctgggctgatgaagaggcagctccctgggtagctggtatcagaacactgtccagggtggctgggcatcccagcagagtggccaacccttttctgtgcccttctccttccagttcccctggaaccagacttcctggcccacttctctagtcccagagatctaagtataacagagccaacacccataccggtcatgcaaatgacagcctgggatgcgggaggcagcgacacagaccccagggccccagcggtcatttgtccttctgggctcctcttcacaaaggaatcagcctctcttctgtcccctgaaggctgttttcaaaatcacaccccatgcagacagttttatttacaaggaaatcttggcaggatcttgacttgttagtagagtagggatggggaggagggtggtgagaaacaaaaatagttgaaatgatcacactttctgaaacagagatgaaaattggtgtctgtagcaaactcacctaattagaatcaagtgaattcccttctcggtgtttaaggggagcagtcattgctgggtgatggtcgcagttcggatcctgggcacggggttatgtctttgctttctgaagatgactgcattagttgcagctctcactaatggaaaggagcctgttccgtttcccagaggaaggaagagggcaaagactagtgagtgagtgggtggtgggaagaggaaagcaagaggagtggaagggcacagccttggtgtgggctggggactgactgcgagatgcctcctggagaagctcctgagcctctggggagagctggcccctgccaggccggccactagcaccatttacagccagagcctctgcttcgggagatggtctctcttgggggcgctttcctgcagggaaacagcatcgattgttttctttaaaagatcccctactccgttttggctaacttcctttctgattgctttagtttctttaccgtccctctccccagatggggcatttccctgggcttacctttgtccatgtggtcaaatgaagcctgggcatggtcacttagctctgggtgtaggaagggcaagatttaggctttggggcccacgaccccgcaatctgacttctcccatttctgggcctcccgagacctcccagaatctgagaccgcagtgaatagggcgtaaggataatggggcgggaggcaggaatcccgtccttacaacatcgcgcccccaattcactcctagttaaccctgacgtcgccaacatagtgtctccatcacatatctgccacctccaagtgatggttaagccgatggaagagccaagcccgggcccggagtgcaggccggtggtgaccgggccggggacggcgcagtccccatccccgccccgggcagcgccaccacttcctcgccagccccgccgcagccctcccgctcccgggccgcgccgctctgaccgactgggcccgggtggcggcgcccggggtggggtgcggggcgggggccggcgttccccgcgagcagccccgcccccgcccgcgcgccgcccccgaggactccgcggggaggaggagactcgggcgcagagcgggggccgcgagaagcgggaagggagcgcggggagcggcggggccggggccggcccaagggcgccctcgcctcggagccgggcgcgagggccggggcggaggcggaggccggcggggcagctagcgcagtgaagtttggcggcggaggggccgggcgtcccggggtcgcgaggaggcggcggcggcgcggggaccggggccatgggggcgggcgcgggctgcggagcgggcgcggaggcggcgcggcgcgcactgagcccctggagcggcgcggccgccgcggcgcaaagttagcccggcgccccgggacgagccccgcagccgccgccgcccccggaccccgtctcggccatgggcgagcaccccagcccgggccccgcggtggccgcctgcgccgaggcggagcgcatcgaggagctggaacccgaggccgaggagcggctgcccgcggcgccggaggacgtgagtgccccctccccgcccggcaaactttctagggggcgccggggggaaaagccgcccctgtctcgccccacg

SEQ ID NO: 17726 - DNA, 2300 bp, Homo sapien
gaccgactgggcccgggtggcggcgcccggggtggggtgcggggcgggggccggcgttccccgcgagcagccccgcccccgcccgcgcgccgcccccgaggactccgcggggaggaggagactcgggcgcagagcgggggccgcgagaagcgggaagggagcgcggggagcggcggggccggggccggcccaagggcgccctcgcctcggagccgggcgcgagggccggggcggaggcggaggccggcggggcagctagcgcagtgaagtttggcggcggaggggccgggcgtcccggggtcgcgaggaggcggcggcggcgcggggaccggggccatgggggcgggcgcgggctgcggagcgggcgcggaggcggcgcggcgcgcactgagcccctggagcggcgcggccgccgcggcgcaaagttagcccggcgccccgggacgagccccgcagccgccgccgcccccggaccccgtctcggccatgggcgagcaccccagcccgggccccgcggtggccgcctgcgccgaggcggagcgcatcgaggagctggaacccgaggccgaggagcggctgcccgcggcgccggaggacgtgagtgccccctccccgcccggcaaactttctagggggcgccggggggaaaagccgcccctgtctcgccccacgccgggcaacttggaggtttcagggtgacgcgggagcgccccggattggccgggtccccgcgggcaggagggggcggagggaccggtctccccgaaacgcgcgcgcaccgcttcccccgctctggttcccgcggcttccctgcgggacacagcaccgccactgcgccgcggacctgtcaccgccggagccccctccccgccgctggtgcagtgcccgggacacggcgttttcccgcagaggcggccgcgtcacggcggtgactccccctcccctcacgcccgcgacctgcgagctcccggagctggggaaggagcggacgccgcagagtccccgtccctggccatgcaagccggcctggcgaccccttcctccgctcccggattagctcccgcccggcacctgccttgccgcgacactgattgaaattcaagccggcccccgcctctgaccccggccggagcagggaggcaaagagtgctgggagcggctttgctcctagaaggaggcccgggagtccaagaccgtggcggtgccaggggacggtcccctgggcgaggagagggaggggctgccccgagggcttccccgccgtctgctgctcgggtctccatccctccggtcctgcgggccggccctgcgaagccctgggaactggagtttcttgggttaacctcccggggctaacctacacataggggtgaaaaaccgggcagacaccctgccctgcccactcctccctcagggtggggagatggaagtgaaaccaggcccccaacccacacaacgaaagcgggaaagtctgaatggggttggggggtagtttacgatcttctctctttggcgtctgcggttaaatctatcacttccttctggccctaaacccctggcagaatctgatgtagtcaccacttagactcagccttggaagagaatgggtgggcttcaccgcattcggcattcaccacccccccttccccgcaaaaaaacaaaaaacgaacaaacaaacaaaaaactgcaggcaaaatgttagtgtttatgcagaggtgagttctcctggggggggaggggggggctctagctcccagcaggtgagactcattgcgccggggtctgatggaattgcacctggccatgctctcccaggcctgggagtagctgtggacataagctttaggcagcagaaattattagaggcgcttggacatatttggacgcctttatttagtaattgttgagaatcacttgttctgccagttccagaaccagcaacacccaccttgccgcccccgcccccaccccatcccttactgtgagtttcctccctctgctcagtgtggactcattggggagctcctcccagacttcccctgctctcctgtggccagtccctgagcctggtcatgactcctgggcagccgctgggaggctatgtcagaaacatccgaggactacagagaccttggtgataagtgtgtctttctttctctcctcttcttcctctcctgcatggcctccctctctgccagcactggaaagtcctgtttgatcaggtatgtgagcagttaaccccccatttccttccagccctccctgaaatcggtctcagtctccctgcttgcgtgggcttc

SEQ ID NO: 17727 - DNA, 2300 bp, Homo sapien
agccagcctagggaggctggggcttcctctgtccaaaaggtaattaatgaggagcagcttgggcagccagccctcattgtagccctgcaatgcagccttcgaagacagccccaccaggagagcgtgggaaacctttgtcatgcagatcctgctgcctgtttgtttgccaccctgggatttttctttcctgttatatatggctgaccctgtggctaagcagtaaaaaaagcaaaagcaaaagaaagttatctgacaatagatcaatacctaattaaagccagagggaaggcatgaaagatttatagttgccctggaaggggaggaggacttgggagtcctcagttcatgacaggttttttttgtttttgtttttgtttttgagagattacatcccccttgagaccaagaattggttgtggggactctctttcttgaaggagctcagtgagtaggggaggccttgatggaggtgggggcaggggaggtggaggagtttatcagggggctctgctgccaggtccttgggtgctctggttgctgggctgggcccagcctcctcctaagtccgtggatcttgcaccctatacagcctgcagaatttggctttctgcctgtccctcctttctccagcagctaattggctcttgagcccctgggcattttccagtggtaatttctgcacactcacccaggccagccacctctcatcctctgagccctgggctctacctcctagttatttttagtctcccatgtcctcccttggaagacaaagcattgatcacacttaaatgagaccagaacaataaatttcccctcttttctttgctcagcttccctcccaggacaaaagtttgtcatcccccagaccaagcctcgcatacccttcctttcccccagagggtatgacatcatctctctctcttccccatgacttttcaaggacatgtttcctccaaaggagccccactggagagatgctgttggccttttgtgatttagctgggctggaggaagggtggacgtaaccctaagcagttttctagatgctgttgaacagagggagagatggaagaaggtggaggttaacctctgggccagtttggggcgtggctgctagagaggccaagagtgcaggctttggtcaagaacacgggtgggttttgcatcaggcagacccagatgcaaatcctggttccggcacttcctaccaggagactctgggcttagtctcctcatctcaggaatgaggctactggcgcctgcctcagagggctgtcttgaggattgaagggaagaaagtctgtaaaatgtttgcttggtatccgtgtcacctaggtggcagctgtttcttcaataactactgctactatttttgttatggttccagaaccctgacatagcaccatgtcaggcagacattggattgagaggcagataatccaggtagaagtctgaattttactttgggcaggacacttccctctttgagtcaaagaatcaaatggttctttcagccagaaattaatcctctaagaaatgcactggaggcagggctctgtggctcacacctgtaaccccagaactttggaaggctgaggcaagaggattgcttgagtccaggaatttgagaccagcctgggcaacatagtaagactctgtctctactaagaaaaatacaaaaattagctgggcattgtggcgcacgactgtagttccagctacttgggaagctggggcaggaggatcacttgagcccgggggtcaaggctgtagtgagctgatcgtgccactgcactccagcctaagtgacagagttagaccttgtctcaaaaagaaagaaagaaagaaaaggaaaggaaggaagggagggagggagggagagggaggggaggggaggggaatctccctggcaacatggactcaaaggaggaagaggtggagcgtcttgctctggagtcttagcacggagcctgcagaatccaaggcctggggctgggttgggtgagccgagtcccgcactcctgagaattctcgctgtctttctgtactagggtccttggcagtgtctgtggctgacatgaccgctccagtcgtgggctcttctggaggggtgtatgctctcgtctctgcccatctggccaacattgtcatggtgagcacctcccgttctcaatgtgtctttctggccctgtcctctgccatcactgggcctgagtattaatccactggggctggctcaccaaaaaccaggcagacctgacctggagcagagttctcacacactcctcaccctctgc

SEQ ID NO: 17728 - DNA, 2300 bp, Homo sapien
tgtcagcacttcgggaggatggggcagaaggatcacttgagcccaggagttcaagaccagcctgagcaacaaagtgatacactgtctctataaaaaataaaaatacagctgtttcctgagtgagatttggctttcagtctgggcaaatgaagaccattttgcggttaaatgggctcttttttctcaattccttgatatggacctgtgctggggactggtcggctattcaagtacaatgcacccagttttggttctgtgccaggattaaacccacgatatttcacaatttgtatatgaaccccgatgaagtgtttctaggagatggctgccttgtaacctagttttgccaaatatctactatgagtttttctaccatcctcatgactgtggtaactcaacctctccaggaagttcttctgcttaaaactaaaatcaagtatatctcaagagactactgccgatctgaaatgcctctgtcatgtgttgtccgcaatcagaatcctcttttaaatgtagttgaaatgagagataaggaaactgacaatgttactgaatgggagatagaggtgaggatacccattgcgaatgaagacatggcagtaacttctgcaatacaatcttttaagaatctgactgctatactcacttgttcatcaaatgagtacctttattgcaagagaagaaactgtgctatccactttgatatggagaggcaatttggaatctctgccataattgcttaggactgaggatttaatgtgctattttgtgaaaatctgagaagcaggaaggggatttaacgatctcaactgttatccatctgaaaaacctaacttgtaattttaaatgaaatggcaggttgccttccactattcctttttaaaaataggaactgcccctgcttttaactttatgaagttttatttatgaataaagtttgcactactaaaaataaaaaaaaaaaacacaaaacacacgcatgcacacacacacggtggcttaaaacaatggaaatgtattatttcacagttctggaggctggaagttgacatggaggtgctggtggggacatactctcttgaagcctctaggggagaatctgttccatgtcctctcctagcttctggtgatgaccatcaatccttgacattccttggtttgtagatacatcactccagtctgcctcctccttcacgtggcgctatggtttgagtgtttgtccactcccaaattcatgttgaaatgtaattgccattgtaagactattaagaagtggggcctttaagagctaattataaattgcccagtctttggtatccttttatagcatcataaaatggactgagacagaaaactggtaccagagaatggggtgttgcagaaacaaacacctgaaaatgtgaattggtgttagaactgggtaatgggcagagactggaagggtagctggcattacaggcgtgaaccaccacacgtggctaatttttttgtacttttagtagagacacagtttcaccatgttgcccaggctggtcttgaacttctgacctcaagtgatccgcctgcgtcggtctcccaaagcactggaattacaggcgtgagccaccgtgcccggccttttagtttttacgtagtcatttttttaaacgttttcctgtatgacttctaagtgttttgttatgtttggaaagaccctcttcaagaattaacaaaattatcccatattttcactttaacaaaattcattttaaattcttaactttttgatcaaacgggtgtctgtgcgtgctggcacgcgcgcaaggaggcagacgagtagccttattcttttccatgtggctaggtagttgtgccacctttatcacatagaaagtttcccagatgtctcaaaggaaaataagttcaaaataaatggtaaaagcttgtcagtaaaggcgaactcagtacgcctgtcagcccctgtggggagaagagactccctttccaggccagtccttgcctgcgaacccggggaaaccagcggaacgcaggtgtgcgagggccgggagccggacgagccctgataccgacggctgcacgggagcaggggagcggtttggcggagacacagggccgctcagaggccgccgcaatgctcccctctttgcaggagtcgatggatggagatgaaaaggaactagagagcagcgaagagggaggctcagccgaggagcggagactcgagccgccgtccagcagccactactgtctttacagctatcgcggaagcaggtgctggcgcccagctcggcctgccagcc

SEQ ID NO: 17729 - DNA, 2300 bp, Homo sapien
tttttgagacagagtcttgctctgtcgcccggactggagtgcagcagagtgatctcggctcactgcagcctccgcctcccgggttcaagcgattctcctgcctcagcctccggagtagctgggattacaggcgtgccccaccacgcctggctaatttttttttggtatttttagtaaagaccgggtttcaccatgttggccaggctggtcttcaactcctgatctcaggtgatccacccgcctcagcctcccacagtgctgggattacaggtgtgagccactgcgcacagcccaaactgatcctttaaaattcaaatttaattcagctccacacatactttgtgttttggggcaaattattccagctctcttaagtctcttttatctcatctctattaacaagttgacaataatggctcctaccccagaggctgagacaaataatgttaaaactcactacaatgcttggcacacggtaggtgctccatggatgtctgctattattttttgcttttaatagtaacataatttacattactagttattattatatgctaagctctgttttaagtgcagccaagatgaagtttaactgccttgcccaaagtcaggcagctaagcagtggcactggtggactatgaacccaagcactggacttttaaccacctctcacttgcatgatcctccagttgccctcttagaaccactgtgccttctcagagacttcagctgaaatccaacttctgagaatgcttctagggttcgccagaacccgcctttgctagcctccctaggattatctcttgtgaccagcaccttcactgacagctccagtcttttttttttttttttgagacggagtctcactctgtcacccaggctggaatgcaatggcgagatctcggctcactgcaaccttcacctcccaggtccaagtgattctcctgcctcattctcccgagtagctgaggttacaggcgcctgccactacgcctggctaatttttgtatttttagtagagacagggtttcaccatgtcggccaggctggtctcgaactcctgacctcaagtgatccgcctgcctcggccttggcccatagtgttgggattactggcgtgagcaaccgcgcccggctatcagctccagtcttaccacgattagtttttcacgtgcccagcctcaaagacttaaactctttgctcccttacggagataccctttccttcaccttgcttgctcccgttgactcctcaagaaacctttcttatgtcgggcgcagcggctcaagcctgcaatccagcactttgggaggccgaggcgggcggatcacttgagcccaggagttcgagaccagcctcgctaacatggtgaaaccccattctactaaaaatacaaaaattagccgggcttggtggcgcgggcctgcagtcccagctactcgggaggctgaggtaggagaatcgcttgaacccgggagacggaggttgcagtgagcagagatcgcgccgctgcactccagcctgggagacagagcgagacttggtctcagaaaaataaaacaaaacaaagaaaaacaaaactttacttgacaacccaacgaccactaccactacagccgccctaggactcccgctctctgaggtcctacagcacttcgcatttccctcaacgccgcactgagaactctgcattgtgtactcgtctgtcaccaatctgcgagttacaaagcagagactaacttatttggtttagcatttaataggcacataatcaacatttactgttcaattgaaacaaaattaaaattgggcgctgtctctatctttatttgtgatcggccctaactgcactggcaatcttttccgtttttttgttttctgttttccattcgcatgccccttagcgtacctggggctccggctcctttacaaatgaaacccaaagtgctccgcaagcacagccagcgaaagcgaaaaactctgaaacggacaagatggctgccacctcttcgcgcctcttagtcccacccactcagggcggaggtctgcgtcatgtgaccctccccttcttggctccgcctcctaccgcagtgcttgacgggaggcggagcggggaacgaggccgtcggccattttgtgtctgcttcctgtgggacgtggtggtagccgttgggttgggaaagtgagggatttttggcctcgtttctcctgcttcttttctcctcccttttactttgccggtagaacacagttatgggtcgcaagaagaagaagcagctgaagccgtggtgctggtat

SEQ ID NO: 17730 - DNA, 2300 bp, Homo sapien
gtggaagctaccctattgttgccttttctccctgtcctattgtagagtgtgccagccagcttccctaattcagaattctgcaggctagaagtgggtgcccatcttcatgaatgtgcacacatgccaaactcctcaagagacatgtctagttcatctcaaaactttcaccatgatgatcacacagggatgggctcataagtttccacagtcagcaagactcactagcttgggagaaagatctggcagacactcctagtcttttacagtgggggtccccaaccctgggccaaggaccactactggtcagtggcctgttaggaatcaggcctcacagcaggaggtgagcggctggggagccagcattactgcctgagctccgccccctgtcagatcagctgcagcattatattctcataggaggcaaaccctattgtgaactgagcatgccagggatttaggttgcctgctccttatgagaatctaatgcctgatgatctgaggtggaacggtttcatcccaaaaccatcccccctcctcacatccgtggaaaaattgtcttccacaaaactggtccctggtgccaaaaatgttggggtccactgttttatggtactccctctttgtagtgaggccagcactctatcctctcctatgatttcttctaaagcctcccacctcagcctcccaagtagctgagactacaggcgtgcgccaccatgcccggataatttttgtatttttagtagagtcgggggtctatgttgcccaggctagtctcaaactcctgggctcaagcgatatgcccacctcgccctcccaaagtgctgggattacaggcatgagccaccgcgccttgctagaagccatttaatccaactctccatcaaagtcatgaatcctgtttacaacaacctgatgagatgtcaactacttttcacgtgaacacacccaggaattaggaaggcattccctaaccggcagctcttatctctcccaatcacgatttgagcttcaccaaataactcaaacccctgtttcctcacatattaaaggggagtaaatatctgctttacagaacattgttgggagaataaaaggagatagaggaatataaatggcctaatccacttacagaggagggtgtgcaatgttagtcccctttttgcctccttttatgggacagcacattccatttttggatcgtcatcacctagagaaaggtcttccttaatactgaattgtctttgtatccttttagcacctttcttaagtttaaccctaagtggtctcatagaatgtcatttttccgtccacacgacgtcttcactgatatctgtgactttagttgaaggggctgaagatattgggaagaataattcaattttttccttcctccgtccctccctccctcccttccttccttcctttttttttttttttctttgagctggggagctgggtgaggcttctgtggattcccaagaggtatttgtggcgtgaatggagcaaaggtgatgtttcacttcatcacgtccagcactgtcccaaggttaaatgggcgcgtgaggacagttttctccggtcctggcgggtttgcccacctgccggccagcgttctgcgggagtcaagcctggaaagcgtgtgtgcggcgcacaggcgtcagacactggaacgcattcgaatggtgctattctttgccacatagcgagcactttataaggtcacttatcgtcccgaatgaatggttaaatcgtggaagccgcaaagaaagccacgcagctttgactcaatacctagcccagtactcaggaacccctctcaggggtgcgcgagcggggccggaatcaagaagcctcttttggggtgggcggggaccgatctagagctcccactgcggggcaccgcctcttttcctcgccggccgcccgctaggaggcgctggggagcttgcagcccacctgcgaggcggtcccgctctccccacccctcagcccgcgcccggcggagagactacaactcccggagtgctctgggaacggagccacgggagctacaggcggagggacccgagggcgggctttccgggtgtgtgtttccggcgtcggcggccgcggccggggacggtgtgagagcggtaagatggcggcggcggcggtggtggagttccagagagcccagtctctactcagcaccgaccgggaggcctccatcgacatcctccactccatcggtaaaggtcgccgcgccgcctccccggccccgccggcccagctcggcttatgtcggtcggcggcagcgg

SEQ ID NO: 17731 - DNA, 2300 bp, Homo sapien
ctgatcaaaaggactcccttctcattccaaggacacacccatcatcagaatattatgtcaaatctaatcagtcaatggttcaattacaactagaatgtttgagcaatgatgtgcacaaagtcctaggtatgaatgcagaagtcttgggaaggctccatttaatgtcttattcattctcattctgaatctatcaaaaaaaaatgacagtgagtcacttggatacaaaatcctttgtcatttttaaatcaggcgcttaaagttgttatctatcttaaatacatcagagttgctcagtgaaattattgaagactgttgctgcctctatgtaagggaatacagtgagaattcaaaaaccagaaacaaatcagaaatcactatatcccaacaaaaataagattgtctctcatttgcaaaactaaactaccaggaaagaagtgagtttaaaggccacttaattgcctgctaaaaaactgaagctcaacaagttgccaagaaaataaagctgaattcagtttgtggatcagtcccatgattcttcactccaacaaaagacaggaatttcactgagcatttcagatacaatccatgtgtagcacttacctgcagcttgtccagtctttgccaggagagatcccagttccaggatgctctgctctttgacttgcactgcctcttcatcgttttcctgaatgtcacgcttcactgggagaggaaaatgcaaaccctcttaaaattctgaccaaaaaatgaagactgagggaaatttcaccctcataagatccattacaaactcaaacatatttaccaaaagacaaattctagagttaaaaaaaaaaaaaaaactctaagccaggaaaaaaaaaagatcatatatacgtagaatatgctccatgtaaatcataaaaaaaggattcttctctttgattttaaatgtgccttttcattctacccagcagaattttgcttacctacatacactaagtttctgttgtggtcacttggttaaagtgaaattaaaacaaaacaaatccttcatacttatggtgccaagatctgttccagtcactattttatgggaagatattaaacatgcctgtgcgtttatgccacaaactaaaatcaattgaccaagttactgatgcctgtaagtcaaaagcgtttcaataaactttaggtctgtgcaaagcctcagctgatgggtgtgttagggataagcaggtctataaagccattcaagaaaaacaactctatcaaagccccagatcctgcacagctacacttaggggagactgctgctttttaatgcattgaggtctgttaaaataactttgtgctatctgtcctattttcaacagttaataactattttaacattcaaacatggaatagcctctccaagtttgtagtgatcatcactagttactactactcttacaaagcatcatgacttgacaaaaaccatgatggagtccagaaaaagtaaggccgtcaaccaccatgactcaagcttgctctaacagtgaagctttcagggaactctcccctagaatagtgggccaacaggaaatactctaattgtaatatttgacgtaatttctactttatgaaagaaaaaatattagacactagacacagactattaaaattcatgctcctcacattagttctaaataatagtgtgtactcagaataaaatatccatgtaacggtgattgagatgactctggttccgtagaagtaactgacctaagatcagaacttttaaaatgaaacaccttttaccaatatcattcaaagatacaccttgacgcccacttcctctccttctctagtatccccaatgataaagtatcaagatcttgtcattgtcctttctccgtgcaggtctggaataccaaaattcaacacactaagtcaaatgccaacatcttgcaagtcccacatacaggtgcattctcatactacttgttgagccaattcagatcttcccaaactacactacaaagatgccattacatgtgcagtgaagagctagtccaagccctaattgaatcctttatgagtgaacattaacgtcttcttctgtcgtaataaatttctgttcacacttgaatcccaacagaaagctgccggaagcgactggctgggattcccatttcagttttcctgttgtgtgtaggtgtaagaccatcgttattacagcgttaagaaattttaatttttccggcaacatgcagccgacccgttccaaagaattccctgaactccgcggctgacaactaactcccttaactcacttc

SEQ ID NO: 17732 - DNA, 2300 bp, Homo sapien
gacccagagtggagaaaacctagcttttgcaatgtgatgggcatatgggtttaggggttgggctgattgtctgtgtgggcagagtctttattacaatggaattctgttaaaaagaaatttgcccaaaccttcctttagaagcataacatctgcagcaattgaccaagtatgtctttttttctagcccagaagatgtccaggctttggtgagcgggaagcttgcacttcggtatgcagggaggcaggtagggactcccttgactgcagttctgctcactctgagaccagcatgttttcagagtcacaacgtttgatgagaccagcactcttcagatcttcatactactctcttccttctgccccactcacttccttcccttaagcccattcagtgtgtttcccagactgttaaattcttggcctggaaagtcagcgtttggtgctcttatggacatcacgttgtttgagggacttagggaactgaactgtagcatttgcagtgagttagtttgcatttggctttgaccagaagatttatctaccacgagtctgagttgtgaatttaacataggcagggtatgaaatcttagattctccaggttaggagcctggtaaggtctggtgcatatgtgctttagagaggtctgattgcttggtgcagaaactaggttttgagatttacttctgtgcttctcagatcagtacctttctactcgtgctttgaattttgggtgtggtgcaaaaagaggccctttttttttttttgttaccttaatgcccaagtaggtatgagtgtgacttctgagagcagacagttaggacctacgcaaagatgacgtctagactgtctcctctttgtattttgcttgattatcactagtaaagtaagtgtaatctttctggatttcaactgcagtggtctctaaacacagactgattggctgtctatataatctcactgtatctctggaggagtggccacatagatgatttcttccctctctacaagtggccctaattggctttttttttttttttgagttggagtctcattctttcattcaggctggagtgcagtggcgtatctcggctcactgcatcctcctcctcccagtttgaagtgattctcctgtctcagcctcccgagtagctgggattacaggcatccgccactatgcccggctaattttttgtagtagagacagggttttgccatcttggccaggctgtcccaaactcctaacctcaagtgatccgcccacctcaacctccaaaagtgctgggattgtaggtgtgagccactgcatccagccacgcatcttccagtatagtaataaccggtactcttgaggtcaaaaccaggagctgacctgaaacttttgctgataaaaagccaattaggggctggacgtggtggctcatgcctgtaatcccagcactttgggcggctgaggtgggcggatcacttgaggtcagcagtttgagagcagcctggccaatgtggcaaaatcccagctctattaaaaatacaaaaattagccgggcatggtagtgcattggtggctgtaatcccagctactcaggaggctgaggcaggagaatcacttcaaacggggagtggaagttgcagtaagccaagatagcaccactgtactctaacctgggcgacagagtgagactctgtcttaaaaaataataaataagaaagatgcactactctcactataactagagttgaggagacaggctcagggacatccaagtgttcagggcaaggtcaggtagctaatcaatggtggagctagactttgaattagggtcattggctctaagttccaggcttttctcattttgacacttttttctgtctataggacaaatgctggagacaaacacactaatgattagccttgcaccatgtagtctactgtataagacacactgttcttatataagcatgtaggctgataaaagagcagcttctcttagtcccttgcgcctttgatgttagcttttaagcaggagataggctaatctcccagaaagatgagtgttgcagattttttgctgagtggagacttaatagcttggtcaggtgccttttttaaccatgttagaagttgttctcaactattgattataccttcatcactctgtggggtcttaacatttggtgtaatatgttaatgccgcaacctttttttgagacggattctttttctatcacccagctgcagtgcagtggcatgatcttggctcactgcaacctctgcctcctgggttctagcaattctcctgcc

SEQ ID NO: 17733 - DNA, 2300 bp, Homo sapien
ttggtcagggtctcgaagcaaatcgtttcttctggctttttttttttttttttttttttttttgagatggagtttcgctcttgttgcccaggctggagtgcaatggtgcaatctcggcccactgcaacctctgtctcccaggttcaagcgattctcctgcctcagcctcctgagtagctgagattacaggtgcctgccaccacgcctggctaattttttttgtatttttagtagagacggggtttcaccatgttggctaggctggtctcgaactcctgacctcaggtgatccacccgcctcggcctcccaaaatactgggattacaagcatgagccactgcgtcggcctcttctggcttcttactgttacatgcaggagggttgaggacagctccatttgaagagcaggtaggcttgtacactgaggaacattcacagggaggggcgcactgagctgggggcctgccttcctcttctgagttcccataacagctgttgtggatgttctgaaaggctgtggacaaagtagccctctgggtacagagcaatgcattttccactgtatgccttgccccccaaggttcctaaagcctggaattcctattgacagaaatctgagtggcacataaacaaaacccagcactttctgccttgattgcaccattttgaatgatgccagattccctttctgttccccctaggacagttgacagggctggtgaaagcctagtcggctggagtggtcaggtaactgggtggcatcctctcctctggagagccactccctcatctctaggtccagagataatctggattaagacagggcttaagtttcctgtttcccaggtttgtggtcagttttgactcgatctccagaaacaaggtaaaatagtaaatgaacaacagcctttgtgaaggatctggattcacatctgacaggaacagctttcagaaacagaattttactcaatttcgctagcatcaagttctcaaattatacatacttagaattgaaaacgtttaagagggtcagaaagctggccggaggggcagttgcttcagctttaatatgacaaataagagggcgagtgggaacttagaggtcatatttgtgacgggctcaggcttggctacgggccacgcttctctggcttggatctctgaggcccacttcggccgcggtcatctacccatgatgagggaacggaggccccggaggggtggccagaaccgattggactgtccactcgaggtgcgcgtggcactcgggaggcctcagtaaaggcgtcgcctctccccgcccagggccttcttccccgcgctccctggctgctttccacagggacggggatgtcaggtggaaggagggagctccggaccctggcctcggcggagggctcctcaccaggccagggcggcagcctcagagagggcgggccgcgcgctgccagggcagggactcggccgagagtgcccccgcggccggcagctgcgggcgccgcggcgggaacaaaggcagcacgtgtctgggcgggacgcgggcggggtcggccctcggctccgccctgctcggcgcccgccccgcgtcggcagagttgggttgcgcgggcgccgaggactctccggcggccgggctgctgttgggcggcggcgcggagcgggcggcgagctgtgcgggaggggcggccccgaggggcggggcgggccgacgccgcgtgtcccgccgcagccgcggagtccggctcctagatggggcccggcgcgtagaggtgcctcccgctcgttgccgcgtcctacccgcaccgtgcgcggctcgagctgaggacaccaacggccgcgactccccggcgagaccaggccggagcgtggacggcgcgcgcgccccgcgagggagggcgctgaggcgcgcgccggaagcgggagcgggagcgggagcgcggcggcggcggcgaaggtgcgggcggccgagcggggggcggggctgcggtgcctgcagaaccttggacagaagctccctagctgccgccgccgccgccgccgccgtcgccgccgccgagcgcgagcccagccgatccccgccgagcgcccccgagcgccgccgagcgccgggaccgcggcggcggggccgcggcgcgcattgcggagggcgcggagcgcaggagctgccgcctgccgggtaagcctgcgctgggcggccgtccttggccctggggagcggagaccggggtcgcgcccgtgcggggtgtccaggcgggggtcctcggccgcctccgtcggcgaccgggcccctcccggctgcg

SEQ ID NO: 17734 - DNA, 2300 bp, Homo sapien
gaagcttcagtacatccctctcttgcacctctgcccactccacctgaggcgttggctccctccccctcatcctctcaccacatgcctgaggcgtaggctcccctcatcctctcaccgcatggggcatttgctcccagcctctacttccctcaaggccttctcagcagctggggctcagtggggaaggtggtctcagaaggcccctgaagcatacgtgcttttgctgggcagaaactggcaagctggcagtgctccctggcaccagtttcacgggcgcaggccccaaggggccgtgtagagggcggggtgggcatcctggcctggcctgcagtgccaggaccccacgctgtgctgctgccccgcttcctgcttcccgtcatcccgtgtcttgaccccgcccttgctgtttctctgagtaggaaacgcagcgggaggtggtccagagggaaagcggccgaccctgagggctgccctcaccctggcagctccccgttctcattagggttcctgacccaagtgtggtgacagcaggtatctgattagcaaccctgcaaacggtgaaagtatctataagaggaccacagccacaggctgcgagttaagtaagatgatccttggagcatgccacactgtcctctccagagcggtggtcagaggccctggtgggggccttggtggcaaagggagtctcccaggggagaacctgggaaggatggactcactctgctggatgggctgttccgctcctgccactggctcctggctgaggggctggccctgtgggtgactctgctcacccagtggctttggctggcggctgggagttgggttggggtgggtccgccgaactctgagcagagcctccctgagctgggtccccagggctggctcaccttgggcaagagaggtggctatggggctcccgcagagtggggtcctgcatccccaccccttccctctgcagggtcagcagcagggaggacacctgtccaggtgctctgacttgacctggccacggggcatccgcaccaactaaaggcaccatccagttgcctctggggtgagattggtctggacgtcagcccaggggtctgggcggggcaccagggtctttggcttattgaacagggaccgtggacagtaaggacagaggaagatgataccaaaggcagaaaaccaggaaggaaatcttacaggggcggggctcctctgggaggggccctcgcagcaggtttctagcgggcatgggttgggaggcagcagctggactgggacccaggactcggagtgtggccgggctccgggccaggcctccgcggggcgtcagttcccgggcacgctgaggatgaagcccgagcgattcttggtgaagtcgggctggggctggttgagccgcgtctccacggagacggtgcacttcttcccgtgcaggctgcactgtactgggttggtgacgttcacttgaaggtggcgcttctcactgcaggaaccaaaaacaccagacgggcagttagcaggcagcatgagaacagggcacctgcccggcagctcccggccaccattggctccggcgcagcctgcttcctccacaagtgccaggaggatgcctgaagggccccagagaggccgaggcaaggcgagtgtggcactagctgggcctccaaccacagcctcggcaccatggcagggcccttggctcccatgccagcgcatgggactggacagtggagggccatgtggttgaacagacgccaccaggtctctggctggggctgaggaccaagcccctgggtccttcggtgtaccagggctggggttctgactctgacactaatccatcctgcgggagacccgtgccacatgccccagtgagagagagagagagagatgtctcctgctcctggctggtccctgcctgtcacaccccggctggtggaagtgggcctgacttgggtttccccaagcgagaggctgctctcatctggagctgggccgcttggctggttgccaccctggaggctgcagaacagtgcagccggtgccccaccgggggctgcagggaaccctgtgcagcaggaagccccgctggcctgggagcacatgaaggcggcttcagccgggcgtccggccgggctccaggtcgggtgcagaggcggaagctgtgctcttcctgctggacagagcccgagcccgagcccttcctccagctcctcacacgacgctgaacatgctaagaagctgctgctggttttaaaagcagagacacttgtcgcgataggctggcaccccaatgtttgctc

SEQ ID NO: 17735 - DNA, 2300 bp, Homo sapien
agccaaaaaattttggagtcatccttaaatcctctctggcccccacatctaatccattgtcaaattctgtttgttcttccttcagaaatatgcagaaccaacacttacctccacctccacctccacctccctgatccaagccaccttactctagcatgtgtgtttcggaaatagccatctaacaggtcttcctgttcccagcctatagcaaccacaatgacccttttaaagcatgagtcaggtcatgtcccatctttgttccaaaccttccgatggcttctcatctcattcagaggaaaggccaaagtcctcatcatggtctcatggctttgtggattctgaccctgactctcccagctccttacactgctcctctgacgcaccaagcaagctcacatcccggagcctttgcacttgctgtgttctcttctcttcctagaacactctggtgcaggtctccgtatgaccagctccctcacggcctgtaggtctctgctcatctatccttatcagtggtgcctgcccagaccaccctatataaaccaccctatataaaccacacccactctgcattccttccatcttccacactcccggtcctccttgccttaccttcaccatcctacatactatatgtctactcatatatttgctatctgtcacttctctccagaagacaagcagctagcagaaaggacctttgttttgcttattactgtgcccccactgcctacaacagcactgggagtttagcaggcacctagaaaaccttcgttgaatgaatgaatgatgaatccaattttctatgccctaaatataaatattatgagagcccatgtatcactaagttctagttgctttcaaaacacacaaacaacaaagcaagttttaggaaagatctgtctacataaaatgatatgtattttagcaacttctgtgtgtattttggaggcattttactttttttagcatgccagtgctttgatttcattctacttaatgacagcttcagttatttttgagaatgcatggagcccaggcgtggtggctcatgcctgtaatcccagcactttgggaggccgaggcaggcagatcacttgaggtcaggagttcaggaccagcctggccaacatggtgaaaccccatctcttataaaaatacaaaaattaaccaggcatggtggcacacacctgtaatcccagctacccaggaggctgaggcagaagaatcacttgaacctgggaggcagaggttgcagtgagctgagatcatgccatgcactccagcctgggagatggagggagactcaaaaaagaaaaaaaaaaagagagagagaatgcatgggattgcatttctaaagtctaatacatgttgtctatttacttgtagatggagagcatcccagctcatcaagagcattccggcctcagacctgccccaggtcagggcaaaggttgcagccgtggaaatgttgaagggtcaaagggctgacctcgggctccagagggcctgggagggcaactatcttgcttcagtaagtccaagggaacaaagtgaaatctacttctacttcctctactaaaaaagagaagtacatatctccaaagaatttgcagaaaggataaaacacttttagaaactaaataatttctatgagatactaaaacattttattgcttctaaatgtacagtatttgatgtttctcccgtgtttaaaagggttctgtgtgttgtatccatatgtattaaatacactctataacctggcctttgaccatttaaaccttcccttacatcattcagtgacgattttttaattactacctttatattaattattcccagagctacactttatcctctctcccattccctattttaaaatttgtataggatctttgatgttacaacaaccatttagtagcttaccatctggggtgaggagataaagagtgcatgtgtgaaactatataagtgtagttataaagcagtacactgaaagattgcctttccttctaaaatgctaagcatactcattttgtcttgtttcctttctctttcagaagccagatacacctcagacctcaggcacttttgtccctgttgctaatgaattgaaacggaaggacaaatacatgaatgtcctcttttcctgtcacgtccgtaaggtaaggcaagcttaaaccagatcatcttggaaaggaaagactgattcagatgaaactcacttaagcaagcctgtaataaaacataacagtaggtacataactagcttcatcatcagttcactagacctgtct

SEQ ID NO: 17736 - DNA, 2300 bp, Homo sapien
taaatatactggggcatgatggcgatgtgtacaaggagttcatcgaagaaagcaactagggttgtttggcatcttggagactggtagcagaaagggaaagaaaggggtttacacttccatattgtggaagaaggagtaaagtggtggtggagaggatatacaggggaagagccagtgattaattgaagatcgcaccaaatttgtttttgcttgagaagttgagaaatatgggtacctgacaaaggatcctgaaaaaaaataagtatctctgactttaccatgcttggatgaagttggcattgaggcgtttatatagtgtcattgatttgtgagcactgaaaaacttttaacaaagattcacaggatattagtacgtaatctgatttaccctttacccatgaatctttgagagtttacatagtgccgcgggagaggaggtgcacaggctgtgtgtaaatcagtttgtaaatccaaagtggcgttacaccagtggccagcatgtataatctatgtaaagttaggtttcacaagaaaactatagatgcttatggcatgatgttctgactcatctcgcttcccttcagcattcctaaaatatttatccaaagatatttgcattttggctttcttcttttcatgacagtagagttaaaacaggactcagcttcaggctcagcacacacttcagtgtagaataatgagcagctagacagctgaaacaaaatgactgatgtgactccccacgccatctgttggtggcaggtggaactgacatgctttggctctggctgatttttgtgcacacttgcaagttgcctggttgagtttgtaagtagaggagctgctataatatcaaagccatccacaactcagccggtcaataacgttttcctttttctttctctattgtgaaggtgtggcggggcaccctggcccgcatgcggtacaaaagaaccaaggcagctctgacaataatcaggtactaccggcgctacaaagtgaagtcgtacatccacgaggtggccagacgcttccatggcgtcaagaccatgcgagactacgggaagcacgtgaagtggccaagccctcctaaagttcttcgccgttttgaggaggccctgcagacgattttcaataggtaagaacgtgctgctgtgtgctgcatccatttatggtggcacagttaatactatgcaaagtcacaagtctgagaccgtgatattgactcagctatttgctgttatgacatttacctttaccttatgttttcagttttgtagatttggctttcaaagagcatctgcttacccctcaaaataaaggaactgccaatttgtttttcctgtagcagctgacagcaatgtgccacaacccctggacacaagccatagttaagataagctactagcatgctgtttctacttacttttattagctaaaaataaaaccaccacgcataactcaaactagaaaatccattaatcctttcaaagcagtggttctcaattctgctgcaccttagaataacaaggagtttaggaaatatgccagcacccaggtcctaccaccagagagtcctgtttaatggcgctggaggggtggggcccaggcagaggtccttttttaaagtttcccacgtgattttaaagtgcagccaaaggggaaaataactgtttttagagcgagctgtcttttaaataaataaaaacccaagtaaaatttggtacctttccaactggtctttatttttttataacctgccctggatctgagtgtgtagttattccaagtcctttctccttgctttttgagcttatttattgccagtatacaccagatatatttagttctgtcttagatacagccatctagtcacataaactaagctacttcttctcaaatatagtcattttatcatgatactccataaagaacactttgaactaattgatatgctgaatgtacaagaactaatgtataattctgtgctaaatcagatgttatcttctttagattttgcttgaaatataattgatggaaggtatcaaaagataaagaaaaatgcatggaagaaaactctttaatatatatctcatatgcttttttaaaaaaagaaataattgctcataagaagaaaaaatacagaattattgaaaacaaaagtacctcaaccttcagttctcagatatagtactataaataattagttttcaatcttggcaggctttttacgtagtcacatatgatttgagcatttttttccccttttttacacagataagattatatgtatggctata

SEQ ID NO: 17737 - DNA, 2300 bp, Homo sapien
ggttttattgttcaaactctcacaggttccttgctctttgcaccacatcagggtttttaaaaaactgtgttctgagagaagtgggactctggaaggcagacccatgccttcccatcatcatcattacaacattcagaatccactgacagtggaatttctgaacaagattcattttctttttttctttttttgagatggagtctcgctctgtggcccaggctggagtgcagtggcgcgatctcagctcactgcaagctccgcctcccgggttcatgccattctcctgcctcagcttcccgagtagctgggactacaggcaccggccactgcgcccggctaatttttttgtgtttttagtagagacggggtttcactgtggtctcgatctcctgacctcgtgacccgtccgcctcggtctcccaaagtgctaggattacaggcatgtgccaccgcgcccggccgaacaggattcattttctaaaaggatttcatgccatactgtgctattgctcatgggaagatgagtaataaagctgatctctactgtctggggcccagcatttaggggagcagctggcacatagtatttgcttaacaaatacttaagggatgaatggatgatagctataaagcaacaagactcactttcttatgtggtgcagcctttttgaagagagaaactgttttcctaattggttacttcaaagctcagtactaatttagtaaagagtcccacctcatctacacataacaatcttcagttttataaataggaagaaaggatattgggttgatgtaaaagaagagaacttacacttcactaccctgcgtagcctttcttcttttcatcatattgggctgcattgctgggccaggagaggcatttttcttaattgtaacatatccctccttcttactctgactttacaatctagtttgacaaggacagggatatgtgtaaattttcttaatttccttaggagctcaggagagcaactagatgagaaataaattaatttcacacctacaatagtagagtaaggcatatataaatttactagtctttcacaaacatatcttatcacaagcagtttccccccacacacatatttttaaaatatgctttcatttatgaggcgataaggttgaactctccagtattagcgggagtaacagtagatcttctacatcaagttatttcagaggccaaagttatttctgcaggtatgcctgtataagaagaattttatcagtggaatgaaaacaaggatatagcatgaagtttaaaatgtatccattgggagggactgctgtatagaaagttagcattcgtcgaataaagaatgcattaaatggctggtacaaaggagaaattccatacagcttcaaagaaaataatgagcaatttctgaactagtgaagattaaatttatgatgtataactaagtacaataaaatgtcacaattccaggttttataagcaagtgccttaaaaattgtatcattttctgtatcacctattctttcccttttcagaacacatctttttaaaaattttctttatgtagataaaatatgtacatttataaaatgaaaaacaaaaattacagaattaagttgaagatgtaaaagttccctgaaatcctaccttgcccattccatcagtctcctgtctagataaccatagtaaggtgtgctgatccctccagatttttaagcatttgctgatacatgtgtatgcacacacacacacacgtgaacatacacatacacacacaaggatcctgcaatgcatgttatttgacaacttgattttatattcattaatatatgctggacatttccatgtgagtacatattgatgtacctcattctttttagcacctgtatagtatttcattatattgggaaacaaaaatttatttttatccctattggtggacattaatttgtttgttttttttttgatattgcaaacagtgctggagttagcatctttgtataaatatttgtatgtggtttagcaaaatccagtttttaaaaaattctagtctctataagtttttataatgactttcatttatctgtgttaaagagtgaagaatatgttgcttaagtccaactgtgttttggaagcttttggaaatgccaaaaccaaccgtaatgacaactcaagcaggtttggaaaatacatggatatcaactttgacttcaagggtgaccctattggtgggcatatcaataactacttactagaaaaggtaaaatatgcttaatttctgagggtaatgttttaagtg

SEQ ID NO: 17738 - DNA, 2300 bp, Homo sapien
tgtatgggtaacaaattactgcttagttatacaaacaagaatttgcttgacacagtacaatgaaaacaacatacaaaagtaaactggaatcctgaggctaatagtgagccccattgagcagatttgggttcatcatgagagcatcaatgcctaattttatactaatttggacttatacaagaaattaataaaataccctttgcatatgttgtatatgtgttttatatgttgggttcctatataagatgttgattaaaatgaggatctcttactttggccatttggaaaccacattgtatcccaccatagctcctaaccactgtacaatttctgcaactctctcatcatctgcaagccgtgatgtttcttttcctggtacctgggattttgccctaatttttaacacctacagagctcagggaacacacatatataatttaccaaaaggttttggggtgtggtccctggatgctccaaagtgcatacagtttgagatttctttctttccttcttgaagttcagttctgcttatgttaaaacatgccaatacaaacattaggaatacaaccataccctatgcaataacctacttagccactgaccgacacctccacaaatgacccaaccataggacagtcctaccttattccagagcttttattccacaaatgaggacactgatatcgagacaggtggatctcctccttctgaaggacagctgctaacggtagtcagatgcaacccagctctgctggtgccagggattggggtggttttctgatggcagaggcagtccctcaggaggtgacaaagctcctttcctttctcttagcaagtgtgggtggctggcagctgaagcaggccttgggcaaggtccttcagtctggtttactcatctcaaactcagccagagttgaagcccagccaggtccttggaggcctctagatttcctcgtagattttgtaatagaagatgtcctaacagaaacacaggactgaataaatgtagataccttagaaagtcatttatttaaaaaaaatagctgggcatggtgtcatacacctgtagtcccagctgctcaggaggctgaggctggaggattgcttgagcccaggagtttgaggttgcagtgagctgtgattgcaccactgcactccagcctgggtgacagagggagaatttgtctccagaaaaagaaaaaaaaaaaaaaaagaaagaaagtcatttgtagtatattttctttgggaaaatacattgagttcaaaaagaattttccaagctcaaccaatgtatcaataaattggagactacttacaactcacttcattccactgaaccagtatggatttcatatttatatatgcaaagtagtacaatagttatttggtggatgcaaaaagaatggtcccatgctcaagacatccgcaataatcctggagagatgatacaaagatatattaaaaacttaataatcatataaggtaatgtctgatgacatgctcggatgagtggaagagaaaatgggccactgaagaatggaggtagtcagacgtggttgaacgctgcggctcctaagtcaaatgacctgcgtgaaaccgcagctgctccacttcctagtcgtatggcaagtttcttaaaagttctctaaggcgctgagaacagctctgggcatttttggtgccccaaaaatgttagccattattattacctctcagtctgtgcttgaaccaccacttcaagaatgggcagggtgtgagtagagaggcgggagtgggttttggagcagggtgacagaatcataatgaattgtcctcgcgaaaagctccacgaactacttttctaactttgttggcagctaccaagtgtgggcggcaggcggccatcctcttggccgcctgagatcccagcgcctgtccccagggggcgctgccacccagctgccgccgcccggcccagcgcgcgtccccgccgcccacccgcgcgtgcgcgccgcccaggtgaagaggcggcggccagggccgcggctggggcgggctcctcagtgggccgggaggggcggagccgggaggcccgggcggggcggagccgggacgagccccaggctggaggcgggaccagccgctgccgtctccgtctcggtgtcccggcccctacagcgcccggcagccgcggcgggaggagcggaaactgtcgggtgcgtcccgttcggagccgcgccggccgagaaggcgccgaggagcagcgaggcggcctctgtccggcccggacccgccgagcggcgtgcgcgccccctccccgt

SEQ ID NO: 17739 - DNA, 2300 bp, Homo sapien
agacaccacccctggccatcaggatgccacactgtctccactagacagagtagggcaagagttccatgatctccagtaggtaggaactacgccccaagttggcataaagcagttacagttcctctgcatcccataaagatttatgggggtcatgtctctcaggagagagatgaggcaggagaatagggtctggaggcaggaaacctaagggttcacctgacttcctagaactaaatcaaaaggaaaaccccaactttccgcacctaagtaacaaacggaccagagactactccctttgcaacccccactccccactttctgcttggcagatggaaaatcttttgaaagtacctctgattgcctttccgcaaccaatcctgcgtttgcatagaagtgtaactttgtaacttcacttcagcctctgattggttgtggaaagcaaccagtcagactgattgcggccaaatattcttttgcataggagtgtaactttgtaacttcactttagcctctgattggttgtggaaagtaaccgatcagactgattgcgggccaaatcttcttttgcataggagtgcaacctttgtaacttcacttcagcctctgattggttgctttccacaaccaatcagactaattgtggcaccacttcatttacatggggtgaacgccaagtggccaatgggaaacctctaggaggtatttggaccccagaagattctacagcaggggctcttgagcccatatgcaggggcctgctcccaccttgtggaatgcacttttgttttcaataaatctctgcttttgttgcttcattctttctttacttgctttgcttgtgccttttgtctaattctttgttcaaaatgacaagaacaggccgggtgcggtggctcatgcctataatcccagcactttgggaagctgaggtgggtggatcacctgaggtcaggagttccagaccagcccggccaacgtggcgaaaccccgtctctactaaaaataacaaaaaaaattagtgggacgtggtggcgcacacctgtaatcccagctacttggggggctgaggcaggagaatcgcttgaacccaggaggcagaggttgcagtgagctgagatcgtgccattgcactccagcctgggcaacagagccagactctgtttcaaaaaataaataaataaataaataaataaataaataaaggcaagaacctggacaccctccacccgtaaacagccaagactgtgccacagcactccagcctgggcgactgactgagactctgtctcaaaaaaattaaaataaaacaacaaaagtatgaaccaaaaaaaccacctctgtgggctggatgtggccttgggggtaccagtttgcagaccctgtgtcaagcggcctaggacccaatctgtatcctttgttaactgtcaccgatactgacctcagacctggaccactgggatcctgccctgaaccccgtgctttagttggcccactccagctggagcgtatgttcccttctagatcatgctcctggtaccctggactccggaaatccctgtgtaaacagccctgagcctgcttccaaggtctgacttccatccacccagggcagcctgccctgcctggcctgagtatcgttagaatgaaggatggcagggtagggggtgtgtgtttgcctgaaccagtagacccccttcagtatgtatgggatggagtcgtgtgggaatagaagcagcaagactactagcaagggctctgcatttgtactcttgcccctggctaggcagtcgccaggggtgggcctgcttctcactgacccgtgggtcaggctgtaaataagagcgaccctcgattcactctttaccctgggccaggcagtccgatgcatcctgcatcccatcattcctaataccaactctgaggatgctgacaagcagcagccccgttttacagaccgaggcacaaaggctgaactaagttgtccatagctagtgagtggcagaggcagggtttcaatgggacagtccgtggcggagcacactggctccgccgccagcccccctgcggtacccatccgcgctcgccgcctgggaccgccagcccggggcggggcgcaggcagggaccctccgctcccctctccgtctgccgcccggacgggccaccgcgggggcgcgaggaaggggtgttgggtcgccagggcccgcctcccagctgccccggccgccggggggcctggcggtgacggcggcgcctggcggcggggatttggcgcgggccgggggccgggggccggggcgc

SEQ ID NO: 17740 - DNA, 2300 bp, Homo sapien
aaaagagcctgcattgccaagacaatcctaagccaaaagaacaaagctggaggcatcatgctacctgacttcaaactataccacaaggctacagtaaccaaaacagcatggtactggtaccaaaacagagatatagaccaacggaacagagcagagccctcagaaataataccacacatctacaaccatctgatctttgacaaacctgacaaaaacaagaaatggggaaaggattccctatttaataaatggtgctgggaaaactggctagccatacgtagaaagctgaaactggatcccttccttacaccttatacaaaaattaattcaaaatggattaaagacttaagtgttagacctgaaaccataaaaaccctagaagaaaacttaggcaataccattcaggacatagggatgggcaaggacttcataactaaaacaccaaaagcaatggcaacaaaagccaaaatagacaaatgggatctaattaaactaaagagcttctgcacaacaaaagaaactaccatcagagtgaacaggcaacctacagaatgggaaaaaatgtttacaatctacccatctgacaaagggctaatatccagaatctacaaagaacttaaacaaatttacaagaaaaaatcaaacaaccccaacaaaaagtgggtgaaggatatgaacagacacttctcaaaataagacatttttgcagccaacagacacatgaaaaaatgctcgtcatcactggtcatcagagaaatgcaaatcaaaaccacaatgagataccatttcacaccagttagaatggtgatcattaaaaagtcaggaaacaacaggtgctggagaggatgtggagaaataggaacacttttacactgttgttgggactgtaaactagttcaaccattgtggaagactgtggcgattcctcaaggatcttgaactagaaataccagttgacccagccatcccattactgggcatagactcaaaggattataaatcatgctgctataaagacacatgcatacgtatggttattgcagcactattcacaatagcaaagacttggaaccaacccaaatgtccatcaatgatagactggattaagcaaatgtggtacatatacaccatggaatactatgcagccataaaaaaggatgagttcatgtcctttgtaaggatatggatgaagctggaaaccatcattctcagcaaactatcgcaaggacagaaaaccaaacaccgcaggttctcactcataggtgggaattgaacaatgagaacacttggacacaggaaggggaacatcacactccagggcctgttgtggggtgttgggggtgggggcgaagggatagcattaggagatatacctaatgtaaatgacgagttaatgggtgcagcacaccaacatggcacatgtatacatatgtaacaaacctgcacgttgtacacacgcaccctacaacttaaagtatatatgtaaaaaaaagaacagtgtaagaggatattgaaaactcccctatccactccacacagcaggcatctagcatgtatcctcttagggaagttcccatgggacagggagagactggctttgtaaatgctcctgttacaggtactgaagttaggaatttcaagaaggaaatgaaaccactcctagaagatcccctcagtttagcagaccagctgtaccaaatcctaggacccagcttttacacctgggctaaaattattctattataaatatactgttcacaggagaagaaaggggaatgattaggagagcagtcatgaccatctgggacaggcaacactctcctgggcaagggttcttgccagccaaacaaaaattcccaaatgtcattcccaaattggataataaagatcccagggactgggcccaaatggaggaatgaataattagaagagatcaaagagtccactcctagggcataaaatgtcgtaaaggcatttgagattcaacaagaaaaagaggaaactccctctgcattcctgcagaggctcagagatcagatgagaaaatattttggattaaatctggaagaaccagtgggcaaggccttttaaaggttagctttgtgactaaaagctggcctagcaggccagggagtgcagctgcaggcgtgggggtggcaggagccgcagagccagagcagacagccgagaaaaaggtggacagtgtgaaagaaccagtgtgagtaaacccccaataagaaactaatgtctgtattatgcaaaaggagtcactggggatccaagtctctgtataatgcaat

SEQ ID NO: 17741 - DNA, 2300 bp, Homo sapien
ctctactaaaaatacaaagattagccaggcgtggtggtgcatgcctgtaatcccagctacttgggaggctgaggcaggagaatagcttgaacgcagggggcagaggttgtagtgagccgagatcatgccacttcactctagccctggcaaaagagtgaaactccatctcaaaaaacaaaaaacaaaaaacaaaaaaaaaaaaagaaaagaaaaaaagaaaaaaaagaaaatccagtcaggcaagatgaatgagctcaagagagctgctgtacagcagtgtcctctacagtcaacaataatggattgcatattaaatatatgttaagagggtagatctcctactaagtgttcttacctcaataaaaaaatgaaagaaaaaaatactggtgctgatgctgggccatccctcaattttaacttggttgtcctggggtggggcccagacagatagggtggacatggtgcaaccagacacttttatggctgtgctctgcacttagtagtaattactattatttattgagcacctggggtactaagcactttgttgctgtttcattgagccttcctagtaccctgtgaggttggtgttgtcatccccgcttgagaatcaaggaatcagaaagtgaggctgttttctctaggtcatccacctggaagtcactagcgcctgtgttcagccctggtcagcctgaccccaaagcctatgctctagctgctgtgctgtgggactcaggctcctgtgggacacagacgtgggcaccacatgccctttccttccaattctctgtcctttaagttttagggtcaatagggtaacctttgccctgcacctgtccacactgaatggccatcatccaggtggagaagggagtggcttgtggctcagcattaaggaagaactttctggcactcaaaggagcttcatggtgagatgggcagcctggaaaagcagagggcaaccaccaccatccctaggaacccaccaccatccctgggcacctacccccatccctgcacatccctcacaatccttgggcacacatcaccatctctgggaatctaccactatccttgcacacttaccaccgtacctgcacactgaccaccatcctacacactcacctctgcctctgcgcacccaccgccattcctgaacatccaccaccatccctgggcacccaacactaccatccctgcacatccaccactgtctctgaacacccaccaccatccctgcacatgcaccaccatcctggggcacctgctaccatccttgggcacccacttccatccatgcacacccatcactgtgcctgggcacccaccaacatccctgcacacccaccaccatcctggggcacccactgccatccctgggcacccactactgtccctgcacacccaccactgtgcctgggcacctaccaccatcactgcatatctgccaccatccctgggcacccactaccatccttgcacatccaccactgttcttgcacacccaccactgtccctgggcacccaccacaatgcctgcatatccaccactatttctgggcaccaaccaccatccctgcacatctatcaccatccctgggcacccaccatcatccccgtgcacccactaccatccctgcacacacaccaccatctctgggcacccactaccatccttgcacacgcaccactgtccttgcacacctgttaacatccctgggtacccatcaccatctctgtacatccatcaccatccctaggtgtctaccattatccctggataatcatctgaaagatctgttgggagaggaagtgtcatccctcagtgtagtgtgtgtgtgtgtgtgtgtgtgtgtgtgtgtgtgcgcgcgcgcatgtgtgtatgtgtgtgtgtgtgtggggcagagatgtgcaagggggctgggattagatatcctgctctgcctctggaccctgagtggaagggctcaggtgggctagtcaaagctctgtggtggcgctgtttgtggaagatgagctcacagagctggagttctagaaggccctccgttggcctggagcctgccttccccattgttctcttaacactgggtgcctggggccctggcaaggttgtgggggacatcttgagctgaagcagggttttgagccactgctgctgctgccattgtcaccatggtctcagctctgcggggagcacccctgatcagtgagccccctttcccttcttcctggggctgttaacaggggcgctgggttggtctggccagagaccaggtggagaaaaacaaggtggtggt

SEQ ID NO: 17742 - DNA, 2300 bp, Homo sapien
accatccctgggcacctacccccatccctgcacatccctcacaatccttgggcacacatcaccatctctgggaatctaccactatccttgcacacttaccaccgtacctgcacactgaccaccatcctacacactcacctctgcctctgcgcacccaccgccattcctgaacatccaccaccatccctgggcacccaacactaccatccctgcacatccaccactgtctctgaacacccaccaccatccctgcacatgcaccaccatcctggggcacctgctaccatccttgggcacccacttccatccatgcacacccatcactgtgcctgggcacccaccaacatccctgcacacccaccaccatcctggggcacccactgccatccctgggcacccactactgtccctgcacacccaccactgtgcctgggcacctaccaccatcactgcatatctgccaccatccctgggcacccactaccatccttgcacatccaccactgttcttgcacacccaccactgtccctgggcacccaccacaatgcctgcatatccaccactatttctgggcaccaaccaccatccctgcacatctatcaccatccctgggcacccaccatcatccccgtgcacccactaccatccctgcacacacaccaccatctctgggcacccactaccatccttgcacacgcaccactgtccttgcacacctgttaacatccctgggtacccatcaccatctctgtacatccatcaccatccctaggtgtctaccattatccctggataatcatctgaaagatctgttgggagaggaagtgtcatccctcagtgtagtgtgtgtgtgtgtgtgtgtgtgtgtgtgtgtgtgcgcgcgcgcatgtgtgtatgtgtgtgtgtgtgtggggcagagatgtgcaagggggctgggattagatatcctgctctgcctctggaccctgagtggaagggctcaggtgggctagtcaaagctctgtggtggcgctgtttgtggaagatgagctcacagagctggagttctagaaggccctccgttggcctggagcctgccttccccattgttctcttaacactgggtgcctggggccctggcaaggttgtgggggacatcttgagctgaagcagggttttgagccactgctgctgctgccattgtcaccatggtctcagctctgcggggagcacccctgatcagtgagccccctttcccttcttcctggggctgttaacaggggcgctgggttggtctggccagagaccaggtggagaaaaacaaggtggtggttagggtggggttatcctggcctggaagagtgaccagctgagagaggagagagagagagagagagaaactctggagctgttgtgaaatgctcaggatggaattccttttaagtcacttttctacaaaaaaaaaaaaaaaaaaaaaatcaaaaacagtccatgtgtagcagtcaatttagtttcctcctctacaacttagggatattaaccccacacctttcaattgctgagaggattggatgagattaagttggaaaagctctgggaaaggcctggcacagtgttcaaagacttgacaaactccaccaggttggctgcctcctccttctcactcccctcgcggtgagaagaaggtctcatgtccctgtggccacgccttttgtggacttgagtttcagaagcagccacagagcagctactccatgccagcaactctgcagataaataagacatgcagataaataagaccagccgccgttcttcagaagttaactttgtggtgggaaagactgacatctattccagcctcgtgtgacagaggatgtggaagatcgggtgtgtgagagtgtggggggtggtggcatgccaggagactctcactggggaacacacctctgataagacccttcaagtatgagtcagagttaaccatgtagaggaaaggagagggtgaatgttctagaaagcaaggtcattgtgagagaacaaggtggcactgctgaaacataacgtgtgaatgagggagtgggccgcagggctgggctgtgaagggtcgtgaagggccgtgtggacctcgaaggggcagttatggtgggagccatccaaggtgtcacagggctgggcttttcatttaacaaatttgttctgatggatgtgtatagaatagcttggaagagtggttgagacatgatacaagaagaccatgaaggaagccaggatggaggtgtgaacctaggaaaggacggtgctctcggagggaaggtggaat

SEQ ID NO: 17743 - DNA, 2300 bp, Homo sapien
gaggattgtcgcactgagcctaccctgctcgcaatgcctcaacacacatactcattacatacaacacatgcacatacacacacacacaaaacacaccaaccacacaccacatctagaaaccctgatatccatccacacatcaacacatgcatttcaaacccaggactcactaagtgcacacatacacacacggaacatacacgtcaccatagacactacatcctgcatgcaccacactctaatggccacagcacgccacccgcagacatgctcacattcaagagtttcacagaaatgcccattcacacatacacaatgcacatcctacgcacacccaatacttggcaccacactcgcaatcgtgttcaaatgcccacactacacagcaactcgctctctctacagcccatctcacaccctcaggagtcctctcacccctgtctacactggggccacatcagcacaatggttatactacttatctctcccacaagcccatacacctgagcacatctgtacagcgcatccccatcccgctccccaccacaccccacccccgcacccggccgactccagcaagaggcttcccgctcggtgtgcagcggccacagtggccaggaattaaaatgcagcgaggaggagccgggcgcgtcagcaccgcgtctccaggagcgcacggcgctcacggccgccgccgccccgcccgcccggagccgcggggccagcgagctgaggagcaggtgctcggagcccagccgcgccagcgtcgcgcggccgctgcccaagttcgcctggggcccaaagagggttctcccgggcaaccggggaaggagcttagccggcgtcacggccaccgcgagctcggagtctcgagaggagaagggcgcgcggagcagcgagtccgggtcacccccgggaggtgttggcgggtccccgcagtccccagctcttgtcgccgcgggggcagagagaagacgcgagagacagcaaggctgggcttttctggagacgcgaggcacctgggagagccgaggcgagaagcgacacttccctgcggctagcatccttgaaggaccccggcggcgaacagcctcccgcaggacgccctgagaagctctcagccccaggcgagagcgggcgcctggcaggacttaggcgcaggacttggggaagcctaagcaggtctctgccgagcgcagcccagggagcagtaacaaggaagggtcctggaggggaagggaaagaaggcggcagccggcaaggcgaccactcacccccgtacacacccaccccgcccgcccagccaggagccgcggtgcgcctctgggggcgctcgttccttggcgccttctctcccgtgtcccagcaccgctgggctacgggccgggctggtggggtccctggggatgtccagatcaggcatggtggccgagtggcccttctcccaggaccagcgtaaaagctggggttaggcggggcaggggggactcggctcagggtcccccgaggtccaggacgagggaaggcgggcgcagcacccagggactggagaggcggctcccagtgggacccctccagaagtagtgccgggcgccgggcatcctccaggaagaccaggggccgggaaagcctgggaggcgctcgggagaggccactgccaggggctgcgggctgaggcggcgctcagccccgggcgggcgcccgcggaggcggcagcggcggcgccgggcgggcatgccgcgccaccggagctcctttcgggcgcacgcttccctggcgcgggctgcgcgcggctgccgctgctgctgcttccactgctgctgcggactcccatggcggctccgcccggccggggccgccgccgctgccgccagccgcgggctgaatgaatgagccggattggcggagccgggctgcccgcagccgcgctcaccggcccgggacgcttccgcatggcccgcgaggagccggcgcccgcggcgttggcggctgccgggcagcccgggggcggcagaggcggcgagcgggcgctgcaggggccaggggtcgcccgcagggggcggccatcgctgagccgcgctaaactgcacgggctgcggcacatgtgtgccgggcgcacggcggctgggggctccttccagcggcgggcgctgtgggtgctggccttctgtacatccttcggcttgctgctgtcctggtcctcgaaccgcttgctctactggctcagcttcccgtcacacacgcgggtgcaccgcgagtggagccgccagttacccttccccgccgtcactgtgtgcaac

SEQ ID NO: 17744 - DNA, 2300 bp, Homo sapien
agagcttcatgccactccagatttatgatgctggaagatggcacatgcttgtcctggttgcttcatcagtaactgcactgaggtcactaggtcaccccaccttggccaagacacgggtcactgtggcatttccaggacccttgagaccaggctgggagcactggagtatgagcctttggtagaggccccagtacagcaggcagcttcagaaccctcccctcaaagccagcaacagacatcttcaagcaaccaaacccaaagcaaactgtcatcaatgcccaactgcaatagctttttccccagatgagtgagaagggtttccaggtgtgtgtgtgttgtgtatatgtatgtgtgttgtgtgtatgtatgtatgcagtatgcattgggtatatatgcatttaagtgtatatgttggtatacatgtatgttcatgtatatgtgtgttgtatgtgtagtgtgtgtgtgtgtttgtgtatatgtgtgcttgtacatgtgtgactgtgtggatgtatgtatgtgggtgagtgggaaatgaggggctcagaggtcctcttctccagagaccagatgcagggagtcatcacgctgtaagggtgccctcaggtcagtggggagggaaagcccatcccagcactgcttctctcctgcttggaaacccacagctcattcaacagatctggccaaattgcccctaattcatcattacaaagacggtaaaactcctctccacacccaaatctctgcttccccaagcctcctctccccaaaggatacacacgttggtccttcttccactggagcatcctcccacccttggagtcccttcacactgcctccaccaccaaattctactctccggataatgtctggaaaacccctttatctcatggagtaatggggctccaagtgttccctgtcccagcaaggggaatgggaaagatggagtctcctgtccctggaagtcctactcccccttcccaccctcttggagagctgtgcttggcagactgggccagggctgagcagtaggcacttccagggaaggggctgggacacacatgggatgtccctaagaggctgaggggaggattgtcgcactgagcctaccctgctcgcaatgcctcaacacacatactcattacatacaacacatgcacatacacacacacacaaaacacaccaaccacacaccacatctagaaaccctgatatccatccacacatcaacacatgcatttcaaacccaggactcactaagtgcacacatacacacacggaacatacacgtcaccatagacactacatcctgcatgcaccacactctaatggccacagcacgccacccgcagacatgctcacattcaagagtttcacagaaatgcccattcacacatacacaatgcacatcctacgcacacccaatacttggcaccacactcgcaatcgtgttcaaatgcccacactacacagcaactcgctctctctacagcccatctcacaccctcaggagtcctctcacccctgtctacactggggccacatcagcacaatggttatactacttatctctcccacaagcccatacacctgagcacatctgtacagcgcatccccatcccgctccccaccacaccccacccccgcacccggccgactccagcaagaggcttcccgctcggtgtgcagcggccacagtggccaggaattaaaatgcagcgaggaggagccgggcgcgtcagcaccgcgtctccaggagcgcacggcgctcacggccgccgccgccccgcccgcccggagccgcggggccagcgagctgaggagcaggtgctcggagcccagccgcgccagcgtcgcgcggccgctgcccaagttcgcctggggcccaaagagggttctcccgggcaaccggggaaggagcttagccggcgtcacggccaccgcgagctcggagtctcgagaggagaagggcgcgcggagcagcgagtccgggtcacccccgggaggtgttggcgggtccccgcagtccccagctcttgtcgccgcgggggcagagagaagacgcgagagacagcaaggctgggcttttctggagacgcgaggcacctgggagagccgaggcgagaagcgacacttccctgcggctagcatccttgaaggaccccggcggcgaacagcctcccgcaggacgccctgagaagctctcagccccaggcgagagcgggcgcctggcaggacttaggcgcaggacttggggaagcctaagcaggtctctgccgagcgcagcccagggagcagtaaca

SEQ ID NO: 17745 - DNA, 2300 bp, Homo sapien
ctttcaggtcttttttattggccatctgtcctccactttcttcttgcttccagggaggtgggtctgtgtctgtggctggatgcagtgagaggagccagaaccaacacccagtctgttcttcagccagaggggtgaggctgagtccactaagctggcacctccacggtttgccctcggcaagcgcctgatgcctaaccaacctcacccatgaagtcaagggtcattcatcaaacccattttcctaagcatctcctacatatcaggcactgtgccaggctgtgggaatgcatgatccacatggtccctgctcacagaatttacaatcttgtgctagaaactattaaactaataatgacacaaataattataaaataaaattgcaggaagtctgcatgtgtcagctcctgaccttccttctacttccaggactgggtttgattaaaagtgaggctactatgatgggccactagaagatctgggaggtgaaatccagtcccaaatctcctctcacccactgactcttgggacagcagagcaagtgaataggaaagaaaaagaaagaagatgctgtaaaaaggtggcttggagctggcaggtgctagtgcaatggatgggggaaaccatataatctgtcatttccatctcttccacgtcactgacattggtcctcttgaccctgtctcagctcagacctgcatcatcttttcacgagatgattgtggcagccttctgccgccagtcttgcctctcacccagcccaagatagcctcgatagaatcgatacaagtctgcagagaacctctcctctttctgcctagagcagtatttctcagccttgggactggtggcaatttggggctagataactctttgttggctggggctctcctgtgcattgtaggatgtttaacaacatccttattagtagtgacaaccaaaaatacgtccaaagattgccatatgccatatgatttgggaaccactggctcagagatattatgcccttgaacttgatattcaaagctctccatgatctgattctaagctgtatttcaggccgagtgcagtggctcatgccttaatcccagcactttgggaggctgaggcaggcagattgcctgaggtcaggagttcaagaccagcctggccaacatggtgaaaccccatctctactaaaaatacaaaaattagcctggtgtggtgccacatgcctgtaatcccagctactagggaggctgaggcaggagaatcgcttgaactcaggaggcagaggtggcagtgagccaaaaagagtaaagaaagaaagagcgaaagaaagaaagaaagaaagaaagaaagaaaaaataagctttgtttcagtatgctcttcctctgtcctgtctctcacattctattatgtagccataatcaagtatatgaaattttcttaaagtgccctacctttttcttcttgcctttggccatcctgttctcttgacttacagggccatgacatcttctctatctattaaaagaaatctacttgtgtcacaagattcaaataaaaggccttgtctgagaagcttttccagatttctggcatttagttatcttacctgtcaaataaggataaaaagtctgccccatggattgcctggaatcaaaatttcagagttgtaggagacctggggaatcaccaatgtcttctttcagggagatagacagaaatgcaaagaagtggattgtcttgcggaagtcatagccggatggaagataagctgcacctagaacttggtgttctaaattccgagatcaatattctaaacccacttgtcagcttttgcaagatgaagacactatctaatcaacaggaaagttaactttgtggccacaaggtcacaaaaactctctgcacctcaatgtttctctgtaaggtgaagggctaaaccagctgttccccaaaaatcattccaggatgctttgtgctactatgcttctaattttcttttgagaagattgtcatttaatcataagctattcttacggggaggtattcataatacttcccagtccatctcattgtgggggctggaaatttctgcccttgctacgatgctgtcaaaattgaaccccagagctcagctcccaagaaggttaacataatggttttgctactcatcgtaacaacacctcacatcatgccttcagatcactccccagcatcattcttcaaattcaaacgcgaaccagaagtgacaaatgattcttgtaatgcgctctttgacacaaatcatttctgattgctcgggaccccagacaac

SEQ ID NO: 17746 - DNA, 2300 bp, Homo sapien
gtttcacgtggtcattcagggatccatgctgatggacactgtcctcctccatacacgacttcttttttattttttaatttcaattttatctttctttgttctgctttttggaagcatttcagaataagtttgtaagatttcaacaccacacatggcttctgaagtcagtcaagggattaatgtctattggcaggaggcgatagagagaggagaaggcacatcagcttcataaccacttccactaagaagtgacatttttggggccaggcacagtggctcacgcctgtaatcccagcactctgggaggccgagacgggcagatcatgagggcaggagattgagaccatcctggctaacacgatgaaacccgtctctactaaaaatacaaaaaaaaaccttagccgggcatggtggcaggcgcctgtagtcccagctactcgggaggctgaggcaggagaatggcatgaacctgggaggcagagcttgcagtgagccgagatcgcaccactgcactccggcctgggcgactgagtgatactccatctcaaaaaaaaaaaaaaaagaagcgacatttttattcccaccatatccattgctaagaactggtcaacatggcctcttctaatgcaggcaacctgagaaatgcaggttttggccaggcaaccacttccctacacagattcagtctttgcaagggagcaggaatccttgatggatggccattcatctctgcctctggccccaccccagctctgccttgagcaagttgcttaactactgtgagtctcagttccatctctgaaaaatgggaacaatcctaatacttaccccacaggatttctgcgctgctaaggaaagcaaaggaaatgatactcataaggcacttagactggtctgccaatgcatttgaaccaggagtattatttgtgatccattccaacctcctgattttccagataagcccccctcacatcaatgtgcacttcttctctcaattctaagcattcatacacagagaatgaggccaaatagtaagagcactttgaaagggatttatagcttagaggtgcccctcggtatagagcactggctttggagccacaggacctgaattctagtctaagatctaacagcaacacgttaggtcatttggcaatgttctaggaattctttgaggctccctttcctcctttatggggtgatggataacaatacatacccaagcttgctgggaggatgaagagcaacatcatatgcagaggccttgcaaaccctacgcacatgaatgtctgtttccttgccaggatctaaaaacgctttgaaggctgcataggacattgtaagatgagacacatcaccacacggaccaatcccccacagatctgcatcattttaaaaatgatctgtttggcaatcagcacatactgctcctgcctcgtgagcagagagagggttctcatcggcaagaagttgaagctgttcattttctaagacttctccctctcagcttgattctgcatgctcaaggttgtctggggtcccgagcaatcagaaatgatttgtgtcaaagagcgcattacaagaatcatttgtcacttctggttcgcgtttgaatttgaagaatgatgctggggagtgatctgaaggcatgatgtgaggtgttgttacgatgagtagcaaaaccattatgttaaccttcttgggagctgagctctggggttcaattttgacagcatcgtagcaagggcagaaatttccagcccccacaatgagatggactgggaagtattatgaatacctccccgtaagaatagcttatgattaaatgacaatcttctcaaaagaaaattagaagcatagtagcacaaagcatcctggaatgatttttggggaacagctggtttagcccttcaccttacagagaaacattgaggtgcagagagtttttgtgaccttgtggccacaaagttaactttcctgttgattagatagtgtcttcatcttgcaaaagctgacaagtgggtttagaatattgatctcggaatttagaacaccaagttctaggtgcagcttatcttccatccggctatgacttccgcaagacaatccacttctttgcatttctgtctatctccctgaaagaagacattggtgattccccaggtctcctacaactctgaaattttgattccaggcaatccatggggcagactttttatccttatttgacaggtaagataactaaatgccagaaatctggaaaagcttctcagacaaggccttttatttgaatcttgtga

SEQ ID NO: 17747 - DNA, 2300 bp, Homo sapien
aaggactgctcctttcctaaatttgggaagaagtgttccggatctgctttaacaacttgcattttggagacaaatatgcctgagttcaagtcccacctctgacaccactaactgtaacttggacacagcactttacttttgtgagccccagcttcctcacctgtacaatagggataataacaagaacatgtacctgtcaagatagttaagagggataagtaagatgatatgacaccctcacacaggtcctgacacatggtagacctttgttaattttggtcctcctgctttaaaaacctgtgtcctatcctaggagtccaggacctcttggttaacgaatatgtgaagtttatcaatctttgccattgtgcttgcttgtgatgcttctgttctctgagctcccaggatcaataaaccactgatttaatgctacaggttgcttcagagtgcacctggatgtttttgtcagtggacctagtttagcaggggtccagatggaatgaaaacatatttcagagtagagctaaacctagagggacgtgccctcagctgccttcttttccaacattgtccaaggagtatgatttaagcctggaaagccctgaagatgagagcttggctcatcaaggtgactccatgtggctctgccccagcttggcagtgtggcttgggatggccactcagactttctgttcccttccttctgatgggaatttagcaccattgattcagtaggttctagccatttgagctctggcatgggccaatagggcgagccacactcacctgctagcaggagctgactgccagtggagtttcaggaaaaaagaggtaggcagcggaaaggctaattctttgctcccacctatagttccggctgtacttccatctgacaaatccaggatcagaatacacacacacacacacacacacacacacacacacactgcccaaatgtacttccatctgacaaatccaggatcagaatacacacacacacacacacacacacacacacacacacacacacacacactgcccaaatggaatggtatgcagccagtcccacctggagtcccagttgcctttctctttcaaatacagactctcccgacagctatgtggcggtgggggaggcgactacttgttgctccttctctgaggctccaggggcaacttggcttttctgtctcaggaggggctcctggctgctctcctagaatgccccctcgctgtctgcatcagaggcactgtgggtttggatcgcccccttccttctgcatttttagcattctcccctctggagatcccaggctgggtctaacctgggatccctgacattgatgcaaaggaatgccgcctccaacctcacacctggctcctaggagtttagcactgtcttcctgccacctggggggcggggtgtcatgtcaaccctcgaagaagcccccactagctaccttcaaaaaaggctaaaaagaaaacttggagaaagtccccagcccccaccagcccttctcccccgccctgcccttccccccaaggcagcctagcagggacagggagctggggcgggggaagcaggcaggctttgtgacctgggggttgtcccttttttcccaggaggcgaggagagaatggatcccggtctgagctccccgcttccgtccccagtctccagataccggtcctcgcctctccgcgccgcgcgctgcctcctctccccggtgctagcagcggccgctggcatttggaattctgcccacaaaagggggcctggaggaggaggagaggagggacggaggccggcggcgagaaacggcattcggagtccaaaacatcatgggaaaaggaaccgagcggcggcggctctgaaggctgtgccgctgcgcccgaccgcagtgcatcagcgtggccgccctgacatcccccaggatggttaacatggggcattatgcgctggttaacaggctccgagctgctcagcgacttgttttaagcattttctctctcgctctcgcttttaatcttgtctctagtggcgtgtgtaggggggaggactttatttccattggctaagctctcccttcccacccacatctcttccacatcaccttggtgtctccctaaataaaaccagccctccttatcgcctggaaaaaatcaagagctagagtttgaatgggttttatataaacactcacccctgtcagcgtgcggctgggctctcaggataaactcacagcatctggcgcgatgcttgccttgcgttctctcccctgaacgtcaaggtttaagca

SEQ ID NO: 17748 - DNA, 2300 bp, Homo sapien
aagaagatctgggaaggagtcagtcagagagccttgggccagagttccaggggctctgggagtggctgccaggtgagttgaacagtctgattttcagtggggtcccacacagatgggacgcggcttaggaggaatcccaggctgcgggcattccttggcccagtggccagatttcccgcacatgtagcaagctcctgggggaggaggttctggaggaatgcctggctgctgcggttcaggcgtttggaagttcttgtgtgctggagatgtggctggggtttgtctcacagtggaggcaaggaattgtaacttttttctgttattgtacaccttgaaggtgaggttaattaagtcctgttgtggggtttgagggccagattccaatttttggagttttatttaatgtcgggagcagatttgggtaataaaatgtatattgagaataagatggccttttgaccttttagggtctagggctgtaaagcgtctcagcgttgctgccaaacgagcaatgaactgggctggatttttatatttgatgaaaaagcctaaacgctatctgatttgggataaagaaaaaggagcattaaccttgactatgcctttggctccagccacctttttaagagtaaattgctgggcaggtgggggagggctagtcacagaacgaaactgtaagccggaccaggtgtgaggaggggaggtgataaaaagattatagggtggaggagcagaggctgaggaagaattgggacctagctcggcctggcgaggagcagcctggggaggaagggagaggtcagatgggtctgtaaaaaaggaagattagaaagactcagctatgcttggggttggtactgaggggacaggtgggagggaaagaaggaagatttgggacgagttgcactgggcacagagactaggaagggactgatgtgtaaaagaatgcctggacgtcaggcacctcagaccgtttgcctattttacgacaggaattatttggattttgcaggatggaaaaattcaaagtgccattttctggctatttggaactattgacgagtttgtattggggtcaagcggcattgcagaagaaaataaggcatttaggttttaggccaggtgtgagttgaagaggttttaagtttttgagaacacaggccaagggagtagaaggaggaatggagggtggaaggttgcctatagtgaaggaagcaagcctagagaaaagagagagtagagaaacggagggaaggggttcgggggttcttaccttccagaaaagtgggaaaaggggttggggcgcagagataagaggtcggggcatggaaataagggatgggactcagaaataaggggtcggggcatggaaataaggggtcggggcacagaaataagcggtcggggcacagagatacgaggttggggtgcagaaataagtgattggggattcttgccccctagaaaagcaggacttgccactaagggtgaaagagaaggggttgaggggtacttgcccctgccccaggaaagtgggacttgccgctaagggtgaaggagaaggggttgaggggtacttgcccctgccccaggaaagcagaaaaggggtagagacaaggagagaaggggttgaagtacttgccccttccccagaaaagcgggacttgccgctaagggtgaaggaccaaggcaggcatccctgcgtggtctgacacccttgaaacgtgggtgtataatcagagaggtgtccctgcagttattaaacaccaagggaaggctgccttcccagtccgtgaccggcactggagttttgggtccacggataaaacatgtctcctttgtctctcccagaaaatgaaaggaattgaaattaagacaagggagagattgaagagtggaaaggagaaagtggttgaggaacagtgagagaagttggagaagaaagtaagaagaggccgcttacctgatttaaaattggtgagatgttccttgggctggtgggtctgaggacctgaggtcgtaggtggatctttctcacggagcaaagaacaggaggacaggggattgatctcccaagggaggtcccccgatccgagtcacggcaccaaatttcatacgcgtccgtgtgaagagaccaccaaacaggctttgtgtgagcaacatggctgtttatttcattgggtgcaggcgggctgagtccgaaaagagagtcagcaaagggagataggggtggggccgttttataggatttgggaaggtaatggaaaattacagtcaaagggggttgttctttggtgggc

SEQ ID NO: 17749 - DNA, 2300 bp, Homo sapien
cggtccaccaagttcatggtaaaggatgcactaactgattagagagaggtttcccctgatatgaggaaaacttcttggaagatgaggtgagatggcctaggaagaaattcctacacaaagttgcacagtctctagtcctggaaacattttattcattggataagaatggattgaggcatgagcagaggactgagacaaacacagagaagtttcaacactggttggggagaaaaggagtaactagtgagattcaggcagaacaagaataaggctcctcaagaggcacaagcaaagcagggctcgagttgatttgttctctcttcatcctgctttttgtaattccaccagagtctgaaatggccactccatagagtctctgctctgggattctccaggaaaccaatatccatcatgagacatcaagtctagtcccaggaagaagagattctggaatggaaacatcctgggtgggagtctcagcacatctactattctgtctgagttactggacaaataacttcagttttaacctaacgaaagctgggttggttggaggactgggcaggcagcgctggaaagtatgtcagcaccatacctgactccctgaatgcactcaacaatgccattactgaccacttactagaaataaaacagtcatttgttgaatacaacccgtttctttttacaagtgtagtgaaaagtgttttctttcaagaaaccccatgcatttatagacattgcctcagtgaccctttatgaaagaagtcactagtctttgtatgcccattgggcaagggcaccgcaaggctcagaaggaggaggcagtgggctaggagaatcgagagatcagaattttaaactcagcccagccattaacatgcctcaagtactcctatcatatttgtaagagacaacagttcactgaaatgaattctaaggtctttgggtttttatcagtgtgcttctgtagtttctgaggaaatctaaggcacaactgaggaatgaagtcaggctttccaattcccgaaatactcctccactgcttactcatgtcccttggaaattaagaaggaagccaggagaatagctgccataaccagggatgaacttcttgtccactgctgcctgctatgctagcaacagcctcctaactcataatgacttagccatgaggaatgtttctagattctcctttagctgtctgcccatttggaagatgctgaggacagagagaggacccaagcaggcaactagttggaggacttgtacacgtttccttccagcagtatgtcagagaggtggcagcccactggggacagggctgcctgggttctgtgctcgaggggaccttgagcaggctatttaacccttctgtgcctcagttgcctgatctataacatgaaaattagcaatccctactagataaagttggggaatttacagagttaatatttgtaaaggtctgagaatattcctggcagagtaagcactctgtgagtatgacactggcatttcttctgcagcactacatgctgtctatgcctttgtccaagtctgaaaccctagaactcttagaattcagttcaatgtttacacaatcctacagttctgctaggcttctatgatgctactattctgcatttgaatgagcaaatggatttaatgcattgtcagggagccggccaaagcttgagagctccttcctggctgggaggccccttggaatgtggcctgaaggtaagctggcagcgagcctgacatgctttcatctagtttcctcgcttccttccttttctgcagttttcgcttcagagaaagcagaatccttaaaaataaccctcttagttcacatctgtggtcagtctgggcttaatggcaccccatcctccccatttgctcatttggtctcagcagtgaatggaaaaagtgtctcgtcctgaccccctgcttccctttcctacttcctggaaatccacaggatgctgcatttgctcagcagatttaacagcccacttatcactcatggaagatccctcctcctgcttgactccgccctctctccctctgcccgctttcaataagaggcagagacagcagccagaggaaccgagaggctgagactaacccagaaacatccaattctcaaactgaagctcgcactctcgcctccagcatgaaagtctctgccgcccttctgtgcctgctgctcatagcagccaccttcattccccaagggctcgctcagccaggtaaggccccctcttcttctccttgaaccacattgtcttctctctgagtta

SEQ ID NO: 17750 - DNA, 2300 bp, Homo sapien
taaaaatatatattttttaatctggaaggaaattaaccacttacatcttctgatgttgataatgtacaacaatttttttaaataagtgtttctaattttgccatattttctacaaccagcttatattgtttttaaattatttaaaagtttttacaacattctgcaacaattcagcagccttttatttttaccattcccaggtcttgtaggtgacaggtacaggtctttccatcataaatataagcaggcattttctctgggatcttaggcagggacatcttggggtacttcacttaaggattttctgaaggaaaaaggtttaaccaactggaacccatgagtacttccttgagctcctgacctgtctgggcaggacccccgtgttctactccaacttcatcgatcattcagcaggttatccatgatagttgtcttccaaaataaaagaaaaaagaaaaagaaagaaaagtcaaaggaaaggattctgctttttagaagcatcaggtggatggaacgtacaccctgggttagaaaatatgctgttctaatgtgttacattagagtgagctgggaagactccataaataaggagatagaaagtaggccaactcttcaccaatttctggagctgggagtaaaaacaatttgaaaaagagataatcgagagaatgagtagcctgagcaaagtcataggggtaagataaaacgacataaagctaaaaccagaatcaaagccttgcattgctcccaaattaatattcaaagttgtataatgctcaattcccccattgaataattttccttttttgcattccatgtccatgatccatggcccagttataggcatgaggaccccacccatggtctctcatcaaaccccttttcactgatatggaaggcgattagttggtgattttgtaatgtgtatgtgagatgaggagctagttgtatgtgagatgaggagctagattagtggtttccaaaatttattctttgtatttctgagatatgtgtgtgggaagaatgacaagaagtctcttgtctctgattcaaactgaaggtctctgattttgtcgataaatttgccttccctatattcttttacttggaaaaatattttcacagctcattagatgttttagaaacacagtattttaagatcttgatatgctgtgcagttccgatagcctataaaacaaatagtggttttaaaacatatcctcaaattattttacactcttcccattaagaggtatgactatgttccctaaccttgcacctgggatccttaagccatcatgcaaaatatctagccatgtggagggaccactggaaagatcacacacacacacacacacacacacacacacacacacatacagagagagagagagacacctgagaaattccatctggtccaactgctggctgttgaagtcctcccagcccagaccccagacactgaatgaaggccttgtgatatagtcaagagcaaaaaaacccagaagattgttattgttttaagtcactgttttcagatagattgctatgcagcaatagattattgaaatagacactacaattttaggtactattattctaagaatattgaattttatttttctgctaatgttctattattttacttttctctgggttttagaaagccaccaggatttaagacagtgaagaatctttgagtcctttgtagagttgaaccaaagtttgaatgtctctttgtggactcgtgtcctagggataccactccaaagggaaaaggggaatatcccttacatatctttgactttggtatccctgattccttcctttttctatagaatgtgtctcatttcagagaaactggtctcttgataatagccatagattacatactgtggtcttcctctacatagaccctacctcacctaccactcctggtcttagctgaaaaacaggctagcctcgactcatactgtcatttcctatcctcccactgaagtgcactggctcagcagatttattactccatagatttattactccattctatgattcatcctctctgcttcctataaaaggcagagacagagcttccagaggagcagaggggctgagaccaaaccagaaacctccaattctcatgtggaagcccatgccctcaccctccaacatgaaagcctctgcagcacttctgtgtctgctgctcacagcagctgctttcagcccccaggggcttgctcagccaggtaaggtccctctctccttctccttgaagcacattgccccctctctgggttatc

SEQ ID NO: 17751 - DNA, 2300 bp, Homo sapien
aatgaataatcgcttgctgataattcctttaaattcccgccagagttatgaaattattcttactacagaaacaatcattaaaccacgtcagacaaacacctctgaggtcaataatattccaaatttattctgccgagaattttttaaaacttcgtatctgccacatgtgcaactcaggcattcttggaaaccatccctgcggtagcatatctttacttggaagcagtgggaaaacttggaagaatatttggagaaatatccagactctgaggtctttccagcattcccaatctgcccttcttttttttttttttttgagacacagtctcactctgttgcccaggttggagtgcagtggcatgatctctgcccattgcaacctttgtctcctgtgttcaagcaattctcatgcctcagcttcctgagtagctgagactacaaacaccatccaccatggctggctaattttttgtatttttagtaaagacaggttttcaccatgttggccaggctggtcttgaactcctgacctcaagtgatctgcctgcctcagtctcccaaagtgctgggattacaagtgtgagccactgtacccggccctatttcctaataataaaaaacagtaacttctactcactgagtacctacagtgatttagtcattcttctaagcagtttagatacatgaactcatttaattcacacgacaattccctaaagtacacatgattagtatcctgctcttaccctagcagagagtggttaagtaagttgtccatggtatcacagctagtcagtcacagagccatcatccaaatgcagatatcctgaattcaggttctacattagactaacccaccaggaatggagcaggaaagaacagggaagactccacatttttggcctctatttggtaattatagttaactttttaggtaattatagaccaattatcctagatgggcacttagagactttgcaggacagcaagagctgtctctaatcctgtgcccatgacagacatcaccagtcaaccacaacacagtatttaactaacgcaagtcaactcctcagaatctttaacattcttgtttgtgctactgtaccaatcaatcaatttgatatgagagtgtgcaggaaaaaacaggaaacaggtttgcagtacctccacaccagtattcaatgctgtaatccgctgcagtgactccattaaagactttgcctcccttataccctctccaactagggtgcctagtgttatgaacaaagggatatgtataggttcttgtgttgcctctctctttgatatttttagccatcagataccttgtctgcaatgtgtgctcagagagtgaggggggaactagatgattgattttccaaatgtgttccctaaatgtgttccctggggaataagggcacgagaggctgcctattctatttcaaacaaatccccttcactacagtgtatttgatgagttggggtttgttttaattccatttggaaaagggctttagcagctaagcaaatggttttaaagtgcctcagaagtcaagattaatagaaactatccagttctgatgtcctatcatgctaaaatttcagggactaagattctgtgatcattacattgaaacacagcagcaaagctgtggtgtgttgtccttcctggttcagagatgcaactatgtgcagggctgctgagctctctctgcatctgggtgggagcctaatggaagttttggggctccttcctggtctccaaaatcctcaagaccaccatgtgaacacaggaatcaaggaaggttcttagatcgactcatcccccaggcctttggtttccttgctcctttccccaactacaggtgtttcatttcaactcatcccctagggccttggttttcttgctctcttcccccactacagatgtttaacttcatttcataaccacatattcccctccttttccaaggcaagatccagatggattaaaaaatgtaccaagtccctcctactagcttgcctctcttctgttctgcttgacttcctaggatctggaatctggtcagcaatcaggaatcccttcatcgtgacccccgcatgggcaaaggcttccctggaatctcccacactgtctgctccctataaaaggcaggcagatgggccagaggagcagagaggctgagaccaacccagaaaccaccacctctcacgccaaagctcacaccttcagcctccaacatgaaggtctccgcagcacttctgtggctgctgctcatagcagctgccttcagccccca

SEQ ID NO: 17752 - DNA, 2300 bp, Homo sapien
taaaatccgacaacatataaaaagaattataagctacaaccaagtggaatttattccaggtatgcaaggctgatccagcgttcaaaaattggttgatataacccatcatatcaactttctaaagaaggaaaatcttattataatatcaatagatggaaaattttttttgacacaattcaacagccattcatgatttaaaaaaaaaaactctcagcaaactaggaatagagggatacttcctcagctttatagagtgcattaaaaaagacctacagcaaatatcatacttaatggtgagaaactagatatttttctcctaagattgagtataaggcaaggatgtttcttctcaccactccaattcaacataatactggaaggcctagccaacacaacagcacaagacaagaaaataaaaatatatacagattagaaagaataaataaaactgaatttatttgcagaagacatgattgtctgtgtagaaaattacagagaatcagcaacaaaaaaaagtcatgccactaataagcaattttagctacaggatacaaggctaatagataaaattcaataacttcctgtatatcagcaatgagcaactagaatttgaaattaatacacaatactatttacattaacaccaataaaatgaagtgtttagaaattagtctaagatgtacaatatatatgagggaaactacaaacttctgatgaaagattaaagacgatctaaataaatgaagagatattccacatgtatggataggtggagttaatgttgtcagcatgtcagttcttcccaacttgatctgtaccttcaacacaatcccagtccaaatcccagcaggttctttttggatgtgatagactgattttaatgtttatatggaaaggttaaagatctagaatagctaacacagtactgaaaaagaatagtcagaggactaacattacccaacttcaagatttactattaggaaacagtaatcaagacggtgtggtattggtgaaagaatagacaaatggatcaatggaacagaatagagagccctcaacagatgaatggatacataaaatgtactatatacatacaagggaatattactcagccttaaggatatgtagcatatcatatgctgccacatagatgaaccctgagatccttacgctaaatgacataagccagtcacaaaagaaaaatactatatgatttcactcacatgaggtagttagagcagtcaaaatcagaaacagtaagtagaaatggtggttgccaggggcttgggggaggggaaactggagatcaataggtatagaatttctgtttacagatgaaaagagttattgagactgttgcacaacagtgtgaatgttcttaatgccactaaactatgcacttaaaaatggttaagatggtatgtgcatttttaccacaataaaaataataaatgaataaagaacaaaggaagtaattagctatcaaaccacaacaaggcacggagaaaccttaaatgcatattgcttagtgaaagaagccagtctgaaaaggctgcctactatatgattccaactatgcatatgatacttgggaaaagacaagctcacagagatagtaaaaagatcagtggtagccagagatttgtggagaggaaaaaggatgaatagaagaatacagtgaattcttagagcaggaaaacttctatatgatattgtaatgatggatagatcaggcctgcagggggagtagatgaggtcagtcttttgcaaacctggttccttcttgccacgccccgcccacagccccactgtgtgtgaaccaagagagttggaaggccttctgcagacggacccattccacctgaatctccatgacatattggacttctccatataatttcatttggaaagaaacttgagcatctaaataaaatgtttggaaaccaccatgctacaagaccagcatgtgctgtctagttcttaccctctgcaacagtaagattctggggcattaagacttagttccaggattctgtcattctgccaacgttctgtggctggggttctaaaggagcttgcctggcttagaactgcaagtgactctagtgtgatggagagcaccagcaaagccttagggcccatccctggcctcctgttacccacagaggggtaggcccttggctctcttccactatgacgtcagcttccattcttcctttcttatagacaattttccatttcaaggaaatcagagcccttaatagttcagtgaggtcactttgctgagcacaatcccatac

SEQ ID NO: 17753 - DNA, 2300 bp, Homo sapien
atattcctaaatctaaaaaggaaaaacaggggatagctcagcaaacctggataggagagtcatggagaaaccaccttgaaagaagttaaaaccattagttgagggatgtatccaggttgaggaacacagggagacaacagaggagaagaacctcaacttaactcttctccctgctctaatgtcctcagaagctcccttgtgcctaaacccagtcagaagctagaaggtcagcaacctcactgatgtaacccaccaagattggcttcctagggcagagaatagaatggaaaagaatggaatgtgtgtctgaagggacaagcttataatatccttttctcaggtgagtcttgacacatttttgtgtcaaagttaggtaggtctcaaaatgaattgagtggtgtacaatcttttgatattctctggaagagattgcacaagattgaaatgaccacttccttcagtgcttggaggaattagctgtttgtgccctttgagcccagagaatgttttgtgggaagattttcaattcctgattccatttctttaatagctttagaatgactttctattttttatttatttgtgcaccctggtcagttagatttttaagaaattcatccatttcctctaaactaaatttttggcataaggttcttatcattttctttttggtgtctgcaggctctgcaactggttatatgtacctttttccttttttcttttctttttttttttttctgggacagagtcctactctgtcactcagactggggtgcagtggtgcaatcttggctcactgtaacctcggcctcccaggttcaagcaattctcctgcctcagcctcccaagtagctgggattacaggcatgtgccaccatgcctgggtaatttttgtattttttttagtaaagacagggttttaccatgttgtccaggctgctctagaactcttgacctcaagtgatccccccgcctcagccccttttttcttttttttttcattttcagttcaggagagttttagcttaattataggctacagaaccagctttgggcttcatctatcctttctaatatttactgtttcctatttctctaatcctagctctttatttcttccctttactttcactgggcttattttgctatagtggaatgcagagggatgagtattccaggaaggcacaaaaactgtgccaagtcttggagctagggatgagtgggaaagggacatgttcaaccattttaagccattccctccccacctcccagctcccagatatgtgcccctcgcaggaggagcccaggaatgggccaaacacctcacttctttgctctgagggccaccccagccctcccatcaacagctctagaaacccaatggtccttcctggaaacacggggcctgcatcaatcagaggtgtttgaaccatgtccctctgggcctgaggggcagaaggggacacaatatgtaatgtaaggagcccctgtcatcagaaatctgacttaatctgtttcagatattagacttccacataaaagttgacttggaaaaagacttctgctgctaaacaaaagttgaaactgccttggtgataaaatataagcagaccagctttctcttctagctttccctctcatttcccataagattttggtcaagttatttaatctctctgcatccgtttcctcttctatgaaatgggcatgataataatggtatgtacctcctcaaactaaatatataacgtgaacagagtccttagcacagcactctttctctacaggagttaattttcattgtttttctctttcctgttggagaaagtaagaagaaaacagctcctttatggcttcccatggtgaatggctggggcgcgtctgtgtccctttctcctctctggctccttgtggcctgaacagccagaaggaagccatgccatgctgtttcagccctcagcttccctcttgcatttcctagaaaagtctttggtgcccagctccagctcagcagattcaggatcccccttcatcatgacttggtcaacgccctgctcaggccaaggtcctctgagagttccaagcttctccactccctataaaaggccggcggaacagccagaggagcagagaggcaaagaaacattgtgaaatctccaactcttaaccttcaacatgaaagtctctgcagtgcttctgtgcctgctgctcatgacagcagctttcaacccccagggacttgctcagccaggtaagtcacctcccttcgactctccctctctttccctctgtttctctat

SEQ ID NO: 17754 - DNA, 2300 bp, Homo sapien
ttttttctttccaacatgtacatgcacatgtgttttgattctcatcctgaaatgggactaagatattcagatttttacaaaagctctcccaaaacacttcaagagccactgttgtagatagtctggaagagccctttcaacttggacatttccatgtttggagagtggactaaaggaaagtgttgcaggaattgtatggcaatccaggcatgagagttctcacaagaggctgagatcctatctgctagatatggcagaagtgcctttgtggagacaatgacatttgcaatgggtaggatgttcacagagtgagacagagaggtgggctctgcaggtggaggttacagcaggagcaaaatcccagagatagtacagcaagtggcagttacttgcaatcaggaattgcaattacccgaatgtgctggcctccactgaggcatgacatgaagaaccacaaatatccaggtgagtagctcggtgctccacccaattgatggtgtggagccactgcaggtttttgagctaaagactgcacaatcagagtagatcagtctagccatcactctatataatgcacacaggcttcatgatttcaatgcctagatttggctcagctactttttcttgagcacctactatgtgctctttattccgagtactgcatacatctttatgacccagtcttctctgtagctgtacagccacatctctctgcaaccactctctcactcctgtcactctccttggaccctacacttctgcttttcctgatgatttgaaatgaagtgtgctcccttatgccttgttgtcctcatagaagaccctgcctctacttagctttcccctctccacatcagcacacaggagatattgcttaaagaacattctcctggctggggtggtggctcacactggtaatcccagcactttgggaggccgaggcagaaggattgcttgaacctaggagttcaagaccagcctggggaacacagtgagactccatctctacgcaaataaaaaataaaaaaattatctgggcaaggtagtgcacacctatagttccacccactgtgaggctgaggcgggaggatcgcttgagcccaggagtttgaggctgcagtgagtttgcaccatggcactccagcctgggcaacagaatgagaccctagaaaaaaaaaaacaaaaaggaaaaattccctggctgaggctggaggattgcttgagcccaggagtttgaggctgcagtgagtgtgtgccactgcactccagcctgggtgacagagtgagactctagaaaaaaaaaaacaaaaagggaaaattcccctggcaggactctcagatgctgctgagtagctctcagtcctctctgtaacccaaacataacacatctatctctgtgcttacactgggtggctttcacttgtttatctgtgaattgaagagaagttgcttgaggtcaggcagtgctcctcattggtaactgccttctctggggctaaccaaggacctagaacagaataagctattgaaaattgttgaggattaaaaaaatagaaaaaatagaaatggcaaatatctaggccagtcactggacatagagaatgttatttaattcttatcgcacgtccttgagacatgtattgctatttgcattttgtgtgaatatgaatttgggtaagtttatgtaatccctcctctgcagaactgggattcaaatgcaggtgtatctctgttcaggtccagactcttctgccctgaagcagtagtacttggatggaatgacgtagggttggacaagccacacagaggccacttcctctcacttacttttctttgcttcccactcaaccaggacagttcccacgcactttttcaagattcttatctgctcccacacttagggaagttcccaatgcaacctatcaatccatcaccaccacgaataccagccaggagaggtggggaaaggagtttaccacatggtcgctgggtgtgagcaactgttccctgtccctatggcttcccacttgtggctcccaccatggcctggagttttgggtggagtttttcaaataaaagccctcagcattgcaggacggcacagtggtgagctcttagcttcaccaggctcatcaaagctgctccaggaaggcccaagccagaccagaagacatgcagatcatcaccacagccctggtgtgcttgctgctagctgggatgtggccggaagatgtggacagcaagagcagtgagtgtggcaggcatcattttgcttctctctggggagggcagaaacgtgg

SEQ ID NO: 17755 - DNA, 2300 bp, Homo sapien
ataaaatcattgccatggatccgatgcctggttgacagatgaggtgtgaaggttgacttgccgggtctgatctaggttgcactctaatggaaagggcctgatggtgggaacagatatcactccagccacccctcccgctagtcagcaggtgcctgggtgagtatgcaagaggggcagttccccacccccacctcatgcctctttaaaggcttgctaaacaacctgtaggaaagcactgtcccctcctcttctccgtcttccttccccagcaacagaataaataggtttcccacagctgcgccccggacccatcccgcacgaagctgagccccagagcccccgcggcccgagaggagctgggcacagcagcgaggctgattcccagccagtgcccagcgaactctgggggtgggggtagggtgccccctacccgcgcctctggaagagcggctgcaaaacacctccggcgcccggtggggagcgtgcatcctttgaaaagggacatcagtgactgcggtggcgtctaccctggagaaacgcagctgagggaggtggaggctcctcccgccgcagctggccggccccattcgggtcccagcgctagccggcgttgggaaggaaaaatcaaacataaaataggggcgagcggaatcgcgaggtcggcccttggcccgagtctcattaaggagccgcgcgcgccgccaggctaggaatgcggaatggacacgtggacagaggagggggagctaggagtcggggagtctccgtggcgcgcgagctgtgggccgcgcgctcgggggccacgtgaccacggggaatctgggaggggtgggagtgagcgcgccaagctcggcgcccgcttctgcccgggtgggcgctgaatcccggacggaggaggagggcgggcgagcgcgagtgtgtgtgtctctctcgagtcatttacggcggagcagccggcgcgagcgccgaggaggcggcgacggcggcggcggctgcttcgtgcaactgtggcttcccccacctcctcttcctttttgctcctcgattcttcttcttcccccacacacgtccatggggagccggctcccctgccagcacctcctctcctctcggccccgtaggcaccagctgccgcttccctggccgcaagctgcgcaggtgccggctgccctggcccctggcgccgcgcccgcgtctcaccgcccgcagcccggactggcgcggcgatccgctcgcccaaactgactcggagggagcgggagccgatgcccggcagcatcgagacagcgggcgaacgggcgtccggggacagggtgggggcggcggggaggaggcgtcggagactctgaaccccagaaaagttcaaggtttgtgcaggttcccccagggaaggcgaggagcgaggcggggcagcgcgcctctctgccgagacagcgagaccttagcggggtggcccggagctgccgtgagctgcaggagcccctctgcatcttacagcgtttatggtcatcaagctggagtcgacgtcctgggcaggaagggctcggggcagggcgcattagccggctttctcgctccctcgcttctccaagccccatctacatggggcagcccgttctggccgcgccacccttgccccagccgccgagcggctgcctgggcaggaggcgctgagccggcctgtgtggagcctgggccctgatccagactggagaaagcgcgctggagcggaggagcgagccttgcgaggggacaaacatctggccgcccgcctcgggcatccggtctgggcgtcgcctagggtggtggcgaccggcgtcgccagtttcagcaccgcacggaaacttttccttctccagatggattaaagttgtctggattttctctttctttgagaaagacagcattcatttgcacctgacctgggatttttatgctgggctgctgcaggggcttggaggaagaaagcggcgctatccatgtgcggttactaccgaaaccgaggaaactggggattgcgttggaagtcggcaccctcgagtgagttcggattcgagctgggccgtgaggccgggagattcagcactgggctctaggtagcccccgggacgcccgcggccaccgggctccggactgcacgtgcagctccccccgcgcctcgcagatcctgcagggggcaccagctgggggaggtggaggctcctcccgcccggagctgcgcccccaccggctccgagggtgtagccgccagcgcctgggacgccccctccccgcaaagtgtccccgaattgcactctctg

SEQ ID NO: 17756 - DNA, 2300 bp, Homo sapien
gatccggaggatccctcggatccctctagatttccgtgggcggacacgaccccagaccttcgggttcgaacccttctttataaccaggagaggactggagcgacaccctccccccacccttttctggcgccgggctcggtcccctcagctgagctcgccggagggctcgggggctggcggtaactcgagctgcagccagagacgccaaacccggagtggcggctgcgagtccagggggtgtgggtgctcctctccccagtcttccccgtaccccctccagtggcgcctgccgcatcctcacccccagtccgcgccgcgacacttaccgtgggcgagtagcgctgagaggcagagcagggcggcgccgccgcggcccgacatccccggggccatggccgaggcgggggcgggaggggtccgagagagcaacagtcgacgacgacttggccccaggctgggcttggtcacatccaactcagggctgccgtggcgcccggctgtctcagatgcagctccgggaccagagagtgcaattcggggacactttgcggggagggggcgtcccaggcgctggcggctacaccctcggagccggtgggggcgcagctccgggcgggaggagcctccacctcccccagctggtgccccctgcaggatctgcgaggcgcggggggagctgcacgtgcagtccggagcccggtggccgcgggcgtcccgggggctacctagagcccagtgctgaatctcccggcctcacggcccagctcgaatccgaactcactcgagggtgccgacttccaacgcaatccccagtttcctcggtttcggtagtaaccgcacatggatagcgccgctttcttcctccaagcccctgcagcagcccagcataaaaatcccaggtcaggtgcaaatgaatgctgtctttctcaaagaaagagaaaatccagacaactttaatccatctggagaaggaaaagtttccgtgcggtgctgaaactggcgacgccggtcgccaccaccctaggcgacgcccagaccggatgcccgaggcgggcggccagatgtttgtcccctcgcaaggctcgctcctccgctccagcgcgctttctccagtctggatcagggcccaggctccacacaggccggctcagcgcctcctgcccaggcagccgctcggcggctggggcaagggtggcgcggccagaacgggctgccccatgtagatggggcttggagaagcgagggagcgagaaagccggctaatgcgccctgccccgagcccttcctgcccaggacgtcgactccagcttgatgaccataaacgctgtaagatgcagaggggctcctgcagctcacggcagctccgggccaccccgctaaggtctcgctgtctcggcagagaggcgcgctgccccgcctcgctcctcgccttccctgggggaacctgcacaaaccttgaacttttctggggttcagagtctccgacgcctcctccccgccgcccccaccctgtccccggacgcccgttcgcccgctgtctcgatgctgccgggcatcggctcccgctccctccgagtcagtttgggcgagcggatcgccgcgccagtccgggctgcgggcggtgagacgcgggcgcggcgccaggggccagggcagccggcacctgcgcagcttgcggccagggaagcggcagctggtgcctacggggccgagaggagaggaggtgctggcaggggagccggctccccatggacgtgtgtgggggaagaagaagaatcgaggagcaaaaaggaagaggaggtgggggaagccacagttgcacgaagcagccgccgccgccgtcgccgcctcctcggcgctcgcgccggctgctccgccgtaaatgactcgagagagacacacacactcgcgctcgcccgccctcctcctccgtccgggattcagcgcccacccgggcagaagcgggcgccgagcttggcgcgctcactcccacccctcccagattccccgtggtcacgtggcccccgagcgcgcggcccacagctcgcgcgccacggagactccccgactcctagctccccctcctctgtccacgtgtccattccgcattcctagcctggcggcgcgcgcggctccttaatgagactcgggccaagggccgacctcgcgattccgctcgcccctattttatgtttgatttttccttcccaacgccggctagcgctgggacccgaatggggccggccagctgcggcgggaggagcctccacctccctcagctgcgtttctccagggtagac

SEQ ID NO: 17757 - DNA, 2300 bp, Homo sapien
ggtccaggtgctgttctacgtagccggccgggactgggacgacttcggcgtcaccgagcggctgccctgtgtccgcctgcatgccttccgggatgcccgggaagtcaagagctcctgccgcctcagcgggggcctggccacttgtctggtgcgggcagagctgcccctggcctggttcgggcccccagcccccgctgcgccacccacggcccgccgcaagtccccggacgggctggagcccgaggcgacgggggagagccagcaggccgagctctactacacgctccacgcccctgatgcgtcggggggctgcgggggctcccgccggggggccgggcccggggtgggggcccgagcggaaagccctacccagcaccccctgctgcgcatcgggagcatcagcctgttccgcccgccccccaggaggaccctgcaggagcacaggctggacagcaacctgatgatccgcctgccagaccggcccctcaagcccggggaagtgctcagcatcctcctctatctggcccccaactcctcctcgccctccagccccagcgtggagcacttcacactcaggtagtagggaagatgggtggggatctggtttcccttccaagatcaaatgcatacctgactccttgtgggtgggttggggggtggggggacctcccagctgtatccctgtccagcatcctaatcccggatctgtcacttagcacttgagcaacctcaggaagatacctcgcttattggagcctcaaggctcttatctgtctaatggcaacaaacattcctgcccctatttctggatctcatagaaatggcatcatggtaaagaggaaatatcagtttcacaagcatagatttccagaataatagaactgggactagaagggcccttagacattttacagacaaggagactgaggccaaggaagagaaattgggtccagagagcagcctcttggctgggagccaaaagaatcgtgtgtgtgtgtgtgtgtgtgtgtgtgtgtgtgtgtgttttgggacatttgccccagtcctagagttgggagaaaaattttcagaattcccagctctttctatccttctacaccttgaaaaggacacagtttgcaaactcaaaaatgccttaaattgtatcacatccaccccaaaaatgataatatttcacactaggaatctgtggtttgagttatgttgtgtgactctgaggacacccaccaaaatgcttcctcagccccaggcactatgccttggacctgaaacatcactataagcctgcagcttctttaagtatttccctgtctcctcagtgtcctaccttcaagtttaaatgctgtcggaaagggtcatgcctcattcagtgattgatacctgaatgtgaacataagtgaaatcagtcatcagagatcttgggctgcattaataggagtagagcttgcagaattagagaggtggcaatcaccttgctttagccaatgttcattggagtgcagctgaagtgtcgtatttagtatgggatacttcacatttagtgtccagaggagtgtgactggctgtgaggtgattcagaactatggcaaaaaacaattggaggcactgaaggaaagaagattcagagaacacctactcacctcgccagctttttgaagaactactacagttaggacagaggggaattgttctctgttgcccagcagagcctgtggctgttttagctcagctacatccagggaagatctttctagttttcttggtctttctgaaaatggaatgggatgtgtgcagaagtagtgagtcccctgtcactaaggtatgccagtagagattaggcaaagacttggcagggatacggtagaagggattgcagctttcaccgagggtcagagttttcagctgtgtgataccagattccccaagttcatctgaaacattcatctgaaacatccaggactcggggtaacttagcttatctgttccccctccccccagtacagtctagtgatggtggccaggcaggcagctttgggctgtagcctgaccctctccctcttcttcctcccactttgtcccagggtgaaggccaagaagggtgtgacccttttaggtaccaagtcacggagtggccagtggcatgtgacctcggagctgctgactggggcaaagcactcaacagccaccgtggatgtggcctgggctcagagcacacccctgccccccaggtgagcccgaggtggtgcatctacccacctcttcgcaaagcagccatctgagaggagtggggaatctttgaa

SEQ ID NO: 17758 - DNA, 2300 bp, Homo sapien
gggaatgagagtaaacagaacagaatttctttccccaagaagtttatgtttctaattgaaatagaaaaaaaatcatgtgtgtgattttatagtggacagggaagactactctgataagaacctggagagctaagaggtctctgaagaaacaagggagctagccatgtgcacatctggaataagagggttctaagcagaaggaatgacctctgaaagggtcctgaggcagaagtgtgactaggttgttacagtgtgcctggagcacagggagaggaggtgaggcaaaagggaccagattatggagtaccatgttgattttggatttactcttttaaaactttgtattatagaaaactgtgaacatatatagagagaacagaatagggaatttccacataactgttagctatctttatcaatttctaacatatgaagcatacccttccctctttccccctcccacctaggattattttgaagcaaatccagacatcatataccacctgtaaatatcatataatccataaaacataaaccccctgcttttacctaatatatccacaaaacattataacaccttaaaaatgaataactcattaatactatcacatttccagtttatagtctaatttgtctaacagttgtctcagatttttttcagttttgtttggattaagatctacgcacagtctgtatagtgcacttaggtgatatctcttttagtctctgttaatttgttaatttgtaggttctttcttcctctcattgtttttcaccttgataattattttggaaaagtctgattatttgtcttgaagagtttttgtgggaagatttttgattactcatgcaattttcttcttcttcttcttcttttttttttttttgagatggagtctcactctgtcccccaggctggagtgcaatggcgtgatcttggctcactgcaacctccgcctactgggttcaagtgattcccctgcctcagccttctgagtagctgggactacaggtgtgtggcaccacgcctgcctaattttttgtattttagtagagacggggtttcaccatgttggccaggctggtctcgaactcctcaccttgtgatccacccgcctcggccttccaaagtgctgggattaaaggcgtgagccaccacgcccggccccactcatgcaattttcttaatggctataggactaattaggttttctacttattttttgaatcattttggtaagtaatgttttcttagaaatttgtccattttgtttaactctgaaatttttggtataaagtgttcataaatatccttactggcataaaatttttataaggatcctgtttgcaggatctgtagtggtatcaccatttatttctggtgttatttatgcctttctttccttgttgtgataattttttcccagaggtttgttttcatttcacagtgtctttctctttattatttaatttacttttttggaattttgtggggacttttttgctgcttctgttttattgtgatagctacttaggttattaattttcagtctcctgcttttgaatacagtacttaagaccttaaatttttctcaaagtactattcagctgcatccttcaagttttgatatgtaatcttatgatttttattcagtttaaaatattttctaatttcaactagaagtgtgtttcttaacatggggaaattttagttatcttattactgatacctagcttaattacattgtggtcagagaatatgctctatgagatttttgctcctttgaaatttgttgacacttgctttatggctcagtgtatagtcagcttttgttatgttaatgtttcatgtacttgaaaagaatgtatgctgcagttggtaggtacaattttatatacatgtccattaagatcaaggtatcctgttaatcctgttgttcagaacttctatatccttattgatgttttgactgcttattctgtcaattactgagtgaaatgtataaatatctttcaatattattttgtacctgtttatattttactttagttttgagagttttgctttatatatcttgagacaatctttttagatgcatagtttttaaactgttacatattttctggtgcattgaacttttgtactgatatgaagtgacttttttctagtaatgtctttaaaagtataatttatctgatattgataattatatttaaaaaatctttacatgttaaaagctgttgtaccagctagctagcttccttccttcctgccttccttccttcctttccctccctcc

SEQ ID NO: 17759 - DNA, 2300 bp, Homo sapien
ttgaggtctaattcaacagtcttcagcatatctcaagactgcagtatttagctcacagccttggcttaaagatacacaagttctactatgcttctaattaaggcttattaaggtttattaaagtcagcagcatcagctcaccatctcatcgagcagcacattgccatctttggtgagtttgatgtcacctgcaccagaaacaagcctgttcagagaagaatgatattaacttcatgtggtaggaagacattcccagtgcttgccactccattatccttaatagagggaactgggctcggaaaacttccactgtaccatgggaatatgccatggtaattaccaccatttgcagctcacagaatcatttctccccagatggacagattatggagatttcattccaaatggactatttacaggtttaaagataaaagcacttgatgagttacgaactgtggtttggtcaaagaatacttggaagtctacaaagcacaaattcgcaaatttcctgcaggttttaattttggtgaatgttttcattcattcagtcactcaacttagtttccctcatccctgcatttattagatcaccaagttctatcaattctactacctaaatatctcttgaatctgccaccttctctccatctccactgttatcatctctactttggatggcatccggatatctccaaacttaaatataccctccacacatttttctttctaaaaggcaacgtgattcagtcagttccctgatcaaaagtcctccaatgatttttatgttttccatcattttcaagttaaaatccaaacacagcaatgacatacttgacctttcccaatatcttccctgcctcatctacttttccacaagcaaatcttctggttcccttaatataccatgttttgtttcgtttctgttggatttgcaccattggtctttcttattcctgaaattactttgcccaggcctttactccctcttccaactagtgaagtcttattcttctttcaagactgatcaaacatgttacttaagatgcttttccttctgccatcagtccctttcttcagcataattatatgcatctatatataattagcacatcctactctaccacatccgtctctaccacatctccttaagaacagaaaccgttatcttgatcatttctgtgtcccaacaactggtacctaagtgacttattttaccattaatattattttgttcattactatgaggatgtgtctctcctcttatacccttttgccctcactggtctcttttcctcactcttgtctatagaaaagggtgcttaatatatactgaaaagatgaatagatctgaacaaccatagacacggggtattcaagtagaacttggatttgaccccatgccttcctggctccaaagcctgtgtcctctccactacaatacattgccatacaaaaaacaaaactacttgttgaatttatggaccaagggtatacagtcttaaggagcagaggagttaaatgctttgtttccaatgagacactaaattaactgactttctaactgcatatgaaccttgacgacaagtcgggggtcggggaagcgccacagcttcactcccggggccctctactaggggaggcttttctcctccacctgcaccaggcgagaaatacccccagagcagggatgagaatgagggaaatcaagctcgcaagaacatccacagcgctacgcggacgcctgcctcagagggcgacaggacaccaacgggcccctagccgcgtaatggccgctccaaccgctgtctcacattttcatggtgcctttaggacccaagttggtccgcagcacatcctgcagccctcgggcggcgcatatattgacagccaaagctgcccgggcccgcgccacctcagccttggagttgacggcctttatcgcagccatagcctaaccgttcagagggagaaaaaaaaaaagccttagtcgcgattctgagcaaaaacggcaatgcgacgccacgctctcttgagcctcggccaatcatcgcccttacaggaagtgacgttatcatgcctcgcccgacggaaaccagaatcgttttgggtctggtcgccaagatggcgtcctccgcctccgcccggactccggcagggaagcgagtgataaatcaggaagaattgcggcggttaatgaaggagaagcagcgtctgagcaccagtcggaaacggatagaatctccattcgcgaagtacaaccgtttggggcagctgagttgtgccctgtgtaacactccggt

SEQ ID NO: 17760 - DNA, 2300 bp, Homo sapien
gacctgcaaacaaggaaccctaatttaccaccaaataacaaaatttaaggctggatgaaataaataaaagataatattttttccttcattcaagaaacagcaaatttatggaatgtgttatttaaagaaaaagaaaaaacctgaaaaacataaatgggttctggatttagggcagttactctctaaccctggcatatattagaataacctgggtgcttaaaaaacacagttgcctgggcccaatcccagatttattgaaggggaaggcctcagacactttaattattttaatgcttcataggtgactctcatgtgcaaccacatctgaccatcattggtttggtcatgtttggcatatagttttcttatgtttttaaaataaagcacactaagagaactgattaacctacaatgacttatgtgtttatgaagtgttctaaaaaaccatacaaaaaccaaagaaacaagaaaacaaaccttttcaacttgatgtagggttcagaagatacatacattccaaataccacagtaagcattcatctgaaagtttgccggttggtctttctattaattaaaaaaattcaaaacagaatacagatttaactatgtacaatatttacaacttacagattttacaacgaaattatacagttaagtctgtcgtggaaatgttggcattttggtatataacacttcagaaatttcaaaaacaactttacctcaaaaacatgttacacaaattttccaaagtgctgtagctcactggctcattttatctcaacaatccagtttagcaatccaggtacccaaatcttgaggcatgaagtaaccgctatactactgagagacagcactttttatacaacagcagaggctgttagaaaccttgggtctttaaaaccctataacaatgcccctttcaccctccaatcctgagacaacaaatcctgtagttccccctcatcatcgctgtcagcattctcttcttcctttttctgcagttcttttatggtcaggatttctttaagtttattttttatttcatcctggcgattccgtagcttttccacccgtcggtaacactctatctgctcatcgatctccccaatctggcggtccaaccgtccctcctcatcctcttcggcaactatggcttcggaaatagtgttgacctgcctcatggctttttggaattcgtcccactctttgtccatctgatcttttggagcatcaacctttcgtactcttgcatctacctcagggtcgtcaaaaaaaccttccggtaacgcttccgcggtgttttctctcctttccaccactttttcatgtatttctgctttctcaattgaccctgaatgaggaattatgggggccttgggaggattagtactaaagaaatcgtttggcagcacactacttgttacctcccgtgaagaggaaactgagtgctccttgccctgtgcgtcggagagcggcttgctggcgtcccccctttttctttctccatctccttcctcctcctcttcctcctcctcctcatcttcataatcggggagtaaactgagtcctgaaggcttactgggagtcgctctaatgaactcctttcctattttgtcaaagttggtggtccacgcagatgtggagggctgtacctgaggcaccaaggtggccttcgctctcttgacatcttggtcgtctgcgtccggcgctttcctcttgacggaatgaggcgctgaactggcggacgaaccctggctggcttccttcgcgcctttcagctcggccactttctctcggtgctgctttcccaggacgtgagtctgccacaggagctcgctcttaaccggagtgttacacagggcacaactcagctgccccaaacggttgtacttcgcgaatggagattctatccgtttccgactggtgctcagacgctgcttctccttcattaaccgccgcaattcttcctgatttatcactcgcttccctgccggagtccgggcggaggcggaggacgccatcttggcgaccagacccaaaacgattctggtttccgtcgggcgaggcatgataacgtcacttcctgtaagggcgatgattggccgaggctcaagagagcgtggcgtcgcattgccgtttttgctcagaatcgcgactaaggctttttttttttctccctctgaacggttaggctatggctgcgataaaggccgtcaactccaaggctgaggtggcgcgggcccgggcagctttggctgtcaatatatgcgccgcccgagggctgcaggatgtgctgcgga

SEQ ID NO: 17761 - DNA, 2300 bp, Homo sapien
taaggctgggcatagtgtttcatgcctgtcatctcagcactttgggaggccgaggcaggcggatcacttgaggtcaagagtttgagaccagcctggccaacatcgtgaaaccccgtctctactaaaaatacaaaaattagccaggcgtggtggcgggtgcctgtaattccagctactcaggaggctgagggaggagaattgcttgaacctaggaggcagaggttgcagtgagccaaaatcctgccactgcactccagcctgggcgacaagaacaaaactctgtcgcaaaaaaaaaaaaaaaaaattattagcccattgtggtggcaagggcctgtaatcccagctacttgggaggctgaggcaggagaatcacttgaacctgggaggcagaggttgcagtgagccaagatcgtggcactgcactccagcctgggcgacacagcgagactctgtctcaaaaataactaaattaattaatttaatttaatgacaataaaaggtatagtatactaaatatataaaccagcaacatcgtcctttattatcattataaagttttatatactgtacataatagtgtgtgctatgcttttatacaactggcaatggagtaggttcgtttccaccagcatctccacaaacacatgagtaatgtgctgtcactatatgatagggatttttcagctccattataatcttatgggaccaccctcatatatttggtccattgttggcctaaatgtcattatgtggtacatattattaatgagatattttactttttttagtatgaattttttggtgtgtattttcttcacttatagcacatctcaattccatgcaacattcaagtgctcaatagtcacgtgtggctagtgattacagcattggaaaaagacagatacggttgaggaaacttaaaaaaatgtagcaaatgtagttgtagagacgtgctcaagatcactcaattatcatagctaggacgtgagtctccagcgaccttccaattgcctggttgaaccaaagccctggttcattctgctgcgcattaaaagcaggctttactcccctccaaacagtagaatcgcagttaaacttagtcaaacaaacttaatgtatccaatacaaaactcatctttctaaccctaacacctcctcttcctctctattttctatttcagttgatggtaccattatgtttctgctcactcaaattattattattttatccataaacgagcactttatctagaagatcatttaaattctaaatgatcttcaaaaacgcactttactctccaccctaactagctgaatcatctcccacatgggtcactatgagagccttctgatttgttcccttgcctcagtctctccccacccagcttcagcagtattccctaagactcttcatggctctccgtcctctacagagtaaagacgacactcttcatcacacagcacagaattctctcgggaacctgttctttgcttacctaacaaggcccagttgtttgctcttcctagactctgaagaggtcacttaccctcaggctgctacatttgtaaaaatcgccatcccaactctcaaagagctggcttcagatttgagataatacactttgaatgatatacaatcaaggagtttctcctccatcactcctttacattttatatctatctgctgtttagtgcctcgtctcaattccatgaaagctactgaatacaaactatttactagggagtctgcgggacacaaacagagggattatatttaaaaaatagattgacgcgatctttgccttccccgacctcattacaatatagtttctccaccaatatctttaaaaacagatcctctctaacagtatgagaaaatcaaggggagcctcggaagttcaggccaggctgcgttccgaggagccgccacgtccccccacctccgcttcccgggccgcgattgcaggttgaaaactactcccaaacatcacagggcaggcagaatgcaactacgacccacgtggcagacgggggcggggaccggtcgcgtggccgcggccttggctcttgcgcctgcgcgctgcctcccgctctaggacccggatttaaagagacaggcgctccaaccgtcgtgggctgcccgcggcctgtaatgagcaagttccgaggcctacggtgagcgccggagccggagaggcaggtgaggggctacgcggcgcggcacggcgcggcggggcccggcgtggggaaggcagcgggcccggggcgaggagctcggcgcggccggggagccagccccc

SEQ ID NO: 17762 - DNA, 2300 bp, Homo sapien
agtcttatggggacatctaggagcctagattcctgttctaatcaggggtggcatttggaaccttattccttagcccttctccactcccaaggatactgtgagcctttgggagtgtcttcagggaaaagcagctggaacatctggctccggtagcttgtgagcagatggaattcctatctttgctatccttttctttcctaactcagactcagtttttcagagcctcagggggttcaggggaacatgttgtgtggcctgtgcttacctcagccttgccttcctgctggagcattgggaacaaagcagtcaggccatttgtttcatatgttcaagaggaaggctaagcagtggcctcattgtggagctttaatgcaggttcacgtgttctgtgaagcactgcaaatcactcaggagctgtttctggtgaggttggtgttaaatagacaccatctgtgacccaggaagaagtctgagcacacttttccagatttagtcctttccttaattttcccttacccagtattcactcatcctttgcctctcctgtgatttgggttcttaaagggctaggttagggattgaaggggaatggcatggatgtgctggcctttcctgttcctgctctaagcatcctgggtagtgatggctgtgggttcagggctcccactcagagaagacactgctcaagtttccttgctgcacctgagggagttcatttctacctttctggtttcaagtagtctgttctcccctaatccagtccccagcctgatagtcacacatcttctgcagtaggcactaatctctgcccacctaccctcctcctcctcccccgacaggtttaatctgtttcttccattttcctcaaaaattgtaccttctctacagcccatagaaagtgacccagcatgggttgacctcttcctgggcccggacagaagtactgaaacagatggcctctccctcttgtccaggtggctcgcaaggcctagctatatgttttgcacattagctgggccttccacatgttgttctatatcctgtctgggcccgggctttgccctccatggcatggtttgaggtccctgctgccatgtcatccctcaccaaagctccccttctgctttcaggtggcccactttaaggactacattccccaggcttttcctgggggccacagcatgatcttggattctgaagtgcttctgattgacaacaagacaggcaaaccactgccctttgggactctgggagtacacaaggtactagctcagggccatatgtgcaagaatgaatgagtgtgagtgagtatgtacatgtgggtgcacgctgcggtctgaaaagggaggaaatatcccttagtgtggcccttattcttcgcttctgacctgtttctggtttggatttttgtcttttgtttttctcctaaaaaggggctggtattgggaaccagtttataactgggttggtttccatttagcactatctgctcagtgcccttatggcccaggggcttcagagcagaaatagtactttttcatccggtgcctcagggggcctccagaagtggactggtactccttattttttcacactgacttttgtcctatgtgtacctactacctcattttcccttacagaaagcagccttccaggatgctaatgtctgcctgtttgtttttgattgtatctactttaatgatgtcagcttgatggacaggtgagttggctagcatctttaaacccagaaactgccaggaatctgttttcatttcctgggtgaggaagatgggggcttcaggttggaaaggagggtacagggaaccagctggcacatacgtttgtgctcaggagcttgccaaaggcaatggcaagagggagctgagaggaagcacaattgctacatgatcagttccccattcagtgtaagaaagagcccatgtgttgactccatctcttctctgagagcttaagtcacagaagaaacccaaacccccaaagaagtttctctactaaagcaaaatggactattgcagagaaatagactgtgagcatatggggtttcagtttatttctccaatggcacccctaggggctccagtggcacccctgggggcataaggcagatggttttcagctcagaggttttgatttcagaagagactgacaacaggaagctccggattataggggaggccatgggtgggaccatcttggagagaattagcagtcttgacttagctgcatccatatgcttgtgcctgagaaaccagtatcagccctttcctcacttagaaatg

SEQ ID NO: 17763 - DNA, 2300 bp, Homo sapien
tgggtgaagacccatctgtacccagtgtaggtctgaccccaccctgacccctctgcatttgcaggtattgctggacatcttcactggggtgcggctttacttgccaccctccacaccagacttcagccgtctcagacgctactttgtggcattcgacggggacctggtacaggaatttgatatgacttcagccacgcacgtgctgggtagcagggacaagaaccctgcggcccagcaggtctccccagagtggatttgggcatgtatccggaaacggagactggtagctccctgctaggtttgctgtcttccctctccctcaggccatactctcctttaccatactactggactggactcaggctggaggcagatagacacagtatagggggaatgggcttgcttctcccaaacccaccagttctccactgtctcttctggaccaggaattagttgctgtgggtgccacagctgaagtcagtttgtcttgctggtttaaatagatctttcagagctgggtgctgggtttgccatctttttgttttctttgaaaagcagcttagttaccctttttataaataaaatatcttgcagttatctttgtcctttccccacctacacccccaataatttccctagagattaaggagtaaaggctgggctatggcagctctgtccacaaagccttctctcccatccttgcctgttcctttgtacttccaggctcattttaaagttgtatttaaaggactgccctcggaaatgcttctgtttagcggaacttgtattcagcctgacacgctttgccaggaacaaacctcatgtgaaagaaaacaaaatgaatttttttactttcttctctgtgttctcctattacatggtgaggatccccagtttgaagggaggggactagggtcaggtaggaaaatggggcctttatgaagaaaggggaggttatttgggccactcctctggagggatagagggctccaggaagatctgcatccccaaaacctggaaacaagactgttctttaagaataaaaatccacatggggcttgaggccaagaacagcccttgttgccaccaacatggagactttgtaccatatcccattcttagtgctcgagtgttccaacctgaagttgaagaagccaccctggctgcacatgccatcagccatgactgtgtatgctctggtggtggtgtcttacttcctcatgactggaggaataattatatgatattgttgaacccccaagtattggctgatgaacgtgggcatcagaggccagtagctttcttggcctacaaagtaaatggacagtatattatggaaggatttgcatccagcttcctgtttacaatgggaggtttaggtttcataatgctggaccagtcgaatgcaccaaatatcccaaaactcaatcgattttttttcttctattcattggattcgtctgtgtcctactgagttttttcatggctggagtattcatgtgaatgaaactgccgggctatctgatgggttagagcgcctttaagaagaaatcagtggatactggatttgctcctgtcaatgaagttctaaaggctgtaccaatcctccaatatgaaatgtgggaaagaatgaagagcagcagtaaaagaaatacctagcgaaaaaaacaggaagcatattgaagctcggactagaatttcttcttggtatcagagagacaagtttatcacagtatttttttttttcctgctgacctattgataataccaacaatgttgagtggcattttcttcttagtttttaatttcttaaagaaaatatactccatatctgcagggaaaaaaataaaaatccacacctgagaacagatccatacaacctgcttacaaagaacagctcctgtgctacctgaggctgatttatttgaagaacaaaaggaagagagacaatttagtgtagacaagtgctattcaatagaactttttgcagcagtggaaatatccataaatctgcagtatccaaccaaactagccacagacagctgctgagcaattgaaatgaagctggcacaactaaggaactgaagttcttattttaattcaacttcaaatggtcacatgtcactagtgactaccacactggacagtgcaggtgtagacggagttcagatcagactcctgaaacttaatggctctaaccttaggcaagttacgttaacatctaagcctcaatccctccaagtagaatgggtgcacctaaatcatagggttgtcctgttgtcctgagcaacattatgtaa

SEQ ID NO: 17764 - DNA, 2300 bp, Homo sapien
gccctcttacaattgttaggttattctgacatttgagggattggatccagatcctctttgttttgtgatcgtaaaaatcatcagccctttgtccccagtacctgcatttgatatgtactatgggagtaataaaccaacactttttttttttttgagacaaggtctcactttgtcacccaggctggagtgtagttgtgcagtggcacgatctcggctcactgccatctccgcctctcaggcttaagtgatcctctcacctcagcctcctgagttgctggattacaggtgtgtgccaccacacctggctgatttttgtatttttttgtagagatgggattttgccatgttggccagactggtcttgaactcctgagctcaagcaatcttcccaccttggcttcccaaagtgctgggattataggcgtgagccaccacacctggccaacgcttctttttttttttgagatggagttttgctcttgtcacccaggctggagtgcaatggcacgatctcccgtcactgcaatctctgcctcatgagttcaagcaattctccagcctcagcctcccaagtagctggggttacaggcgcctgccaccccgcccagctaatttttatatttttagtagagacagggtttcaccatgttggctaggctgctgtcgaactcctgacctcaggtgatccacccgccttggcctcccaaagtgctgggattacaggagtgaaccactgcacctggcccaacacttttttttttttttttttttgagacggagtttcactcttgttgtccaggctagagtgcagtggcacgatctggggtcaccacaacctctacttcccgggttcaagccattcttctgcctcagccttccgagtagctgggatttcaggcatgcgccaccacaccctgctaattttgtatttttagtagagatggagtttctccatgttggtcaggctggtctcgaactcccgacctccggtgatccactcgcctcagtctcccaaagtgctgggattacaggcgtgagccactgcgcctggctccgaacacttcttaataaacctacagaggctctgattcagtaaggaagcaaatatttgttgagcttctacatggacaacagtgctagggaacagtactgtacataatgaataaatatcccctgccctggaggaatttatggcttagtagtagaaaataaagagcaagatataactgtgcaagaaagtataataggtgctgtgatagaagtttatctaggattgggggtacaaatgtaagagtagttttactggctggcaggaggggaaatcaatgaatggacaacatagtatagggaaaaggatgttaggtttggagtcagaagacctgggtttgtagaatctcaactctgtatattagctctctatatattggctatatatttgatttctttgagtctgggttgcatcatttatataaagcaatgaacaatagtcttccccagctcagcgccatggctcacgccttaatcccagcactttgggaggccgaagtgggccgatcacaaggtcaggagttcgagactagcctggccaatgtggtgaaatcccatctctactaaaaatacaaaaaagccgggcgtgatggcgggcacctgtaatcccagctacttgggaggctgaggctggagaatcgcttgaacccaggaggcggaggttgtgatgagctgagatcacgccactgcattccagcctgggcaacaagagcaaaactccatctcaaaaagaagaaaaacaaaatctgtttgaaaacacatcctcccctccaccttggtggcatgcgtgcattgagtgtcactgctcacctgtgctctcggacatcaaaaggacagtagaggtgtgtcttaactctgaccttttcccctttcctcccttgcaccagattttatcatgtgggcaacctgctgcaactggttctgcctggatggacagcctgaggaggtcccaccaccccagggagccaggatgcaggcctattccaaccctgggtacagctccttcccttccccaacaggcttggaaccaagctgcaagtcctgtggggctcactttgcaaacacggccaggaaggtgagtgctgacttcttggcctgctctgccactgcagcctatggaccatgggcaagcgccactgacccctctgaatgcctgcaacctttcctttccctgtgtgatgctggtgacccagagctgtccctttcacaaaaatgttcaagaagaactaactgagtaaaagcaaaagcaaagc

SEQ ID NO: 17765 - DNA, 2300 bp, Homo sapien
tttttaagctctaaaatgtaatcctcaacctttccactttaaaaggaagaactaggatggagtgtggctataatttggggcagttggttaaaactgtatcagagtcccaaagaggggaatgataagctgcagcagctctgttcacttgctcaatggtgtttctcttagtcaacttaggagttccatgcctttggccttcaggctgctctttatatagttcgtatctgtctcctgggcatagtactgtctggattttctctttctttttttttttttttttttgagacgaagttttgctctgttgttgcccaggctggagtgcaatggcacaatcttggctgactgcaacctctgcctcccgggttcaagcgattctcctgcctcagcctcccgagtagctgggattacaggcatgtgccaccacacctggctaattttgtatttttagtagagatgggggtttctccatgttggttaggctagtcttgaactcccgacctcaggtgatccgcccacctcggccttccaaagtgctgcaattataggcgtgaaccgctgtgcccggccctcttatttaaagttcgcaaatacagaacaggtcaggagcttttctaatcattttttttttttctgaaggaggttccatatttgtctgtaccttgagagttgtttcatactagaatttgtaacttatcatcaactacagaaattttttttaaagtgtggttgaagagataatggttgtcagctgctataaagatgtgtttatcattcagaaaggactaattaacatgtactatagggaaacttctttaaacaaagccattttctgaaaggaaaacactgaaggggaggaaataaaacagggaacattttataataccttatcaaagctcagcgtggctatcctactggaataatgtaattaaggagaattaagtgagttggataaataactttttaaaactagccccttgaatagaaaattaagtagtatagtttttaaactcaaattctgtctgcacgtacattttaattaacctaacattattgaatgacaagctgagttggcagctacatccagagttcatgccatgtgagacctaccttaaaggatgaacgaagctgggtgcagaggcctcaaatgccctgctaagaaatagctgatggccttggggaactgtcatacattttaagcaggaaacagaaggatctaataggaactttagtttctctcttgtcaaattaaagcacacaaaaagcaaggacttgatcttttttttttttttttgtataacaccaatgtcaattctagcctgtcagggcaaattcagtaattaatagctgttgatgagccagtcattctagattgattttttaaataagcaggctaataaatgagaattgacataaatttagggatgtctcttttcagagcaagtgttaaggtgattttcatagtcttctgtattccctatgcatccagtaggtgtgatggtaaatgatttggctttagcatagagaatgtggcagctgattaaaaaaaaaaaattccagtgcatctatcttaatgagagaacttgagttgtctgaagaaatagagaggtcagaggaggcctagtgggaaaaaagaacaatgagcctggttagaactgacaaaaattcaccctaatgatttgactggctaatgatgactgggcaagttccctgagtccactgacccagatgttctaatttgtaaatgcaaagtgacttatttatcagcctcctggggaaatcttcagagctgtgaacctgctatgttcagtaatcttgctggccccagccccagcctgttctcagatgaaattttagaaactggccactggaactttttgggtaagggctctggaggtggccaagttaccagtagtgggggaatgaggtttacctgcccccagtaatcagcacttgatttaaaacaatcagtgagctgcctcttctttcctaggttgcagttgactgcggttggttcaggctgagttgtttgggaagtacaaattttgcccagcgtgagtcagcactgccctgggtaaactccctgctgtgttgcaatcttgcttaccaaagatacatccccaggcggcaccattcacttcacatgaaagccgctgctcttggttcctgagatgatctcatctgaacatggctccagcgacctcagccacaggaactagagacagcttgctttctgtcgtggcaatgttttgaaactggcaaaatcaggtaacctcaaactgttttcttaagtttcattagct

SEQ ID NO: 17766 - DNA, 2300 bp, Homo sapien
catcacagctaggaatctatttcagaattgagaggatggacaaggtcctggcatatctagggaaaaggaattagagggaaaggaggagaccataaatgcctttggagggtagggctggaaatgaagacttagagagaagcaaaccagacagaattgcatcagggaaagttacaaaaatagccaggaaggaaaatgaagggtacatttaattcggatgtgggaggcctttagcaggtcagtctttccgtgcattccaggtgattgaaaaaatcagttttaaattccagctttttggggcgcagtggctcgtcctggtaatcccagcactttgggaggccgaggcggcagatcgcttgaggttaggagtttgagaccagcctggccaacatggtgaaactctgtctctaccaaaaacaggcaaacaaataaacaaattagccaagcgtggtagcgggtgactgtagacccagctatagggtgggaagatcctttgaacctgggaggcggaggttgcagtgagcggagatcacgccactgcattccagcctgggtgacagtgagactctgtctcaaaaaaataaataaattgcagctccgtgtattcaagacactgctggttgaaagaaaaaaaagcaatacattccagctccacctttttctaaccatgtagttttgggtaaattacttaatatgtagatcctcattgataacatgggaataatagtactcagtttgctgggttgtgaggattgaaaataatacttgtaaagtgacagagtctgatatgtatacgtgatcttattgttattatttctgaggcgtcgtctcgcccttgttgcccaggctggagtgcaatggcgcgaccttggctcactgcaacctctgtcttccgagtagctgggattaccggcacccgccaccattcctggctaattttttgtatttttagtagacatggggtttcaccatgttggccaggctggtctcgaactcctgacgtcaggtgatccacccacctcagcctcccaaagtgctgggattacaggcatgagccaccacgcctggctcatgatcttattttccttacgatattccttgtttgaaaatacaaattgttcagaaaaactaggagttctcaatagaacctaaagcctaagaaaattgtgtcactagacaccatttaaaagaaggattagaacttaatattatgttcatgactaggcatcgtagcccacgctggctaaccatcccctgggccgccctgctgcttggcggtttactaaccacagctacatgcatgcgctcactaaatcctcacgccaacctgcgtttctgggatgagaaaaccagagttcgtaaaggttaggtaccttgctgaaaggtgcatgggtgaaaggcagggatggatcctcgctgagtcattctcattctaccacagccttcctcagcagcttcctgactttcctgaggggaagtagctagtcctagcggtttagactgggcagtgctagagtgagtgggacaagcatgggtttttaggtcccacagacccggcttctaatacctcccagttgtgggacgctgaataagctcgtaacccctagtggggctgggtttctgcaatcatgaagcgggggaaaccatcgcctgctcatcgcaccgaggagagagtcaatgagacatgaaagtcaggcacctttcaaagttttatgacatgcgttcagaggtgttgagggactcgctcaaggtcaccaagccgggtcttgacccagctgaaacttggacctggacccttgggcgcctcccgcagagttgtgtgaccaaggtaaccagcagcggccgaccccacgactttggggaaacgacgcctcctacggccccacggctcaggccagcccggccccgccgtcgggagcctcagctccgccagggggcgcgagcggaggccgcgctcgaggccgccgggcgcctcgctcttctctatggtggctcgggcgcggcgggagcggaggcgcgatcccgagagggggcggggccgagtcaggggcggggccgcgcggagggcgggagcggccgggccgggccgggccggctggggatgggtgggagggggggccgacttcctggggccgcccgtgaggatgtcgcgaccgcccccgggtgcccctcagccccagagacgccgccgcggcggagtccgcagcctccctgcctgaggcgtccgcggccgggatccggcccctcccctcgcctcctctcctaggtgccggccgggagggcggccgcagcaggtgaggagg

SEQ ID NO: 17767 - DNA, 2300 bp, Homo sapien
gcacgcgcacacccggtcacctgtcttgatcctgtggctcctgagaagctggatcatctcctcggtaaggccagggcacagtccgaccctgagcacgcccatgttccccgcaggccggaacagccccagggggactgcacgtcacgtgggcattcgcggggggtcctctccagacgcccctcccctaccccttcctagagaggacacaggcgcgctggctgccggaggagaaaggagagaggaggaggcggcaccaagggtagggctgggggtcatccgcccgcccgggatccgccgggattcccgcgcccagagcccgcccgccgggtcgcgccgcgctgccgcttccgggttccaggctggcgcgcggcgaggacctggcctgcagcgccatctgcgggccgcacggggcagagccgctgcgcccctctccaccgcctgcacaggttcccgagtcccacgaccccctccgcgctcaacacgccacccgcggccacattcggcctctaccttctgccgcaacacacacaccgaccttctaaagagccttctgtgcgccagcttccgttccaaacggaacggatctccgctggagacaaaatgcgacacaagacgacccgcccttacccccagggagcttactgtgagcaagggaaagacagacaatgaaaaggaatcgcagaaatcacatcattacagattatacgacaggtgtcaagaagcagcaaagcatccagagggcacctgcgtctatttttcaaaagtttgttttgttttggttgagacagggtctcgatcggccgcccaggctggagtgccctggtgagatctcagctttgcagcctcgacctcctgggttcaagcgatcctcctgcctcagcctcctgagtagctgggactacagtcacgtgccaccttgcccagctaatttttgtattttttgtagaggtttcgcctctacaaaatggggttacaccatgttgcccacacaggtctcgaactactgggctcaaacaatcctcctgccttggtctcccgaagtgcggggattacaggtgtgagccaccgtgcccggcctctattttttattttattttttattttttttaagggcaagaaaccttggttatatagaacacacacaaaaagatatgatttggtatttttaaatgtcctttgctttgcctcatccataggaagaaataaaactttacatggttatctcatcacaaatctgtgagggaggcgctattttttatccctgtttcaccaatgaagaaactgaggttcagtgaggttaaatcacttgccaaaggtcacccagctaggcggcacagggctggacttcacatccacatctgactctgcaaagccagtgctttctaacagcccccctccccacccctgaagctgtgtacatgttttcctactgtaaggtggtttctctgagagcagagatcatgtgtggcccatctctgtatcccactgcaactgccaccattgtcactccacacaggaaagtacttgggagtgtgggtgtggcacatttagaattctagcagtgaagtctgatcatatgtgagccatgaacccctatgaaccatgtgggctttccctttcactaaccgactgggcacagtggagtctgcagcctatggtttcaggatagagagccttagcttctacggacaaagtttccctccccagcagacactttccaatactgcctatctctcagggccacaccaccatcctctacatcccacgcccatctctcaccatccttattctccttcccagggcagtgcggaaggacacaggtgtcaggcattttgagatcttcagagaagggcagggctgccatcaccatggagtattagagctggaaggggcccaagggctcatgcagtctgttccttggttttacccctctcatgatgctgcttcacagtcacactggcccttggtctggccagccacatagctagcctggcagcagtagcctcaaatcaaggggggaggctggcctgtaattgttacactctgtgatgattatgaagtcagctcattgcacctgcagactgtccaaactaaaggtgggccactgcccccacagtttctctctgcttctggtcagctgggttgtcctgcatggtgacgggtgtcatcccgaacaaatcagatggcatcagaggcactccatcaagtgggagatggggaggaggctgtactgaagaaagaaaacttcaacatgatgaatgcccttgaccaactgccaaaacccttttcaaaccccaagt

SEQ ID NO: 17768 - DNA, 2300 bp, Homo sapien
gaggaaggaagggaggaaggaagggagggagggagggagggagggagggaccagatttgtgacttacagtaggttgatggtatcatcctccaagaagttgaccaaattgccctttgaggctagtgggagtcctttggtagtgacggtccggttcatagacttggggtttgaaaagggttttggcagttggtcaagggcattcatcatgttgaagttttctttcttcagtacagcctcctccccatctcccacttgatggagtgcctctgatgccatctgatttgttcgggatgacacccgtcaccatgcaggacaacccagctgaccagaagcagagagaaactgtgggggcagtggcccacctttagtttggacagtctgcaggtgcaatgagctgacttcataatcatcacagagtgtaacaattacaggccagcctccccccttgatttgaggctactgctgccaggctagctatgtggctggccagaccaagggccagtgtgactgtgaagcagcatcatgagaggggtaaaaccaaggaacagactgcatgagcccttgggccccttccagctctaatactccatggtgatggcagccctgcccttctctgaagatctcaaaatgcctgacacctgtgtccttccgcactgccctgggaaggagaataaggatggtgagagatgggcgtgggatgtagaggatggtggtgtggccctgagagataggcagtattggaaagtgtctgctggggagggaaactttgtccgtagaagctaaggctctctatcctgaaaccataggctgcagactccactgtgcccagtcggttagtgaaagggaaagcccacatggttcataggggttcatggctcacatatgatcagacttcactgctagaattctaaatgtgccacacccacactcccaagtactttcctgtgtggagtgacaatggtggcagttgcagtgggatacagagatgggccacacatgatctctgctctcagagaaaccaccttacagtaggaaaacatgtacacagcttcaggggtggggaggggggctgttagaaagcactggctttgcagagtcagatgtggatgtgaagtccagccctgtgccgcctagctgggtgacctttggcaagtgatttaacctcactgaacctcagtttcttcattggtgaaacagggataaaaaatagcgcctccctcacagatttgtgatgagataaccatgtaaagttttatttcttcctatggatgaggcaaagcaaaggacatttaaaaataccaaatcatatctttttgtgtgtgttctatataaccaaggtttcttgcccttaaaaaaaataaaaaataaaataaaaaatagaggccgggcacggtggctcacacctgtaatccccgcacttcgggagaccaaggcaggaggattgtttgagcccagtagttcgagacctgtgtgggcaacatggtgtaaccccattttgtagaggcgaaacctctacaaaaaatacaaaaattagctgggcaaggtggcacgtgactgtagtcccagctactcaggaggctgaggcaggaggatcgcttgaacccaggaggtcgaggctgcaaagctgagatctcaccagggcactccagcctgggcggccgatcgagaccctgtctcaaccaaaacaaaacaaacttttgaaaaatagacgcaggtgccctctggatgctttgctgcttcttgacacctgtcgtataatctgtaatgatgtgatttctgcgattccttttcattgtctgtctttcccttgctcacagtaagctccctgggggtaagggcgggtcgtcttgtgtcgcattttgtctccagcggagatccgttccgtttggaacggaagctggcgcacagaaggctctttagaaggtcggtgtgtgtgttgcggcagaaggtagaggccgaatgtggccgcgggtggcgtgttgagcgcggagggggtcgtgggactcgggaacctgtgcaggcggtggagaggggcgcagcggctctgccccgtgcggcccgcagatggcgctgcaggccaggtcctcgccgcgcgccagcctggaacccggaagcggcagcgcggcgcgacccggcgggcgggctctgggcgcgggaatcccggcggatcccgggcgggcggatgacccccagccctacccttggtgccgcctcctcctctctcctttctcctccggcagccagcgcgcctgtgtcctctctaggaaggggtaggggaggggcgtctggagaggaccccc

SEQ ID NO: 17769 - DNA, 2300 bp, Homo sapien
gctaatttttgtatttttagtagagacgaggtttcaccatgttggccaggctggtctcaaactcctgacttcaagtgatgcatccgcctcagcctctcaaagtgctgggattacaggcgtgggctaccccatctggcctccgatcttaattaagttgtctaagaccataaatctctaagtggcagaacttggatctgagtttgggcttctagtccaagattcccagtataccatgaagtttcctacgagcatccatcactttagccatacctgcttgcttacgggcactttggggaatggacaccacatccctctcacatactcaagaccagctatgtagtctgtggagcccagtgcaaattgaagtaccctgagccccttattcaaaaattctgaatttgaagatagtaacagaaaagcattaaactaagcacaggccccttgtaagtgcagggctatttgtgactgcacaggtcattcacccatgtggtgggtgacctgcaagtaattccctcagcccacatcaccctgtaccaccaccccttcactggctaactcctttccttccttggagactcagctcaaatatcacttcctccaagaagcctccttcaactgcacccagtctcaagctatactaagcccctctggtccctcaaggcatcctgtcctggcacttaccagaccatgctatatcattctggttattgcatgatccccatcctttcacccctgacctccacatgccagactgggagctccttaaaggcagggactgtgctttccagctctgcgttcccagaacttaaacactgggacagacaccttgcaggtgctcaaagagttttgtggaatgaagtagaggaaaaccagacttggtgaggaggaacagcaaaacccagtccgaaggaaggcaggctactggggagcagtcaggtagatgaaggtaccaaagagagagggttgaggaagaggagccatgggtgtgtcagggatttggtgatggtgaggaccacagccagtcaaggcaggataaggagcactgtcaacaaactgactaatccaagaaggcctcctggagtgggagctccatatgcctccaagaagtgatttggggctcaggaatacataaatagatccaacctgcccacacgctcttctctgggagtcaaggaactgggttgtgacaagtcagggaagtatagattctttgtctctctgcccagccctcggctccagcctttcttagaaactataggcatggtggctcaagcctataatcccaacactgtgggaggctgaggcgggaggatcgcttgagcccggaagttcaagaccagcctgggcaacacggtgaaaccccgtttctaccaaaaaaaaaaatttatatatatatatatatatatatatatatatatatatatatatatatatatgaaaattagccaggtgtggtggtggcgcgtcaatagtcccagctacttgggaggtggaggtgggaagatcacttgagctcaagaattcaaggctgcagtgagccgagattgcaccactgcactccagcctgggtgacaaagcaagatcctgtcaaaaaaaaaaaaaaaaaggaaggaaggaaggaagggaggaaggaagggaggaaggaagggagggagggagggagggagggagggaccagatttgtgacttacagtaggttgatggtatcatcctccaagaagttgaccaaattgccctttgaggctagtgggagtcctttggtagtgacggtccggttcatagacttggggtttgaaaagggttttggcagttggtcaagggcattcatcatgttgaagttttctttcttcagtacagcctcctccccatctcccacttgatggagtgcctctgatgccatctgatttgttcgggatgacacccgtcaccatgcaggacaacccagctgaccagaagcagagagaaactgtgggggcagtggcccacctttagtttggacagtctgcaggtgcaatgagctgacttcataatcatcacagagtgtaacaattacaggccagcctccccccttgatttgaggctactgctgccaggctagctatgtggctggccagaccaagggccagtgtgactgtgaagcagcatcatgagaggggtaaaaccaaggaacagactgcatgagcccttgggccccttccagctctaatactccatggtgatggcagccctgcccttctctgaagatctcaaaatgcctgacacctgtgtccttccgcactgccctgggaaggagaataagg

SEQ ID NO: 17770 - DNA, 2300 bp, Homo sapien
tctacaaaaatttttaaaagttagccgagtgtcaggtatagtggcacacacctgttgtcctagctactcagaacactaaggtaagaagagcacttgagcctgggagtttgaagctgtgtgagctatgatcacactactacactctagtctgggcaacagagtgagaccctgtctctaaaaaaaaaaaaaaaaaacaataataataatatatgctatctccaaatacagccacattcagagctagggcttcaatatataaattagggcagaggcgtccaatcttttggcttctctgggccacagtggaaaaagaattgccttgggctacacataaaatacactaatgatagctgatgagctgaaaaaaaaaatcgaaagaaaatctcataatgttttaagaaagcttacgaatttgtgttgggctgcattcaaagccatcctgggctgcatgcagcctgtggcccaggggttggacaagcttgaattaggggaagggcacaattcactccataacagttccagacagaaaaaactgcatgggcaaaatcactgatgcaggaagagccatgccttgtaagaactcagaaaaagccagcaagatttaacctaaagagaggggtggctggacatagcaaggctgaattgaccattataaggagtgttctttttttcctgcatgtaagggagccgtcgcagggtttgagggtgaagagcagcaggccagatttttggtctgaaaagataaccctggctgcatcgtggagaatgggtagaaagaggcaggaatggaaatgggggggctcatcgggaggctgttgtagcggtccaggcaggtgatgatggtgactctgaccagagtgaggcagtggagatggggagagcagattcaagctgtgttcatgaggatgacttggcagagcttgagactgcctgagcagtggagggagagagaggagagttggcaagggagatccttcgtttcaggcaaaagagctcaagttcattgctgtctgcttcagttcctcagtaatatggggagaaaagggttgtaagaattaaatgagttatgtgggaaagcacttagaacaattcctgacttgttgatgtcattatcactattattgctttacagcattgatgattgtagaaatgatttgcttttgtactcgagtattattgagttgatccattttatttatttatttatttatttatttatttatttatttatttatttattgagacagagtcttgctctgtcatccaggctggagtgcagtggtgagagctcggctcactgcaacctctgcctcccaggttcaagagaatctaccacctcagcctctccagtagctatgaccacaggcgcatgccaccacggctggttaatttttttgtatttttagtagagacctggtttcaccatgttggccaggctggtctcgaactcctggactcaagtgatctgctcgcctgggccttccaaagcgctgggattacaggtgtcagccaccacgcccagccttgacttgatccatttttaaaaggatactaatttctaggctaggcgtggtggctcacacctgtaatcccagcactttgggacactgaggctggggagtgggggacttgctgcttgagttcaggagtttgagaccagcctgggcaacatagtgagacctcgtctctacaaaaaatgagaaaaaaataaccgggcagggtgtcatgtgcctgtagtccaggctactctgaggctgaggtgggaggatcgctgtgccagaaagttcgagactgcagtgagccgtggtggcaccactgccctccagtctgggcgacggagtgaaactctgtctcaaaatgaaattaaattaaaatggggcaagaatccctgttgtgaagagtcaaaagtttactgtgtcctctaagaccctggcgaaaaataaatgtgaaggctgttgaggggcgggaggagcaccaggtaagcccatttctaatccctgaggccgtgcgcagcgggacgcttctcctccccaacagcagagggcgatgtggccggcggcgaccccgcccgaccacggagacggcgctctgtctgccgggctctttctcctccacgtggggacgcaggatggcggcagcagtgccggtgggtgtgcgtggatgggggcggggggcgtcgccgcggggcgctagggcccgggtccctgaggcctgagagaggcgaagtggggcccttctgggcgggcgaccagactgactcccgccccacttgctcgcgcaggacgaggcggtggcgcgcg

SEQ ID NO: 17771 - DNA, 2300 bp, Homo sapien
caggtgatccgcctgccttggcctcccaaagtgctgggattacaggtgtcagccactgtgccccacaccattacaaacgcttggaatatgtgagggaacaacatagacacaaatccttgtcctcaccagtgttctatgcttcacagttcctcacacataataaatgtttaagaaatgtgggccaggcgcggtggctcacgcctgtaatcccagcactttgagaggcctaggcaggtggatcacgaggtcaggggttcaagatcagcctggccaacatggtgaaactccatctctactaaaaatacagaaattagccaggcatggtggtggatgtctgtaatcccagctactcatgaggctgaggcaggagaatctcttgaacccagaaggtggaggttgcagtgagccgagatcgtgccactgcactccagcctgggcaacagagcaagactctgtctcaaacaacaacaacaacaacaacaaaaagatgtttaagaaatgcttgtggaatgaattactgaatcagcatttgaatataagatcccttggacctaaagtcacagaaccgcaggtctctgccaatgtcaggatcctttatcctattacctcattgctgcagagagcttgccccacaaaagggcccagggcttgtgataacatgaaggcagggaattcatccatctattcattcatttatttgctcattcaacaaacatgtgttagggctgggctttgtgtccagcagggcgctacaacttgtccaaggtcatatagctgtgtgtccaaggtcacaggtctgcgagtagaatctagtatgaatgattccacctgggattttcttcagtgtctttctcagctctggccagataagtttgaagatatgtgtggggtggaggggagagggatgagaggtgagtggaggaaatcatcatcatgaagacaccattcattcattcattcattcatccatccattcattccattcaggaaacacacttcggacactgaatgtgccagaacctgtgcaggaagggggttgggggacaagctatatgggatgctgtctttgccttccaggaggaagctcacagcccaggcttgagggcactgaaatgcagaagagttctgggtccaactggggacaacgtcataaatttgcttcaggaactcccagttagctaaggagaaacattcctgcctcaggagagacccctctgcaatggtgaatacatagttcttgtcccaggaagacccccttctgaggagggagcctcagtgtgtcccaggatagtttccagtcgggtggggaggacccttggtctcgggggaattcccagtctgacccagcccttgccctaagagatctcagcctgatgggggatacacaaagcccactctctgggagctaacagtcagatgggagaggtaggctgaatagatccactctatacacagggggaggaacaggagaccgcatgtggaccgaaactaacgaaccactcactcacactaaactgagttagcaagtcctgttggtctttctgaaaagcaaagacattttgaacaggtgaaagcagggtgggttgaggtgttgcgcagaagtggaaaagggaaggaactttcttcccctgttccttccccgctccctccagaaaggtatttctggaactctccagttggtctgggatctgggcaactgctgtgtgtcccagtctgtcagcccctcagctgtcactctgctcccaaaaatagcaatggttgaggggagggagaggaagctgtttatctgggatagatgtggagaggtgcattagagctgtgcccagggagggagtctgctggggggttcctgtcccttctggatctttctgtcactctttggaatgttagtgcctaagccccccaccaggataacccagagtggggtgcttgggcggaggctggtcagcacctccacgtggtcatgactgaccagtctggggagggggagggccctgagtatcagtgacagactccaggggcacctgcccctgtggccaaatatggtccagagccactggctgaggcaagaaaatctcttgggtgggggctgggaggggcagactgaggctggctggctggaggttgacacaggagtgctcaggggagcagcatcacaagagggcagatcgaaagcatcgtccttgctgaaaaagtgagcatgggcctggggtgtgccctggactggggagggagacggcaaacttctaagacctgcaatgagagttcaggcctttggcacaaactaagcagcttcgcct

SEQ ID NO: 17772 - DNA, 2300 bp, Homo sapien
ttctgctgaccaagtcttcttccttacccctccctaataagaagaaaaaaaggcaattaaaagatgggtaactcctccttagtatagtggtaaaatttaaacattaaaaaagttttgggaccagtctggtcactcacacctgtaatcccagcactttcgaaggccaaggtgggcagattgcctgagcccaggagttcaagactagcctgggcaacataataaaacactgtctctacaaaaaaaaaaaaaaaattagctgggcttgagccatgtttgtgtcactgcacttgagcctgggtgagagagcgagaccctgtctcaaaaaaaaaaaaaaaaaaaaaagctttaagttgtaaaaaaaagtgggtaagatcaaaagaagagaaggaaagaaaacaatgtataagatacctgagctctccctctccctctccctctccccacggtctccgtttccctgtctttccacggtctccctctgatgcggagccgaagctggactgtactgctgccatctcggctcactgcaacctccctgcctgattctcctgcctcagcctgcgattgcaggtgcgcaccgccacgcctgactggttttcgtatttttttggtggagacggggtttcgctgtgttggccaggctggtctccagctcctaaccacgagtgatctgccaacctcggcctcccgaggtgccgggattgcagacggagtctcattcactcagtgctcaatgttgcccaggctggagagcagtggcgtgatctcggctagctacaacctccacctcccagccgcctgccttggcctcccaaagtgccgagattgcagcctctgcccagccgccaccccgcctgggaagtgaggagcgtctccgcctggccgcccattgtctgggatgtgaggagcccctctgcccggctgcccagtctgggaagtgaggagcgcctcttcccggccgccatcccatctaggaagtgaggagcgcctcttcccggccgccatcccgtctaggaagtgaggagcgtctctgcccgggggcccatcgtctgagatgtggggagcgcctctgcctggccgcgaccccatctgggaggtgaggagcgtctctgcccggccgccccatctgagaagtgaggagcccctccgccccgcagctgccccatctgagaagtgaggagcccctccgcccggcagccgccccgtctgagaagtgaggagcccctccacccggcagccgccccgtctgggaagtgaggagcttctctgcccggcagccgccccgtccaggagggaggtggggggcagcccccgccgggcaagctgccccgtctgggagggaggtggggggtcagcccccgcccggccgctgccccgtccgggaggtggggggcaccgctgcccggccgccccttctgggaagtgaggagcccctctgcccggccaccaccccgtctgggaggtgtacccaacagctcattgagaacgggccatgatgacggtggtggttttgtggaatagaaaagggggaaaggtggggaaaagatagagaaatcagattgttgctgtgtctgtgtagaaagaagtagacatgggagacttcattttgttctgtactgggaagggttcttctgccttgggatgctgttgatctgtgaccttgcccccagccctgtgctctctggggcatgtgctgtgtccactcagggttaaatggattaagggcggtgcaagatgtgctttgttaaacagatgcttgaaggcagcatgctcgttaagagtcatcaccactccctaatctcaagtacccagggacacaaacactgcagaaggccgcagggtcctctgcctaggaaaaccagagacctttgttcacttgtttatctgctgaccttccctccactattgtcctatgaccctgccaaatccccctctgcgagaaacacccaagaatgatcaataaaaaaaaacaaaaaacaaaaaaagaaagaaaagaagcagagttggactcagtgggaaaataggcgtgctaccacctcaggagagttccagggaagaatcccacccccactccaatgaggtcacaatggctggagctctgaggggcccaggctccctgagccaggaggagaggagaaagtccaaggaaagatggctggcagtcacccctatttcaaccagcctgactccacacacccatcgccgccctccgctccacccagcctccgctggtaccagcgctgccagccctctgatgccaccagtggcctgctggtggccctgctgggtgggggcctgcc

SEQ ID NO: 17773 - DNA, 2300 bp, Homo sapien
tctcaaacaaacaaacaaacaaacaaacaattttttttttttagagatagggtcttgctatgttgcccaggctggtctcaaactctgggcctcaagccgtcttccctctcagccttccaaagtgctggaattacagtcgtgagtaactgcacctggccaacatgatgccatttacatgcagcttaaacgcatatacatgtgttgaatcagtgtcatgtgttgatgagggacataaacacatttactaaaagtataaacagttgcatgggaattagtaactttaaattcataaaattgtactggctatcaggtgagtaggggacaagtggaatgagggaatgagaccagctgggtacccaaatattgctaatgttattgcttaagctgtgtggtgaatacacaggtgttcaatttactattatttcgcactttccgtgtactttagctatttgacaatacatttaaaaatcgaaaacttatcccataatcccaggctccagaggtgatagtaggtggtgttttccagacctttcccgctgccttgattttctgttaactggccaccatccttgtctcctcgcgctgccggtcgctgcagaacccctgcgcggagggactgccagttcccaggaaggtgcaggacagctggagcctcttcttctctgggcagggatttaaatgttcttgggtagcctcgccagagacctgtgcggccctacagtgaccttctttccagccactttcccatgagctcaaagctttggattctgtcacttgcaaagggtcaggcctgatcccttgcgggttcttgagaagtgagtaagacttccagcgccccggcccagactgcgacgacccagactgcgacgacccagtctgcgcctggcgcaggctccatagacggcttttcttcagctctgtccactgagacctcgagcccttgagcagaagatgggagagagagggtcttgctgggcgggctccagaagtcctcctggctctgggcgcaggagttggaagagaagagatagagaaacatctactcaccagaattgtaaactggaagaagggtagaggaaaggtgcctagagagggcagctggaatcaggattgggctgaatattttaggagtccccaagtgctacttctatccgctgggagcacgggttcgaatctgcccccaggcagcccgctcctggttctcttgtccccctgtgctgcggcggggcccacttcggccctcgggttccccgcacaggccacacagggcagcagcgcgcgccgtacccacgggcagttcgagagggccgcgcgtggcggagccaggcccttcgccagcgcccagtacaaatttagtactagaattaagagaaacacactgaaatctgacagccccgcctaagacccgggcgtgaggaagtctgcggtgggtgatgaatacaaagaacagtttctctttcctgtcagtaaaacgctgtttccagagcctgccaggtttcgccccagtggccacacctatgcctggcaggtgctggtccgagcccctagcgccagcaaaagaaaggaggcggacgcaacattctcgaattactaggagaaggagggaggctttcccttccccccagtgccccatgtaccaacgcgtctcgccataccccttgcccctcttccagcagctgacggagtaattcgagtaggaatcgaaagatttggaggcgccgggggagaaacctgcggagcgctctccgagcctgtggcgtcccaggaagactccgagcggggccagggaagttctctggaggacatggggtggatacccaggtctccttccctgggtgaaataagaactgaaaatctaaaaataaaataaataaaataaaatagaaaacacagagaagcaacaaaaaagcgcttcccctcctcagttctccccagtccacccaaggtttaccaagactgttgtagttgcaagagtgggcttccggctccacgtaacgatgcgattgggctgtacctctgtctgtctcctgcgcgatgtcccgccccgggaggtgtcacggaactcagctgatataagcccgggatcccgccgggtcaggttctctgctctggacttgggaggctccgttgcctgctcccggagggagacgcgctgccgaggagaacccagcgggtaatgaatcccccgcgcttctttgcccaggccttccccaaacctccccccggtctgcgcgggttctcctattgggctgtggtgaagacaaggtgcggcgactgcagctccccaggtctgggcgctg

SEQ ID NO: 17774 - DNA, 2300 bp, Homo sapien
tggctctaaaccaacgccctcccacccgctattggtaggggaggggaggaactattgaaaagttccccccatcctccctcaagcatcccttcctgcctgcactagtgacaaaggatccccttctggtgcaaccgagcccctcaagatttcagcaccccaacatttttagtgatgaaaccatgaaaattccgatgaggcccttgcttatttgcatatgttaactacccactttttgcccaatattcctttttctagcaatataattataaactgctgatgcaccgtttctttgtcaagcaggaggatatagcttcagagtcaagaaaaaaattttgcagaaggaatgaatgcctttaagggcattgtgaccagctgctgacgcccagaagtctggtggttcaagatgtaatctgagacgaagaaagacttttccccgaggttccctgaaattccccctcccttacttcctggtctcataaaaactccccactacttctttttgttagggtggatttgagagatcttgacctcttgccttctcgctttggccaaatggaataaatcttcctctgtctccaagcatctgtgtgtcagtgtttggcatcaacagcacatcaggttcctgagcctgaatttgggcttcgacaactcgggctcccgggacacatgcaagagggaaacggaatcacaccgcagtctcagccactgcggatatgaccaactagggctctagttagtcactgtatgggggatacagggctttgtgggctaccctagtagcctgcccctgttgttacagtttgaagactgacgttccaagccaggggcttataggcaagcctctggaacaaagcctcttgtaatagactggacattggccctatttgtccccaggccacaacccatttaacttcatcctcgggagccccgatttcgtcgttttcccttaagtccttcgtgctcctgaaccgtggggaaatgttgccaggtttggtttgctaagatgtaggctgcgctgggtcggcgcctctccctcctccccagctcgccccgcgttccgaacctcccagctcccgggtcctctgccactagctgtcgttggaggtgctcctgagtcaacaaactaaatctccccagcgggaaagactctctcccggcagcgcccagacctggggagctgcagtcgccgcaccttgtcttcaccacagcccaataggagaacccgcgcagaccggggggaggtttggggaaggcctgggcaaagaagcgcgggggattcattacccgctgggttctcctcggcagcgcgtctccctccgggagcaggcaacggagcctcccaagtccagagcagagaacctgacccggcgggatcccgggcttatatcagctgagttccgtgacacctcccggggcgggacatcgcgcaggagacagacagaggtacagcccaatcgcatcgttacgtggagccggaagcccactcttgcaactacaacagtcttggtaaaccttgggtggactggggagaactgaggaggggaagcgcttttttgttgcttctctgtgttttctattttattttatttattttatttttagattttcagttcttatttcacccagggaaggagacctgggtatccaccccatgtcctccagagaacttccctggccccgctcggagtcttcctgggacgccacaggctcggagagcgctccgcaggtttctcccccggcgcctccaaatctttcgattcctactcgaattactccgtcagctgctggaagaggggcaaggggtatggcgagacgcgttggtacatggggcactggggggaagggaaagcctccctccttctcctagtaattcgagaatgttgcgtccgcctcctttcttttgctggcgctaggggctcggaccagcacctgccaggcataggtgtggccactggggcgaaacctggcaggctctggaaacagcgttttactgacaggaaagagaaactgttctttgtattcatcacccaccgcagacttcctcacgcccgggtcttaggcggggctgtcagatttcagtgtgtttctcttaattctagtactaaatttgtactgggcgctggcgaagggcctggctccgccacgcgcggccctctcgaactgcccgtgggtacggcgcgcgctgctgccctgtgtggcctgtgcggggaacccgagggccgaagtgggccccgccgcagcacagggggacaagagaaccaggagcgggctgcctgggggcagattcgaacccgtgctcc

SEQ ID NO: 17775 - DNA, 2300 bp, Homo sapien
tctaaataaataatgtagcgttggaatataacacaaagtattaaataaatatctataagtccattcttacaagtaaatgaagaattccaaataatttatatagataaattattttgtaggatatatagacattggccccctcaagaaagtggagcttcaatcctcaccctttgagtgtgagctgcacttagcaacataggaggaaggaaaagtaacttcactgtagagaaacctggcaaacacttcctctgtcagctggtcaaggttgatatcatgagtgataaggcatgttgatagcatatacccttgatgtgatgtgatgagaatacctcttcattcctgtggtcttcctcttgaaaacctataaccccagtctgagaaaaaaatcagacaaacccaaactgaaggacattttatttgtagatacctgaccagtactcctcagaactgtccaggtcatcaaaaataaagcatcacaggtcagaggagtgtaaggaaacatgaccactaaatgtagtatggtgtcctggatgggatcctggagtaggcaaagacattagagaaaaactagagaatccaggccgggtgcagtggttcatgcctgtaatcccagcactttgggaggccgaggagggcggatcacaaggtcaggagatcgagaccatcctggctaatacggtgaaacccggtctctactaaaaaaatacaaaaaattagccaggtgtggtgacgggcgcctgtagtcccagctactcgggaggctgaggcaggagaatggcgtgaaccccggaggcagagcttgcagtgagccgagatcatgccactgcactccagcctgggcgacagagcaagactccgtctcaaaaaaaaaaaaaaaaaaaaaaaaaaaactggagaatccaaataaaatgtggggtttagttaatagtcatgtactaagtaaggttggttccttagttgtgatgaatgcatcacaacaatacagtaataaaacagggaaatagccactgcaatggctcacacttgtaatcccagcactgtaggaagcccacgcaggaggaatgcttgagcctgggagtttgagaccagcctgggcaacataataagaccccgtcctctacaaaatttttttaaaaaaatagccaggtgtagtggcatgcacctgcagttccagcttctcagctagttggggtgagaggatcactggagtccaggagttaaaggctgcagtgagctgtgatcacccaactgtactccaacctgggtgagagagcaagaccttgtcaaaataaaataaaataaaataaaataaaataaaataaaataaaataaaataaaataaagaggaaactaaatgaaggggacacaggaactttctgtactatctttgtaactttttctgtaattctataactactctaaaataaaaagttaatttaaaatataaaaacattttgtttcattttataatggctgggtagattttcagatctttagtgaagtaggtcccagatgtctagaggcagattgcagagatgggcaggcacccatccaaacccaactgagtctagtgcactggctcatgcctataatcccagcaatttcggaggctgaggcaggaggatcacttgagcccaggagttcgaggctatagtgagctatgattgcactactgcattccaacctgggcaacatagtgagatcttgtctcttaaaaaaaaaattgaaagttaatgttgcttaatcttttactggctcgttttggccctctcacagagtcactggcctcagtcttctccttttcccccatttaagcacttattttacaagaccatttttttcagtttaatgagacacaaactctcaactttttatttaaaacagaaatgcagtagtaagctaaaccttttgccattcatagggaaacaaatatcagtaatcctctttgttctaaacaaaaattcataattatttatacattttaaaatattatattgtttcaaatattgttagtggggcaataaatcataaagagatacaaccagtcgaaattagacttttaaagaattactctcaaagacattgcaacaactccaaagtccagggatcttataagactaatttattagtaacaacatttacaaagatagctttttaatgctgagttgtatctgatttaatgcagtcagaaagaaaaaagaaacatttatctcattttgctgatctgtcagattttgcttaagttaggagagcctgcaatttcaagcccagataactggaattccatgaataaacacaga

SEQ ID NO: 17776 - DNA, 2300 bp, Homo sapien
caagacaaagtcccctttacttttccctctgcttttctcaagcagaaagagtctctgcctgtatgcaccacagctggggttgtgctgagtctcacctgaagccagcagagtctcacccaagacccacggcatattacctgggtatcgttgctgattattcagggaccaagggctctttagtcagcaggtgatagatcctgccaggactgggtctttccctttaaggcagcagtttctcttctggcccagagtgtgtctagaaatgttgtccaggagatagggtctggaatgggtgtctcatgaccctgaccaatgtgctatcctactgtgtctgagctgacatccaagatgcaagacagaagtcctctttagtcttctctcttctctcctcaaatggaaggaagggatctttttggagctgagagtcacactgtctggggttgggggaggggtggtgcaagcactctcttagtcgccccagctggtatctcagtaggtcgtgtgccctccaagcctactggctctgatctcagctcagggctaggacttgcctaggagtttcagtccttgtggcctagaatgcctttcaagtttatttagaaccccctagcacttcagctacagtggcgaggcttgctgaaactcaggtttcaactgctgggatggacaatttccatctcactagggctggtccaaattctgcctccatgggcaggtatatgctggattcagcatggttttgcttttcactgtaacagggcagtactgagttcaatgcaaagtctcacaattgctgtgccctcccttccccaagcacacagatttctctgcaccacatggtcactgctggagaagggggatggtaggtggagccttctattacaccgtcttgttctgccctcccatttccctttctgttcagtttctatctgaggctagccaatcccctgtgatctaggggagatgggtgggaggatggaaggaaaggggaagtaaaacaaaaaaataagaaccacccagaagcatacagaaaattgggcactacttgacaatttgacattgcaaagttttcccaggctaattcctcaccttttagggagtttgctgagcaaactaggtaagccttcttggcaggggagaaatgcacagatgctacccactgagcccctcgcttgggggtggttgtccctgcatgtccacatcagagtcactgctccatcaggggtcctgcaggactagatcctggggcatggggagaaatggggacagctaataaatggaaaccgtacagctaataaatggaaaccatacagctaataaatggaaaccatacagctaataaatggaaaccgtacagctaataaatggcagagctgagatttgaacctaggaaaactgagtcttaatccttgaactctgttacctctgtctacataggtttctgtatacatagccttcaggactgcttttggtggaaagagatagcaggtggtgctaattcactgtgttggtgggaactctggctacactgaaaggtttgaaaaagttatcctgtaaactgactagaatcaggtgcttttgtttctgaagtgcttttgtaagtgtactgagtttcttttctgaattcttaatttcttattgacttagtttaattttatttaggatttcaaatttatatgggacaatatctctaccttacaaaaaatgtgcaagtgatgctgattataattcctttaatcctaaggaaagagcttgagatagagctccctaagccttttttgcctgcaaaagaatctaagcagatggtggggttgctgtttaaatacaattgccaaccaaaaactataatctattggctttgacaataaagtttatggggcagagaaaatatttaactttgaaatccctgtacatcgaaaggaatattttacaaataacttgacaaagatgtttcaatggtcttggaatgcagaatggaattttgagaaatagaaatttgtaggcaagggtctaaactaggcaaggtggtaagaatgtggatgtgccagccttcttttttttttttttgagacagattcttactttgacccccaggctggagtgcagtggcacgatcttggttcaccacaatctcgtctcgaaggctcaggtgattctctcacctcagccgcctgagtagctgggaccacaggtgagtaccaccacacctgcctaatttttgtattttttgaggaggtgagatttcaccatgatgcccagactcgtctcaaactcctaggctcaagtgatctgcctgcctc

SEQ ID NO: 17777 - DNA, 2300 bp, Homo sapien
tttttatttttataaaataaaaatattttaaaattttaaaatcttataaataaaatctttaaaatattataaaataaaaatatttaaaatattttattttaaaatctgatgttcaaacgcccgtttcttacaataactattgagcctcagttaaccagaaatttgtgaacatccatttcctgactttttgctttaaattttttctccactgtttctagcacaaaagtttgcctgctgtgttgcagaaataaatttatgttgtcctctgccataaagtgatatatttaatatttttattctttgtttttgaaaattatattgtaagttcctaaaaacattttattaaacaattagacattttgttattaaataaatgtgatctgtaatttctttgtgcagaatgatttgaagtattgtatttagtttacatgcattgtgggttcataattaatatccaatgaaaatacattttgttatattgtaaaaaaagaataattttaacagtaaaaaagagattttttatatttatctgcatatttactatcttctgtgctcttcattcttttttgtagatctgagtttcattcaggtatcattttccttccagctaaagaacttcctttaatattttttcataagaaagatcggctggtgacaaattccctcagattttcagatttcctttttttttttttttgtctgaagtcattactttgcctccatttaggtaggccttttttgtggttgttataggattctaggttgacaatcttttagcacgttatagatgcatggttctggatttggtacaggtttgcacagactctctgtaaacatgttaaagaaaaatggagaagctgcaacatgagaatacgaagatttactgaaatgaaaaggtggtcattgaaagaaagtgggttatgaaacagcatgaacattatgacctcattttaacaaacgtgcgtaacatacacataagtgtaatatgtatgtacatgtatccatacacacattgtatatgtataatgaaatccgttttattttcttactttcgctttcactggagcctgtattaatcagtgcggcattaaccgctgctcccaccctcgggccactccgcatcagtgagaagtgggcctccgacagagccgcccgggcctagggttccgcaaggctggcagcacggagcccggccaagggcgagcgctccgccaaggatggggagttggccaaagacaggaggattacaaaatccaaacactcggacagaatcctggcgggtgctaaagactgcagcggggcagaaaagcagaacgctggcaggtttttttcatatcactagcagcgtgacggttaccggggttgaccaagcacagcgcaccggccgccgttaaatcccactctggctcggggtctgcggagcctgcctcagccgcaggctccataaacccagccaggaaccaagcgcggcccaatctgcacatctgccgcattttggcaaggggtccggggtctggaacagaagcggaggcccaaattcttgcctcggtctccaagacccactttctggggcgatggagagagaagcccagcttgggatctgggcaagtcgagcgggttggaaggggaaagctctggcgagagctcagctggactctccgaggggtatctggaaggtgggaccgcaggcaccgggagagaagagggtgcgaggaaggaaacggccaccccgttgggagcgcaggagccgacagctgcttgggcctgggaagttcttctctttcttcataatctttattctttgttttgctgtaatccagatagatgaatagatagatgatagggagggagagatggatggagggagcgaggagacggaggaagggtgggaagaagggggaggaaaaaatccccaaattcccggaaactaagaactacgtggcaacagtcagaagggtgggagcttctaggcaatttaacgcggcagagttcgcgggcttagcagacccgcccattggctcttgcatctcctgcgtgggatgtgcgtgggatggcgccaacccgctagtatataaggactcgacctgggcgcctccagggaaacgctaagggggcttcggaagcgctggagcttgagaggtcagagagggtccttgcccccagcctgggactccggagttgcgtttctacccgtgcttcagggtctagcccagccgaatccgcgtcgggctgtaactcgagtgccaggttcgagaagggagcagcacccttcccaccccaccccagccagggtgtggggt

SEQ ID NO: 17778 - DNA, 2300 bp, Homo sapien
acgtgagccaccgcacccggcctgcgctagctttttttctttgtttctttctctttctttctttctttttctttctctctctctctcttctttctttttttctttccctccctccctcccttcctttctctcttctctcccttccttccttccttccttccttccttcctttccttccttccttcctctttctttctttctttctttctttctttcccttccttccttccttccttccttccttccttccttccttcctttctctctctctctctttctttctttctttcttctttccttttttttccccgagacagagttttgctcttgttgcccaggctgcagtgcagtggcatgatctcagcacactgcaacctccgcttcccaggttcaactgattctcctgcctctgcctccctagtagctgggattacaggggtctgccaccacgcccggctaattttttttgtatttttagtggagacgggggtttcactacgttggctgggctggtctcgaactcttgacttcaggtgatccacccacctcggcctcccaaagtcctggaattatgggcatgagccactgctcccagccggcactagcattttctaagccaatgactgaagaatagttttttaacttcggtgagactgtatccatagagctggcgtctggatcagatgagaagaagaaaagcgcagctatgtgctttcaatatatacgttatttaatgtgaataggtactcttcctaggtaccttaagattttagaataggcagtaggcagttaatgcagtccagagtggggtaggtggagcttgcggagaaggagcaactcagacttgcacattcccctgtgatgagtcatcgtggcctgtgtgcatttcaaaagctatgtactgagacaccaattcttagacaagttagcaggaaaaacatgtattaccataattatcataataagggggctaaaggaaagcaaagtggcaggaggactgtatccggccagactagcctttggagcatcccaataaaggaatctcccaaatggccccaagatgctccctacactgccaggggtaggtatttgaatctgtctgtcctggagcaatccgctccttgcacctttgtcctctcctgtccatccacagctgccctggcctggttcctgggggcaaccgtgcttttaagcaagggggcagcagtgctgctctgggaatgcgagtacagctggaaaggttgagtcacccctttaggggcatggtaagaatgcctggtatttcttcaattttgatgaaccaaaatagtgacaattgcccaaaggcgcagagtcgataataaagagtgcggacacttccggagcgccagctgcccaatagaaatgcaggccacgctggggaagtgtggagccgcagcccaggatggggagggccggaaaacagaaaaggattcgcgttctttttactctgtggagagtgagcccgcggactgtagcctgggcctcgccaagttcctttgttctttgttttctttaaattaccttttttctttttgtcttaaaaaatacacatgggtgaaaaagaaacgagagctccctagagatcactcagagctgttttcgtgggtttttaacttccagttgctcaagggtccacgctggcatctggggtgtgctcgcacctgcgaagaatccagcttctagggagcaccgcgagctggtaagttggtcctgctccatcgctaaaccttccagccttagtttttcatttctggggagtctgctggctcgggaggaggtggggcactggtaacacaaccccaccactcccgggaagatccccgcacccccatcccggtctgctttctctcccttctgaagcaggagaataagggtctggaggaaaatcccaactttccacaaacttcctttgtagcccctccttttctacatggcagatgaaaaactgaaaatacctctgattggtcccctcccgcaaccaatcagactggtctccagggccaagtcttcatgtgcataggaatgtaactttgtaacttcgctttctgcgtccaatcagatgttttcatagggcataactttgtaacttcacttcagcctcccattgatcgctttctgcaaccattcagactgatctcgggctcctatttcatttacattgtgtgcacaccaagtaaccagtgggaaaactttagagggtacttaaaccccagaaaattctgaaaccgggctcttgagccgctatcctcgggcctgctcccaccctgtggagtgcactt

SEQ ID NO: 17779 - DNA, 2300 bp, Homo sapien
aaaacactataaagaatagcaacacaaggttcaatgtaaactttgatatggtgttttacctctgaggagaggcttattgttaatattctttagccgtgtaaggggttcacagatgttcatacttttgttctttataccttatatgtattctataaatattgtttctactcaatagttaataaaaacataatttaaaagttctgtgaatgtttttactctgctcacttttgaggggccttttgggatatgcattttctattccaagttgatctgatatgtcatgcctgccacacacattcccatgggaacaacttcttaatgtcttttgtttctgccttggaagccatcctggtgctctgggaaaatccctgcactagcattttctttttcttttcttttcttttttttctttttctttttttgagatagaatcccttgctctgtctttcaggatggagtgcagccgtgtgatcttggctcactgcaacctctgcctccatccaagcgattctcatgcctcagcgcccccacaccctccccagtccaccacagtagttgggactaccaaggcgcgcacgactatgccctctcaccatattgccctggctggtctccaactcctgagctcaggcaatccacccacttcggcctcccaaagtgctgggattatagacgtgagccaccgcacccggcctgcgctagctttttttctttgtttctttctctttctttctttctttttctttctctctctctctcttctttctttttttctttccctccctccctcccttcctttctctcttctctcccttccttccttccttccttccttccttcctttccttccttccttcctctttctttctttctttctttctttctttcccttccttccttccttccttccttccttccttccttccttcctttctctctctctctctttctttctttctttcttctttccttttttttccccgagacagagttttgctcttgttgcccaggctgcagtgcagtggcatgatctcagcacactgcaacctccgcttcccaggttcaactgattctcctgcctctgcctccctagtagctgggattacaggggtctgccaccacgcccggctaattttttttgtatttttagtggagacgggggtttcactacgttggctgggctggtctcgaactcttgacttcaggtgatccacccacctcggcctcccaaagtcctggaattatgggcatgagccactgctcccagccggcactagcattttctaagccaatgactgaagaatagttttttaacttcggtgagactgtatccatagagctggcgtctggatcagatgagaagaagaaaagcgcagctatgtgctttcaatatatacgttatttaatgtgaataggtactcttcctaggtaccttaagattttagaataggcagtaggcagttaatgcagtccagagtggggtaggtggagcttgcggagaaggagcaactcagacttgcacattcccctgtgatgagtcatcgtggcctgtgtgcatttcaaaagctatgtactgagacaccaattcttagacaagttagcaggaaaaacatgtattaccataattatcataataagggggctaaaggaaagcaaagtggcaggaggactgtatccggccagactagcctttggagcatcccaataaaggaatctcccaaatggccccaagatgctccctacactgccaggggtaggtatttgaatctgtctgtcctggagcaatccgctccttgcacctttgtcctctcctgtccatccacagctgccctggcctggttcctgggggcaaccgtgcttttaagcaagggggcagcagtgctgctctgggaatgcgagtacagctggaaaggttgagtcacccctttaggggcatggtaagaatgcctggtatttcttcaattttgatgaaccaaaatagtgacaattgcccaaaggcgcagagtcgataataaagagtgcggacacttccggagcgccagctgcccaatagaaatgcaggccacgctggggaagtgtggagccgcagcccaggatggggagggccggaaaacagaaaaggattcgcgttctttttactctgtggagagtgagcccgcggactgtagcctgggcctcgccaagttcctttgttctttgttttctttaaattaccttttttctttttgtcttaaaaaatacacatgggtgaaaaagaaacgagagctccctagagatcactcagagctgttttcgtgggt

SEQ ID NO: 17780 - DNA, 2300 bp, Homo sapien
ccctaagacttttctgcctgcaaaagatatgggtggggttgccatttgaatacagttaccaatgaaaaactatcagcttatctaggctttaacaataaagttcatgggggtaaagagaaaagatttaactttgaagtccccatatatcaaaaagaatattttacaggtaacttgacaaagatgtttcagtggtctcggaatgcaagacagaatcctgacggtagaaatttctaggcaagggtctaaattaggcaaactggtaagattgtgaatgtcccagcctttatttctgaatcttgacctctgaactctgctgcctctctctaaacatgtttctgcctacaggtacttcaggactgattttggtgtaagaagacagcaggtgtacacttgatgatgctacttccttacctctcattcattcctcaacccattgtaaaataatgtcaattaatataggttcctttgctgaacacctgtgaaccaaagcatagttttaaatgcttgttgtaaactatctgagttaatcttcataataacagtcacaggtggctgcaccatgttttatagtaagaaaatagagttagaaagagtaaatatctagactaatataacagtactaaatggcagaactggaattcaagccatcttcattgactctgttctccaagaccttagcccctggtttattgcctcctgatgcccatttcccaggtgtctgaagagcatttttcaaagtcacagttaaccttaattttactaaacttaggtttagtaacactttccagtcattacctagctgtatctgtcagcagtattagacatcttaaaaccttggcaggtgactttgttccaggctttgttaataccaaatacccttgatttttctcttacttctttgatttttcatactcagacttttctacagtctccttttcaatgtggtcttcttttacttatcttctaaagttgatgttcatggagaatctgttccaaacctagatgttctcatgccatggtacacatgcccctcagctgatccactacttctgtgtttcaatgctaatgatttcacctggccagttctagtgcatcttttaagtcttggcctaaatggaacctactcctggaagtcttatggaaccatggtctccagattcgttcagataccctattcaatgtgttttccctcttagagcccatgtcacagatgatggtaaaggctaatttcattagttcccttccctgccagccagtcagctcctaaagagactatacctgtctttcttgctattgtcttatcccagcacatattagacacgttttaaatattttctaataaatgaattgcaggcctgtaacaattttttaatcaaaaatgaaacaaatattctaatactttaaggtgcaagttcaacatggaggcaaatcactgctccctgggtgtgtatccatcttacccagacctggtcatcgatgtcggagaagtgactctgggagaagaaaacagaaaaaagctacagaaaactcagagagaccaagagagggcgagagttatacgggccgcgtgtgctttattaaactcaggaggaggagtgattcagatggaaatggccaacagggatgagcgtcccacagagatgggactggatttagaagaatccttgagaaagcttattcagtatccatatttgcaggctttctttgagactaagcaacacggaaggtgtttttatatttttgttaaatcttggagtggtgatcctttccttaaagatggttctttcaattcccgcatttgcagccttagttcttcattatactgtagatctggcacctctgtgcttcacatgaattcaagacaggcattcgatttcctgaagaccaaggaaagacagtccaaatataatctgattaatgaagggtctccacctagtaaaattatgaaagctgtataccagaacatatctgagtcaaatcctgcatatgaagttttccaaactgacactattgaatatggtgaaatcctatcttttcctgagtctccatccatagagtttaaacagttctctacaaaacatatccaacaatatgtagaaaatataattccagagtacatctctgcatttgcaaacactgagggaggctatctttttattggagtggatgataagagtaggaaagtcctgggatgtgccaaagaacaggttgaccctgactctttgaaaaatgtaattgcaagagcaatttctaagttgcccattgttcatttttgctcttcaaaacctcgggtagagtac

SEQ ID NO: 17781 - DNA, 2300 bp, Homo sapien
gatttcgagaccagcctgggcaatgtagggagaccctatcgctatgaataataataataataataatataatactaatattaataaattaaccgggcctggtggcgcgcacctgtggttccagcttctccggaggctgaggcaaaaatcgcctgagcctgtgatggcgccactgccctccagcctggacaacacaggaagacattgtatcaaaacaaaaacaaaacaaaacaaaacaaaacaacaaaacagaattagaattgccattaccctgtacccattatcctgattaccctgcaatctagaaaggggagaaatgagaaaaatgtctccctcccaacgtctgtaaaatacagagctgctatctgagaaggacaaagagctctgtgttttattttcccaagagggagcctctgtcgcagctgtttccttctgtttctgcctgagactagccagtccccaccagttttcctcagtggggtggggggcttgggagtggatgggaggatttgtgttgttctgattttacctacagtatacctgtgtaggaggcgaaactgtttccatcaatttccacagagaagcaagggcaagaattatctctaattattcccatgcatgtgtagggggggttcaaagaagtctgaatcttgacccctgaactctactgcctctctctacatgtttctgcatacaggtctttcaggactgattttggtggaagaagacagcaggcggtgggcattcactgtgctggtgggaagtctggttacattaagaaaggaattctagcaaagttattctgtaaatacaacagaatcagttgcttttgttaaatatattggtaagcttcctgatttttttcacctgaattctcaatttgttattgaatagttcagttttatttagggtttcaattttatttaggaaacaatatctctaccttacaaagaatctgcaagtagcactgactataatacctttatacccaaaggaagagctgggatagagctccctaagacttttctgcctgcaaaagatatgggtggggttgccatttgaatacagttaccaatgaaaaactatcagcttatctaggctttaacaataaagttcatgggggtaaagagaaaagatttaactttgaagtccccatatatcaaaaagaatattttacaggtaacttgacaaagatgtttcagtggtctcggaatgcaagacagaatcctgacggtagaaatttctaggcaagggtctaaattaggcaaactggtaagattgtgaatgtcccagcctttatttctgaatcttgacctctgaactctgctgcctctctctaaacatgtttctgcctacaggtacttcaggactgattttggtgtaagaagacagcaggtgtacacttgatgatgctacttccttacctctcattcattcctcaacccattgtaaaataatgtcaattaatataggttcctttgctgaacacctgtgaaccaaagcatagttttaaatgcttgttgtaaactatctgagttaatcttcataataacagtcacaggtggctgcaccatgttttatagtaagaaaatagagttagaaagagtaaatatctagactaatataacagtactaaatggcagaactggaattcaagccatcttcattgactctgttctccaagaccttagcccctggtttattgcctcctgatgcccatttcccaggtgtctgaagagcatttttcaaagtcacagttaaccttaattttactaaacttaggtttagtaacactttccagtcattacctagctgtatctgtcagcagtattagacatcttaaaaccttggcaggtgactttgttccaggctttgttaataccaaatacccttgatttttctcttacttctttgatttttcatactcagacttttctacagtctccttttcaatgtggtcttcttttacttatcttctaaagttgatgttcatggagaatctgttccaaacctagatgttctcatgccatggtacacatgcccctcagctgatccactacttctgtgtttcaatgctaatgatttcacctggccagttctagtgcatcttttaagtcttggcctaaatggaacctactcctggaagtcttatggaaccatggtctccagattcgttcagataccctattcaatgtgttttccctcttagagcccatgtcacagatgatggtaaaggctaatttcattagttcccttccctgccagccagtcagctcctaaagagactatacctgtctttct

SEQ ID NO: 17782 - DNA, 2300 bp, Homo sapien
tacacactcattttccccttccttcctttgcgttgcaattatcacaattttcatgtcttcattgttataagcaccacaatacatagtttttctttaaagatcaattattttatgaataatttttaacaatgaaaaagagaatcttttatagttacctacgcgtttattatcttccatgctcctcattcttttgtgtagatctgagtttcattctggtatcattttccttcaatatgaagaactttgttaggccgggcgcagtggctcatgcctgtaatcctagcactttgggaggtcgaggcgggtggatcacctgaggtcaggagtttgagatcagcctggccaacatggtgaatcccccgtctctactaaaaatgcaaaaattagcagggcctggtagcgggcgcctgtaatcctagctactcgggaggctgaggaaggagaatcgcttgaacctgggaggcggaggttgcagtgagctgagatcgcgccattgcactccagcctgggcaacaagagcgagactccatctgagaaacaaacaaacaaacaaacaaaaaacaaaaaaacacgttaatagtttttgtaaagatctgctggtgacaaatttcctaagattttttttttttttttggtctgaatacgtcgttattttgcctccattttggaggacttgttttgttttgtttttggtggttatagaattctagattgacagccttttttttttttccagcgctttacagatgtatagttctggattcagtacaggtttgcacaatctataaaccgcattttaaagaaaaatgaaaaaactggaatatgattatatgaagatttactgaaatggaaaggtggaagtcattgaaaaaagcagattaagaagagtacatacagtgtgactttgtattaataaaaaagtattacatatatgtttgtgtaatatatatgtatgatccgtaaagatatgtacaatagggtgttaatagtggtcagtggtaatctctggggcgaagggggggtggtattggagtacgttttattttctcactttagcctccactggagcgtatattaatcaccccggtgttaaccgccgctcccacccttgggccagtccgcgtcagtgagaacttggccgatgcgcggtgcttggtcaaccccggtaaccgtcacactgctcgtgttacaagaaaaccagccagggttctgcttttctgctctgccgcagcctttaacacctgccagggttctgtccgagtgtatgggtttcgtagtcctcctctccaaggcgttgactgagcacagagcaccggccgccgccacatcccactctggcgcggggtctgcggagccacaaatccagccaggaaccgagtgccgcccgatccgagcatccgtcgcattttgacctggggttcccgggtctcaaggcccactttctggggcaggcagtggggagagaagcccaagctggggtatgggcagttgcagtgcggtggaaggggaaagctcgggcgagagcttggctggaccctcagaggaggggtccggggaaggcgggaccgcaggctccgggaaaggagagagagatagggacggaggaggggcggagggggagtaagaaagaactaagaaccactcgaaagcaatcagaaaacttggcgtttccagacatttttttttttttttgtagggggaacaggctctcactctgtcgcccaagctggagtgcagtggtgcgatctcgactcactttaccctggacttcctcgggctcaagtgatcctccagcctcagcctcccgggcatctgagactacatttgagtctacaggcgcgcgccactaagcctgagtaattttgttgttgttgttgttgttgttgttgttgtacagacgggggtcccactgtgctgtccaggctggtctcgaacttcttggctcaagcgatgaacccgcttaggcctcccaaagtgctgggatttcataggcgcgagcctcccgccaggccttctagacagcgtggcaaagtgttcccgggctttgtagacactcccattggcgcgtccatgccctgcctgggacccattggttcgttcatcccctgtgtgggacctgcccaggtaggcgccaaccattggttataagaacctgaccttggcgcctccagggaaacgcggagtgtcctggagcttgacgcgctggagcttgagaggtaagagagggtccctgctcctacggggactgcggagctcccgtttgtacccacgccctagggtctagtccggcacgaccctgg

SEQ ID NO: 17783 - DNA, 2300 bp, Homo sapien
ctttccaaattcagattggcaggagaaaaacatttgtaagaatgagttctttgaattgtaacttttataaatttggtctgggtatgatccacagcctccaaggaataataaaaagtccttgtctctgtcgtttgtgttgtttgtcataaggaagaaaatcatgagattcgattcttccttcgttttatgtcccgagagcttggctttaaaatagtctctctggtcctcgccgccagagggcgcaagtgttgctggtttgcatcaggccaccagcctggaacccaaaatctaagataagcagcattttcgtccgcctgtgccagctctcagagaagtttgtcttaataaaaggtcccagtccataagaggcgtttgtcacctgaaccttcatttttcttttctttctttctttctttctttctttctttctttctttctttctttctttctttctttctttctttttttttgagtacagggtttcattctgtcgcccacgttggagtgcagtggcgtgatcttggtcactgtaacctccgcctcccgggctcaagtgattctcccgcctcagtctcgcgagtacctgaaatttctgacatgcaccaccaggcctggctaatttttgtattttttgtagagacagggtttcaccatattagccaggctggtcttgaactcctaacctcaagtaatctgcccgccgcagcctcccaaaatactgagattataggtgtgagccaccgcgcccggcaaaagggctgcatggtttgcatcctccttggggatgtctcttacatccatggttaagtgataaaaggcttataggttttaagccataaaaacttactggttttgagtcacaattaagacaggtatacctttgaagatttgaacttttatatctaaaaggatttttttttaaaagaaagctgtcatcctaaacaaatgtctatggaaagatgagatcgaaagaaaatattaataggcaaagatgagaatcaatttttatcaaaattattaaattttgtgtttatgtatacctaatcatggctaagattttaaatgaaaattataagatctatttgtgtctgtctttatgtttatgcctatatgtgtgtgttgtgtatatgtgatatgtctctacctcctgatattgcaccactacttgacagtataattcagaatgtctggggaaggaccttagcatctgaatttttaaaaagcatgccaaaagatttgaacaagcagccaagattgggaactaattatctgattaacgaatgacatctctaattcaattccctctagtgcacagcaccttttcttatagctaaaaatgattgctaaatccacactgtaataattttttcaatgtataaggatagaaacccaaaaaaaatggaacaagaaaccaacaagagctcaagggaattgtgactcctacagctgttgagggagacagcaggtcaaaaagtagcagaaacttgatcagaacaatagcaacagtattagcagctaaattaatagcagtgaatccatctcggctctaattacaacaactattaggattatggaggctactataaaaattgaatgagaaagtcagtgagatgcactgtttaatttcctttctggctctttcactgtttctttttgttttgttttttcccttttccttgccaataaaaaatatttgttgagtaactcaggcctactgtacaaagtaacaattctctcctccctttccatcttcttcctctccagttctacttctgagaaagtaatccttaataacagtttggtgtgtatccaaaaaagcttttttgtagcattattctccaaagtgtttgaagcatttcttctgataaagtttctttagtctttagccagaactagtctttggcccacttagtctattgataaacaggaaatagcacatattccccccttgaggctagaatggcaggcctaaaatgagtaggagaattctgagaaatggaaactttaaaaaggcggcaaccttctagtttcattctcagaaataccaaagcagcatttttcctggacttgttctgcagagcgctcagatttgaaagccatttctagcctttgaggattaccactgtcctcagccaaactgcagggactcctaagtagatcagagctcctggaactttctcatcttttcagcatctcaaccctgtggaatcttttaactcccaaggtaagtacagattgtccagagagatctaagccatgcttattcaatggaatggagagtctctcaaagagacctcata

SEQ ID NO: 17784 - DNA, 2300 bp, Homo sapien
tgggccggtctcaaactcctgacttcgtgatccacccgtctcagcctcccaaagtgctgggattacaggtatgagccaccataccaggccctacctttcctttttcttttcttttttctggagatggagtctcgctcagttacccaggctggagtgcaatggtgcaatctcggctcaccacaacctccgcttccagggttcaagcgattctcctgcctcagcctcccgagtagctgggattacaggtatgtgccaccacacccagctaattttttgtatttctagtacagactgggtttctccatgttggtcaggctggtcatgacctcttgacctcaggtgatccacccgcctcggcctcccaaagtgctgggattataggcgttcttatgccatacgtttagttaacttttggagtacttccatgggactatcaatcaagacatcctgccttcccctggctaagagtgaaagacagggtggagagggaacttgaaccaagagaggtcagtcaaaatttgtatcacgagcagagtcacaaacagaaattggtggaagctcgttcactgcaacaacgttgcctggataagaacttctaattcctgttaggcagtcccaatagtattgttaagttcctgttctttcagggctggctttacttattttgtgagctactccatacacttctaataaattccgttttagtttaaattagcctgtttgtttctgttgcttgtaaccaaagatccctaagtgacaaaaatgtttaatttcctgcttgatttagttgatgctacctctcaactttgtatttttgctattcacttaagaaaagcttgtacataacagttactattaaacaagcacctaatatgtatccaggtgcttcatatggataaactatgtctagtcttaaaactctgtaaggtaaaaatcatatatcaatataatgtcttttggtagagtaaaaaacactttttataactataattaaggacaatttgtaaggttttctctcctattggaataactaaatccaaaccttgtttttgagggttctcattatgcaaaccaattatttttataacataagggcctctagggcagtaaacaataccttctattcccagctatttagcccagaggtggcacttcccagaggaagggaggagaggtggaactctcatccaaattcaataaggctgtgtcagccaacttcagcgagacaaagctgtacataacataaaagcactttacaaaccttaaggtaaatcacattcattttggtataaaaacggcatgaaaggaaactttctgtcaagtgtccccagtgcatgctagttacaattcataaagctccctctgcgttagtactgtattcatatcgctggtggtgacatatacaactgtgttcaaggatggagaccattttcatccagtatagcaagtgcatgcagttatgcttgaatatagccaaaacctggaagacgttaaactaccagcttggatgaaaattaaccgtctcaagtactgaggaacaagcatgaacctttctcaatccaatcatctttccttataattggcggcaataaatctaaggctcctatctcctgctatgtcgctttaaatcatttctggaaggctaagacatataaattaaccaccatccctgccgcacgcgtacagcaaagtcctttccacctccagattcccttcctcccaccgcccctagcttcatcgcctgcaggaacacagggctcagcaacgggcccgagctctggctcccggcgccagacgtctgcgcggtgccccaaacagcttgtcaaaaagacctcgcagagagaggttcagagctgtagctttccagcgaggctaccatgcagacccagctacgaaaagtaaaccaaactagccaaaaccagcccacaagggccctcttctgtttcagcggggcgggagcggaagctcaggtgggtcatagagttctctagttctggtttccggaccgcattcggaactagagcgcctctcttccgccaggcatcccagaggtcctggtggtttcatttccgggtgcggcttctgtcataaagcggagacctcccttcaaacgtggcgtcgtgggttgtttgcgcctcgcctggggtcagcgagcaaggacgggcgcgggcggggatactcaaagccaacagctggagtcagcccttgtgtcccgggctcacagtggcacgactgaatcctcagagtcggctggcttttgagctctcacgattggggaggagggggcgtttctggttcgc

SEQ ID NO: 17785 - DNA, 2300 bp, Homo sapien
caggatggtctcgatctcctgacctcgtgatctgcccgcctcagcctcccaaagtgttgggattacaggcgtgagccaccgcgcccagccatcttaattctaccttttaacttctctgtatctcttaaaatagaggaagtaatagtacctacttggttatcaggtggtgcggatgtaaaaatgtacttagcagagtaactgacataaaatcataataaatatcaacagttatttgtttaaaccaccatcatcgtgtggctggatcatgtcaacagtttcctgagtggtctcccattagattatgagcccgtgatggtcccaaaaggtgaaaagaagggagattggtccatactttcacccaaaagtggaagagaatgaagttggaaaagctttcggattgatgctatattttgaaaatagtattggttcatttttccttaaaatatatgcatttttcagagaaaggaatggaaaataaaacaaatataaagaagataacatttgtaatcagcacccagagggaaccactaataggtatatatactcctctggatttagagttttgtatctttttttttttcttatttcaaagcatttttctgtatcatatttttcaacaatatgatttaaaaggcacatcccaacatagaaataaatacatgttcattgtagaacactttgaaaaatacagaaaaatattaggaagaaaaataaaactctcactatcctgcaataaccacttttaacgttctgctgaatatccaagctttttttttttttttttcttttgagatgagtctggctttgttactcaggctggagtgcagtggcgagatctgggctcattgcaacctctacctcctgggatcaagccattctcctgcctcagccgcctgagtagccgggattataggcgtgtgccaccacccccagctaatttttgttttttcagtagagacagggtttcaccacattggccaggctggtctcaaactcccgacatcaggtgatccacccacctcagcctcctaaagggctgggattgcaggtgtaagccaccacgcctggcctatcctagccttttttttctatacatatatagtcatactgtatactgtattgtttggtgtcctttttttgcttaacactttatgaattttctgtcataaaatattctataacattatgcagctatctgatttaccataactgtttgcattctctcaccttatacctggctttctaatttcccctattcccctattttaataacagaggaaataataatacatgagtatgttatacaaaattttaatgtacttctgatcacttttttaagaatgaagttttaaaatactgaaacactttttgactcacagagttcataggcaaaatgtgagaaaaatcatcactttgctctccatccttccttacaccctgaaattaaccttagggacagctagttcatttaacatcatcaatcttgttctccagttccaggtcctggaatctagctcttagtgtccgaaagaaacttacttttgtgtaagcacacctattatatactaggcactttacctaatttatctggtttaaacttcacatgcccgagagagatactatcattgtcttcatttcacagataagaaggttgatgagacattaactgtctcagtcacattcagggtagggattcaaactcacatccaatgcctcctcaacctcttttacgtgcagcactatcctctagccccactgcccgtatataggcctgggctatatcaccattgtccgcccttgagcctggaaggaaaatgagctgaggggttttgttttttcagaaaggaacaggatatttcatcatctctatgtttacgtttttcagagaatttctgtgcgaggaaacaaatccattgtcagctttttaaaatatatccctttggagtagccacttaacatcctctgaggcccagatgggctagcttgccgggaccaaaggaaatctttgggtctggaaggcgacaagagatcacaggctttctaggtctaccgcgcaccccgatgacgtcacgcggcgacgttctctgacgtcagagtttcctgcccaccatctttgtccctggcaaagtgggttttgcgcagtggcttagacctagaaaagaatcgtgacgggcaggaaaccattacaccaccacctgggctgtgctctccggctcccgccgccacccccgccctcgccttcgcctccgcctccggtgagttcagggcggttgcctttagggtgtgtccctaattgacgg

SEQ ID NO: 17786 - DNA, 2300 bp, Homo sapien
ccaccatcatcgtgtggctggatcatgtcaacagtttcctgagtggtctcccattagattatgagcccgtgatggtcccaaaaggtgaaaagaagggagattggtccatactttcacccaaaagtggaagagaatgaagttggaaaagctttcggattgatgctatattttgaaaatagtattggttcatttttccttaaaatatatgcatttttcagagaaaggaatggaaaataaaacaaatataaagaagataacatttgtaatcagcacccagagggaaccactaataggtatatatactcctctggatttagagttttgtatctttttttttttcttatttcaaagcatttttctgtatcatatttttcaacaatatgatttaaaaggcacatcccaacatagaaataaatacatgttcattgtagaacactttgaaaaatacagaaaaatattaggaagaaaaataaaactctcactatcctgcaataaccacttttaacgttctgctgaatatccaagctttttttttttttttttcttttgagatgagtctggctttgttactcaggctggagtgcagtggcgagatctgggctcattgcaacctctacctcctgggatcaagccattctcctgcctcagccgcctgagtagccgggattataggcgtgtgccaccacccccagctaatttttgttttttcagtagagacagggtttcaccacattggccaggctggtctcaaactcccgacatcaggtgatccacccacctcagcctcctaaagggctgggattgcaggtgtaagccaccacgcctggcctatcctagccttttttttctatacatatatagtcatactgtatactgtattgtttggtgtcctttttttgcttaacactttatgaattttctgtcataaaatattctataacattatgcagctatctgatttaccataactgtttgcattctctcaccttatacctggctttctaatttcccctattcccctattttaataacagaggaaataataatacatgagtatgttatacaaaattttaatgtacttctgatcacttttttaagaatgaagttttaaaatactgaaacactttttgactcacagagttcataggcaaaatgtgagaaaaatcatcactttgctctccatccttccttacaccctgaaattaaccttagggacagctagttcatttaacatcatcaatcttgttctccagttccaggtcctggaatctagctcttagtgtccgaaagaaacttacttttgtgtaagcacacctattatatactaggcactttacctaatttatctggtttaaacttcacatgcccgagagagatactatcattgtcttcatttcacagataagaaggttgatgagacattaactgtctcagtcacattcagggtagggattcaaactcacatccaatgcctcctcaacctcttttacgtgcagcactatcctctagccccactgcccgtatataggcctgggctatatcaccattgtccgcccttgagcctggaaggaaaatgagctgaggggttttgttttttcagaaaggaacaggatatttcatcatctctatgtttacgtttttcagagaatttctgtgcgaggaaacaaatccattgtcagctttttaaaatatatccctttggagtagccacttaacatcctctgaggcccagatgggctagcttgccgggaccaaaggaaatctttgggtctggaaggcgacaagagatcacaggctttctaggtctaccgcgcaccccgatgacgtcacgcggcgacgttctctgacgtcagagtttcctgcccaccatctttgtccctggcaaagtgggttttgcgcagtggcttagacctagaaaagaatcgtgacgggcaggaaaccattacaccaccacctgggctgtgctctccggctcccgccgccacccccgccctcgccttcgcctccgcctccggtgagttcagggcggttgcctttagggtgtgtccctaattgacggggtcggggacggagagaagggtaacaccaggctgggtcggagaccggcggaggcgaggaaatcctaagagcgtgaccgttgatgatgcagggaaccgtcgggtgtgaccattgagagggaaaaggttggagaaagggtctctaccatgatgcctgtggtgcggtgagggaatcctcgggtgtggcagcaggtagttgggggcaggaggggaagatgtgtttcggaattgagggtttagggg

SEQ ID NO: 17787 - DNA, 2300 bp, Homo sapien
tgttgtatcttagtgatgcagttttatctattcctccatcctctttaaataattaaatctagaggcttggtaattttcttgttcagaatttttagcaagaatacctattgggtgattctctgtacttcctgttgcatcttatcaggaggcacataatggagtgacccattatagtacattgtaatatatgataggctggtccttgacttttaggatctctgttctggtatctctctcttttaaaaatgatcacttatagtttctgtacatttgttttttcacctgtattctctcatattctcttcattaataaaagattaacagataaaactccattttatagattaattataggctatggaaaattgttgtttatctaatgccatagacttttaagtttcatagccccaatattggtaaattgtcgagtactacagttctttggagtgttttggatcatgtgtaactttgaaaatgtaatggaagttgtagacccactcactggaaaatatgcttgaaagctcctacaaaatttggcgatttcatttcagtaggtttaaagacaccctctgctatctccactcatccatgaacttcagttaaagacctcctactttggcttattctttaattcttattctttcctcctacgatggcttattcttcttacttctatctcctggccatccaagatgggtgtgtgtgtttctctgtttctggactttttgtatatacagtgattggatgtcactctacttctctgccatactgctgtaatggtaggtttttttggtggggttgggggcatagtctcgctctgtcggccaggctgtagtgcagtggcacgatctcggctcactgcaacctgtgtgtctcccgggctcaagcaattctcctgcctcagcctcccaagtagctgggattacaggcatgtgtgaccactcctggctaatttttgtatttttagtagagacggggtttcaccatgttggccaggctggtctagaactcctgacttcaggtaatccacccacctctcacctcccaaagtgctgggattacaggcacaagccactgcacctggccataatggtagttttttgttttgctttgttttgttttgttttgttttttgagacggagtctcgttctgtcaaccacattggagtgcagtggtgtgatctcggctaactacaacctctgcctcctggattcaagcaattctctgcgtcagcctccggagtagctgggattacaggtgcctgccaccacgcccggctaatttgtgtatttttagtagaaacagggtttcaccattttggctaggctggtcttgaactcctgacctcatgatccagctgcctcggcctcccaaagtgctagtgctgggattacagtcatgagccacagtgcctggccttttgtttgtttgtgttttttgttttgagacagaatttcgctgttgttgcccaggctggagtacaatggcgcgatctcggctcattgcagcctccacctcccagatgcaagcaattctcctgtcaaagcctcccaagtagctcggattacaggcatgcacctggctaatttttttgtatttagtggagacggggtttcaccatgttagtcaggctggtcgcaaacccctgacctcaggtgatccacctgcctcagcctcccaaaatgctgggattacaggcatgtgccatcacgcctagccttggtagtatttttttttttttaatcaaaagcagtacggttgagatgagaattttctttgaaaattaatatccctgacataaatgtttttcagatgtttatacatcatgaggaacatccttttgtttgtattcaaaggattcatttgaactgattcacctatcagttcaaataataaataaaactgtatcatatagcttggtatctagcctgtagtacagcttggtcaaattaagtgcctgatcatttagtttggtttagttgatgcacctgcatgtttcaaaatttttatgttgaggtggtgttatcgcatagatcatctgacttctcattttttgtatttttcttcccagcaatctgcagagcgctgtgtaagcacattgcttgatctaatccagaccaaagtgaattatgtggtccaagaagcaattgttgtcatcagggacatcttccgcaaataccccaacaagtatgtccaaatacctttacccctctttctcaaattacttaggaaatgtttaaggcactttgaaattgcctaggtaagaattactcttttgaatgttcctggtcataatagg

SEQ ID NO: 17788 - DNA, 2300 bp, Homo sapien
aagttttcaataaagtcaggttcatcagttttttttcttcttatgacttaggctttttgtgttctaagaaatctttgcttaaccccatggttacaaagatttttttggcatgtttttaaatataagccttatagtttttgttcctacatttagttttataattcattttgagatcgtttttaaatatgttgtaaattaagagtcaatgtaaaaactttttccgtaataggtcttgaaatcagatggcctaagtcctgcaactttttttcttttcaaagcttgttttggctattcttggtcttttacatttccctgtaaattttagaatcagcttgtcagtttctacaaaaaaaatgctgagatttttattggaattgcagtgaataagtagatcaatttgagggagaattgacatctaaacaatattgagtcttctaatccattagcatagtatatctctctgtttaggtctttaatttctttttgcaatgttttataatttttttatgcacaaatcttaccttttgtcagatttaagtatttcaaatttttgatgttatagtaaatagttttttttttttttttgagacagagtttttcgcttgtcacccaggctggaatgcaatggtgtcatctctgcccactgtaacctccgtctcctgggttcaagcagttctccatcctcagcctcctgagtagctgggattagaggcacccgccaccatgcccagctaatttttgtgtatttagtagaggcagggtttcaccatgttggccaggctaatcttgaactcctgacctcaggtgatctgcctgcccttggcctcccaaagtgctgggattacaggtgtgagtcactgggcccagcagtaaatagtatttttaattttaattttttattattgctagtatatagaaatataattgatttttatatattgaacttgtttccttcaactttgttaaacttactttttctttctagtggcctttttgtaaattccttctagtttcctacataaataaatcatgtcatttatgaacagagacagttttatcttttcctattcaatcttatgccttttattttttcttcttgtctgattgtactaacaggacctccagtaaatgttggataggagtggtaagaaaagtgttctaattcatgggagaagcattcagtctttcatcattaagtgtgacgttagccataggtttttcgtggagcttgaggaagtttcattctgttcctggttttctgagttttattatgaatgggtattaaattttgccagatgcctcttctgcatttactaaaatgattatgtgaacttttttagtccattaatatgatggattacatcagttgacttttcaaatgttaaaccaaccttacattcctgggataaatcctacttgtttaggatgtgttgtctttttttgtgtattgatggagttcattggcagaaacttttttacatctatgttcatgatatatttactcttcatttctgatatgatttacttttttttattatttctttcctgagttagattggctccctttaccttttcctgttgtcttgccctcacctcacattatctggtcatcccttccccagatgttttcttttactgttgtgtggtcttccttggtagctagcattgttgtttgtttgtttgtttgttttgttttttcaagtatgttttgtttgtcattaaggaagttgtactgctgtctttccacttttttataatagggctttgaacagttgctgtgttttttaccattatgatacttatatttgaatgagttggaatttgcaggactagctattagtagacttctatagaaaaggaagctaggcgggtagttttttagactttgctcctcaagaacgtttccttcgttgctctggtgtagccacagcttcttagcctctctgaatctaacttgattctagagggctgatctttgccttcaagccctgtctttcaaggaagccctgtcttccaaggtgtttgttttctctttagaaggtggtgctttttgagctctttcatctccagggcccccttggtagaaagggacttgctaccttttttttttttttccagccttattcatatgctgctcctgtttgatcttggtctactctgggaatggggctgtcttctgagaatgaatatttgtggtcagtctctaagacctactactactggtttcctctgaactccttgtgcctgcctactgtatcaccagagcatctcaccagttctgtggactttctttgacagta

SEQ ID NO: 17789 - DNA, 2300 bp, Homo sapien
tagctgctgctctggtcctttcatacccccaccccaaccctctgggagcctacctagaataaatggaaccgctgtaccacggtgttgctcatcctcctgtagaatgcctgcgtgtccctaaaaaggcaaaaagtaaaggccccatgctgagacttcctacatgccaggcattgtgttaaggattttacacacctcagctcatttacaccctgtcaacaacagtgagggacaattaatcacactccatttaataaatgagactatagacttcaagttacttgcctcagttacaatagtaagtggcagagtcaagatttaaatctagctctgtctgattctgaagcccaggctcatacccattctcctctgtgactgaacaggagagggaagggaggaatagggaaggtgcccaaaatgcagaggtcagactgtggaggaaaactgagttctgtttgggagcctgagagccggagcacagggtaataggaggtcacagtggaggatgcagggtcccaggggtaaaaacacttgggatatctctcaagcttctgctcctcctcctgccctggaggctctaaaatgcaacctgagcaggtgtgtccctgctttaaaactcttccatagagccgggtgcagtggctcacgcctgtaatcccagcactttgggaggctgaggcaggtggaccacctgaggtcaagagatggagaccatccgggccaagatggtgaaaccccatctctactaaaaatacaaaaattagctgggtgtggtggcgcgtgcctgtagttccagctactctggaggctgagacaggagaattgcgtgaacccaggaggcagaggttgctgtgagccaagatcgtgccactgcactccagcctggcaacagagcgagactccatctcaaaaacaaaaacaaaaacaacaacaacaacaaaaaactcttcgatgacttcccatccagcacagggctggatcccaactcctcatcctgtcaatcagggcctttgtgaccaacctctcgcctctccacccaccatgcttcctcatgggctcctgtctggttcccagactcacttctcaagcctgtgtaattgctcttgacttccgtagctttcttctgctacaatctccctccacccagccccaaaatctacttctttcaaggttgcttccttgaaagttgcctcctgcgaagcttcagtgactcgtctaatgagttgtcccacttcccctgccctccgcagaaccttgactttgcacacagcacattttaatgttgtgtggtctgcttttgatctcacgttggactgtgagcctaataccaaactcatcagtgactgctcagctagggactcccaatctttgtattcacattttacatctaagtgagacaagcttctcgacctcaactatctcatctgtaaagtggaggaaacaatctaccccgtagaattgtgaggattcaatctgaggatgcatgcaaagctcatagcgcactggcaaaatagaggttgcctatcaatgatgacattgattatgacatgacgttgatcattaaaggttagagatgatgacttttagaataaatacatgggtgattttgccctcaatcctgacaaatgctggtatctcccattctggagagaagaggcctatgacagttttaggggcgtggaggtcagcattggcaggggagaccttctttgtgccagccagctctgcctttcactgcagcagtgaagggtgagagtgatcacccttcgctcagcccttgaggagggtggaggagcagagcctggatgtctctaacacactgtgccgggcacacagtggcctggtgacaggcctgggcgaggggcatatgaggccaagagtcggaatgagcaaaggccttgagggctttcccatgcctttcttcagctcctccaagttacagctaaattcccgcagggagagtctggaggggtgcgaaggtcgaggccagggattaaagaattcgtccagggccgcccaagcgaatatgtcaggctcagggacccagcggaatgccagcccgcacccccgcaccccctcctccttccagcgcgagcaggcggcgcgctccggagggagagctggggctggaggttcctaccccctcggcggcccgcatctgcccccgcgcgcccgccctgagcccgccccgactgggcaggcgggggagcccctacttctctccccccgggcgggggagccggggggcagcgccggagcccggggggagctcagccccgccgaccggccggccagggcagggg

SEQ ID NO: 17790 - DNA, 2300 bp, Homo sapien
tcttcttcgacaggatctcactctgttgtggtgcagtcatagctcactacaacttcaacctcctgggctcaagtaatcctcctgcctcgcctcgcatgtagctgggaccacaggtgtgtgccaaccacacctggctaacttttaaaaaaagtttttgtagagatgggggtctcagagcttttgcactggctgtccctctgcctgagcactcatcccccagacagctgcagagcacgcttccgatcttctttcaggtctttgctcaattatcaccttatccctgaggcctttaaccatcttatagaaaattccacacataccctcgcctcctttattcctttatttgtctccctggaatggatcaccatctgactatttatttatttatttatttatttatttatttatttatttatttttgagatggagtctttgtcgcccaggctggtgtgcagtggcacgatctcggctcactgcaacctccgcctctcaggttcaagtgattctcctgcctcagcctcccaagtagctgggattacaggcgcccaccaccacgcctggctaatttttgtattagtagagaaggggtttcgccatgttggccaggctggtctccaactcctgggctcaagcgatccacccacctcagcctcccaaagtgttggaactacaggcatgagccaccacacccagccttagatttatttgtctatctgtcattcaccactcggtaacatggaagtagcccccataaggtcagggacctggtcttttttgtttactgctgtatcctcaggcctgcagttgtgcctggcacatagtcggtgctcaagacttttttcttttttaagacagggtcttgttgtgttgcccaggctggagtgtagtggtgcaatcatggctcagtacagcctcgatctcctgagtagctgggattataggtgcgtgccaccatgcttggctaatttttgtattatttctgtagagacagggtttcatcatgttgcccaggctggtctccaactcctggcctgaagtgatccatcctcctgccttggccttccaaagtgctgggattacaggcagcacttacaccgtgaccaaccaagaaatgttggttgaatgaatgcattgctgtggccatgggggtggtagggtgttatgacccacagcctgctgtagcgcaatcacatggttagtgtggggggtggggcaggttcttcagagaaagtggggatcatggtgctaacagagctgccgggagaactgggacccactcagacctgtgcctgcctgtgagttctgatggtctgatactttcacatacattatttctttatccctcacaacacaccaaaaaggtaaacattattacccccattttacagttgagaaactaaggcacagagaggctaggtagtatatgatggtcacacaggatttaaggctacacttatgagttttgggccctatttctatgtctgtttcattcccattctcctgtactcactaaacaccaaggggtatggcaacccctacccctgctttccctccactcccccaaagttcccatttggccagccccgtgagagaagccagccccagccccaacctctcctccctctcccttggttctgcagggcagtcctcgcctgctgggaagggttaacaaggagtgtttgtagcagccgctgtctccaaggagaggggaggaaagcagagtggggaggccggcagccaccccaggctctgtggccgcagccagcagagggtaggaggcagccagcttgatctctccagctctggggaaagagaggagtgtcctcacttccatctggcctcagaggggtgaactccaagtggactgggcagcctgagagcaaggttgctgcagggccaccagggaaagctctggcaaggactgaggaatgtgggggggcaggggctgggccaggcctggcagctgaagccagtggcaagtagcagcactggaggtcccgggctctcagcgagtacacgggaacctcagaatcaggaagaacccagccgagacccagcagcagcgggaggaaagaggcggcagtgggagaggggaggtgcccacctcctgccctgctggggtccagccatgtcccagcctgcgggaggcaggaggaagcccaggaccctagggccgcctgtgtgcagtatccggcctttcaagtcgagtgagcagtacctggaggccatgaaggaagacctggctgagtggcttcgcgacctctatgggctggacatcgacgcagccaacttcctgcagg

SEQ ID NO: 17791 - DNA, 2300 bp, Homo sapien
tgggaagaggggatgcacatcctaaggatggatggcaaagggctactaggcagattagggttggggaggcaggatgagaagaatgaccatgccaggggacactctgttgtggtgtcttggtgggatggtctttgaacaggctcactggtttagatgtgcctgccaggggcattaaatcttagtgagtgtctcagtgagattgctcatggtgccagtgtccatgggtgacccccagcagtggcctccaaactgaattgttcctgtaatgcgatcttgactgtgttcttattcgccacccttccttgattcctatccagttctcaagtcttttggtcattctgtgaggtctcactattctttctctttaaatcaaccagagtgtgcaatcaagagccatggtggctttcagtaagtttaaagagaatgagcttgttgggagacaattctccttgagccttttgtgtttatgcatgtcttgaaagcagaggccctgacttttcaagggtttttggataagtgagcaatcttggaaaatagacgtagtgcctcctttctgagcaaacagcaggtttgctcactaccaattataaaagattcaggtttcctggctgggcgcagtggctcaggcctgtcatctgagcactttgggaggccgagacgggcagattacgacgtcaggagatcgagaccatcctggctaacacagtggaaccccatctttactaaaaatacaaaaaattagccaggtgtggtgacacgcgcctgtagtcccagccacttgggaggctgaggcaggagaattgcttgaacccgggaggcagaggttgcagtgagccgagattgcgccactgcactccagcctgggtgacggtgagactctgtccgctaccccccaccgcccccccaaaaaagattcaggtttcctaagcttgggatttctgtagtaatgcaaacctctgcatataccggtatccactggcactcatttgtgtcactcataggacaccgaagcaagggaagctgaggcaaacaggccaaagttgctgtgccacgagtaataaagtcctttgtctctgacttggagcctcatgttttctggcagcacccatgaaactacaactagttaacatggtagcttgcaaataggataacatttcagatccttcacagttcttgatagggttgcccccttgtgactacgagattcctgggggccaggtctgctctctgttctccagcccatcaacttgcctccaccaaacttagatgcccaaaggaagggactccattgccctccactctcagacttggatggaggatcgcagatcactattagactgggctctctttgaggtcagcaacttcatctcaacagatggagggctttccagagctgaatctgtccattgtccatctacacattcctctctgtgccaacacactccacttcgagtccaggaaaggaaaggattttcctgaagctccttgattttactccctccctcacccctgccccccaacaaatacacaatatccaggagctataccagcctggtacccgagtcctacttcctactggacttggcaccattcccttgtgttccttggtactggcaatgaaatggaaataggagaagtggagagcatggggtgaagaaggataaggataagacaggaagaggaagacagaatataatgatacaaacaaacccagtgctttcagtgcttcccataggccaggtaaagcgtggtactgtattactatctctgacttacagatgaagagactgagggtcagagagataccatgctgaacatcagataacttttatatttatgtggtagagctgggatttgaacccagtttattgcgggccaaagccatcctctcttcccctttaatgccttcctaagagggaaggtaggagacatctgagttgttagtgctttgggaggctctggaaaaggaaattattcctgggcagagccttatgggcaggtgaggttctagccccaccccttgtgacctaatagaggccctagacatgagacaaagttctatgggttctgggcaccctctcacatcccagtctctgatcagggaaagcagggcacagccttgggaagaatggataagcatggtgagtggggctggaggcagggtggggctggaggacaggacctcttgaccctagcttggacaatccagcccatcaccatgaagtccaaccttttctcagttacccatccatgtagctgcaagccctctcctttcgccttcctgaatttttttttttttt

SEQ ID NO: 17792 - DNA, 2300 bp, Homo sapien
ggatgtgcagacgcatccccgtcagggagcctcaagatttctggagttgaggatggatctctttgccatctatgtcccctctttgaggatgccctctgcacattcataagaagcatccctgcctgggttggtgccccagaggtagtggacatgaagctggcctgccccttgctcttagagagcttccagccttgtcaggtaactagtaggaaggtcctccttccttctgcgaggtgggcgtggcagtgcatgcctgtagtcccagctgctcaggaggatcgtttgaggccaggagtttgaggccagcatgggcaacacagcaagaccctgtactcaacccatatccccccaaaaagaacagactgtaacacagcggctgattcaatcaaaaccctgcagtggaccttggggagggagcttctgaaggagagtgagatagtattactagatttagcaaataaaaatacaggactccagttaaacttgaatttcagattaatgaatattttaaaaagtaactgggtgctatgcaatatttgggacacttatactaaaaaattattcatcattaatctgaaattcaggattaattgggtatcctctgtttcatctggcaaccttagaaagagagaaagcaagagagagagagagagtgtgtgtgtgtgtgtgtgtgtgtgtgtgtgtttgtagttacaggtatggcatgatatatggtggcttttaccagtagatggattttgacaggccggatagccctgctttgggcagggagctctgatgatcatcagttggtaaggacactgtggaacaagctggagtcagacctaggtttgccaattctttctccaggcagaatctttccatcccttcttctataaaacattaaaaaattagctgggtacagtgacacatgcctgcaatcccagctactcaggaggctgagatgggaggattgcttgagccttgaaagtcaaggctacggtgagctgtgattgtgctactgcactccagcttgggcgacagagcaagaccctgtcttaaaaatacatatgtacatatatacacacataaaatgtctattaaaagggctttttccaattcctccacacaagtggtgtatttttctaaatagtacaaaaacgttgtgtgataccgaggccctgagccttagggttggaacacagcattatttttgttcagcactttagggattctagattatttttacacacattaactcatctaatcccacaatgacccccagagctcagtatcattttccatttgcattttacaatgtagtgaattgggtagaagtgagacagcaaccagctctcagttacacagacagataatgaaaatagtttactttttgctcaatatgagtttagcaaaggctttcacgtaaaccgtttcactccaaccttatggggtatataaaatcaggcactttacactcattttctcttttcatcctcatgcaacgctgggcactaaatatcgtatgctgtcattttattgatgaggaaactgacgctcgaagtagttaaatcctttgccaaagatcacacagctgcagcctgccccttattaagtgcacacttcgtgatgccatgcaccctgttcagtaatttacaggcgttattatctccccaacagtcacagaatatcggtattcttattatcccatttactgatgagaaaagtgggttcagagagggtgagtgactggtccaagaccacacagccagcaggtggctgaggcaggactcaaagggctagcaaaggagcaagtctggaactcaaacccagttctgactccagctctgtgctgcttctctcgcaccccgaccctgggtgggggcctcgctccccacccagctgaaacaatcaacgaccctctggtagaccaggacctctcttcatcgaagtcttaggtagccacgcttgccaggagaaggcctttcttccttcaccctccctggacagatccgggtcaactggaggtggcgggcgagaggaccgatccgcagggcggtggcgggcgcagggcgaggctgtgcagcgaacggaagaggctccgggaccgcctcgcgttccagcagcggcgcggggtgggtggggcgggagtgccgggcctccgccccctccgcctgcctttccttcctccctccctcggtccccggggccggcggacccgcgggcaggcactgcccgggctggacgacgtctggccggctcccggcgaagggcagcggaggagcggcccagagcgcgcagctagggcactggcgaaaccc

SEQ ID NO: 17793 - DNA, 2300 bp, Homo sapien
atgtacccccaaacctaacataaaagttaaaaaaaaagaaatcacaggttcacactgttcctgttatgagactgtagttcctggaaggcagaggctctccttcctatttctgtctctccaaggccttccagagcctgtcacatagtaaacctccagagatggcaattgaaggaggagtgaatgaataaatggtggtacaaacttaaggagtcgatgagtaacacttttggtatttccttctttgaaaaaaattctcaaaaaaagaaaataaataaaaaagaacaaccctctaggtccctttagggatcttctagaattacctcttcccctcccctccataacccaattctcttctgttggacatgcccatcttctctgctgagctgccttcctcaatatatatgctaaacagtttaatggtttttagtcatgaaataattttcactcctttagtcttgcttgttggaacttatctagagcgttctgtgaccctctttatctagagttgagggcacaatcactgctggtataatggggagagatgacctcacgtcttttttctgacctgaaggtattaactctgaacttcccttttcacctccattgcaacctgctcctccttttgttccctatcacagtcaatgacactaccacccggcccccgtgtctacgcaggaaacccagaattcaccccagactcttctctctccactaccctctccaacccaggtgatcaccagctcttgtctagtctaccccggggtatctctgagatcgcttcacttacctctgtctccagagctactacctaagtccagggcactgtcatctctcaccaaaattactgcactggccacctaattggtctctgcttttaagcgcctctcatccccgtgcatttttcatttggcagccagaaaatacaaatctgatattactcctctcctataaaatcctctggtgagtggttctcatttcctccaagataaagtgggaactctaatgcatttgacaaggccccagctatttagccccctccttttcgggcatcatctccttctactctccccttgaagaactacttgttacacaactagtctgcaaagtactttgctcacttctttactcggtcaacttctgcacaacacctagggtttggctcagataccatgccttcccggaaaacgtctttgctggctctctgagcttttccagcccgtttcctgctgcagagcccaagcggccttgggcccaccccgctgggccgtgcagcattttggttaaactcatatgcaatatatcgttgggttaccaggcttcaaattccaccttggccgtttactagctgtacgacctaggtcaaatgaattctgtcttctcatctgcaacatggggaaaatatttcatcagtctgttgtgagaattaaatgagatgatgtaaggtgcctgacaattaagagtcagctattattatagtgctgaaaattaaagctcgatccctccgccccgccacattctcagggtcagattcgtgtacgatttcgttttaatgtacccttttcttccagcatccttgtttgctactcggcgagacagttacaacaaaccgggaagcgatcaggtacgcgagctggtcacgactcacagtcccagagctcgccgactccgaacgcccccaggtggcccaagcactctgcagcaaaagccgccagctaggacgtaccattcgaaattgtagggaaagaaaggctttgcataaccaaatactctgtgtttataaggtccctcctctttcgtttcctaaccgcaaattccatcacacccaataaagtgagaaataggattgtaaataagacggagcaagtaggttccacttcctccccgatcgtgatcgtggcattggtactttctcttctcaattccctctcaataatggtacggctagcggaggggggaatagagggccctgggaaggcctcagggctcggcggctagtaccagtgcagaaacatccctcctgccgcagctttgtggtaccacccgctgcccgctgattggctgccggggtcccgcagtccgcctcagcccgccgcgccgccctcagtacagctccggccgccgcgccgcctggctttcgtattcgttgttctcggcgggctgtggggcctccgcgccgcggccgttagtcatgtcgggtaggtgacttcttcagcgagcagcggcagcgacgagaaggtcctggcggggttgggctgtcttcccgcccaccggagggccctgaggagaagcctccggccctg

SEQ ID NO: 17794 - DNA, 2300 bp, Homo sapien
tatggtcaacaagattcatatgaccagcagtcaggctatgatcaacatcaaggctcatatgatgagcagtcaaattatgatcagcagcatgattcctatagtcaaaaccagcagtcctatcattcacaaagggaaaactacagccaccacacacaaggtaagatttactgacctctattattatttttccccctctcagaattatttgtatgaatttctgattaaaagaaccacagaggatttcacctgtttgtaaaaatttagggtaaccttgaagatatgttccctctcatggtaatcaaaactagtttatcagatttctacttctgaacttggaggccctcagatggtcatgacttttgatggctgattacgtgaatttcctttttgtctcagtgaactctgatccttgacaatactgctggtaccagttcttttggtgttggtgttgtacttgatttggggtacttatttatgtacctttaaggcctagtacatggtttggttcatagtaggtgctcagttgaataattgtaagtgtaagtaagtgcttgttgaataattgaatagtaaatagtaagtgcttgttgaataattgaatgaataagtaaataagtaaaagtggaagcacattcactaaatatcttctctcagtttgaagattcagttattccttgtccatgctcaatttacatttaaatgtttctgaagtgaagaaagtggtaacttttaagattggggggccgggcgcagtggctcacgcctgtaatcccagcattttgggaggccgaggtgggcagatcacgaggtcaggagatcgagaccatcctggctaacatggtgaaaccctgtctctactaaaaatacaaaaaaaaaaaattagccaggcatggtggcgggcacctgtagtcccagctactcgggaggctgaggcaggagaatggcgtgaacctgggaggcagagcttgcagtgagccgagattgcatcagtgcactccagcctgggctacagagcgagactcttgtctccaaaaaaaaaaaaaaaaaaaaaagattggggtcgtgcttttcatctaagttactaaggttcttgtagctaagattgtattttaactcatactgttccacattactgttttgccatgtcactttagcagaatggaatttgacacagatacattactgttttgccatgtcagtttagcagaatggaatttgacacagataaaattctcaaaaacatgtaattccagatgattttatgatgacttgcatttgagttgtgtgcacatgtgccattttctataaggatatgtgtggcctaaagagccatttaacattgttatttgaagctttagaaatgagagtggttatttgtgtgtaatattttcttttttgtagatgaccgtcgtgatgtgagtaggtatggagaagataatagaggatatggcgggtcacagggaggaggtagagggcgtgggggatatgacaaggatggaagaggtcctatgacaggatcaaggtaagtatgtagataaagatgcgtacatttcttcttcttcctcttttttttttttttaaggtgttacttggctggatcaattccagcatctaatttagttaagagactttaaaaagggattatatattggagaaaaaggcagaaattaaaagtgtattttcagtcttaatatctcacataaatgaccttagaattggctatgttagtagttagtttatgtggtacatgttaaacaccagtagagaaacaactatggttgtgattaaatcacttgactttcctgccagagctagaatcttaactcctttaaaagacgactctgggaaatccagtgtttgtatgtaaaaataaaaggtaagttaattctagattgaggggcagaggctatttcttaatctccaatctccttgggaagggaaagtattaggaggcagtaatggagtagaaaggtggggatggcaaataagagaaagatttaatgtaacaaaactgttttgtccctcttcttaagtaaataattattggaataattagtgtaacatcacatagtaatgtgtattttgtcttgactaagttgtgtaaaggaatgtctttttaattcagcttttcttttctccatgctagtgttatcaggttttggtatttatttacttacagcatatgttatgaagctggtttgaaaattggttttagatatatctgcaagtttactactttgactgtaaaaaaaaaaaaatgaaaaagtagttgacatctgtcctcagaagaagtttgcagg

SEQ ID NO: 17795 - DNA, 2300 bp, Homo sapien
gctactgctttttctctcgctaggtctttttccctctatcttaaaatgagttcaggtactgaatatattaggtaaatgagatatcgtaatagctaagaaagtagtgggaaatggttgtagaaatccctttggaaagctttattgtgatttgctgttcacttggaaatcaggaggcaattttttttttttggtttttgtgtttcttttgagatggtgtctcactctgttgctcaggctggagtggagtggcgtgatctcggctcaccacaacctccgcctcccgggttcaagtgattctcctgcctcagcctcccaactagctgggactacaggcgtgcgccaccatgtccagctaatttttgtatttttaatagagatgatttcactatgttggccaggctggtctcaaactcctgacctcatgatccagccaccttggccttccaaagtgctgggattgcaggcatgagccaccgtgcttggcgaggcaattgttttaatgatacctaattaggtaattaatctgaccagtttttaagctgcctgatacagttactgccagctttttttttattttttatttatttatttatttttgagacagagtttcgctcttgttgcccaggctggagtacaatggcgcgttcttggctcaccgcaacctctccctcccgggttcaagtgattcgcctgcctcagcgtcccaagtagctgggattacaggcatgcgccaccatgcccagttaattttgtatttttagtagagatggggtttctcccatgttggtcaggctggtctcgaactcccgacctgagatgatctgcttgccttggcctcccaaagtgcttggattacaggtgtgagccactgcacccagcccagcttctttatttctattggattcatattcttgtcttttttctttttctgttttgtgggtggatgttactgtggcctttgcattcatattcttacatttggagtttttgtcttctcacctaatcttcttcatggagattctcaaactaagtagggtataggttaggcatcctaagtttgaaaatctgaaattggaaatgctctggaatccaaaactttgagcaccgacataatgctcaaaggaaatggtcatggtcattgaagcatttcaggttttgggtttttggatttgggctgctcaactcgcaagtataaggcaaatatttcaaaatctgaaaaatccaaaatcagagacacttttggtcccaagtatttgggggaagggatactcaacctgtattacagaaaatggactttgaagttttctagtgcattatttgcactgtgttgtgtgcctagggtctgttttcaaggtcctctgtttactaagtacaagacccaaatcaaagaattacaaagtcctggtataaggggttaatttgcagagtgctgcctaagtattgatgggtatctactcttatgttatctgatgcttttcttctgttttgttaatatctgctgctgatttttctcccctggccccatccccctaggccgtggaggatatagaggtcgtggaggctttcaagggagaggtggagaccccaaaagtggggattgggtttgccctaatccgtaagtgtcttgtttactttggtgagagtaggggttgggattggggctgtggaggatacagaaaggggttctgagtccattagaaactatataggagcattatattttcctcctttcttaggtcatgcggaaatatgaactttgctcgaaggaattcctgcaatcagtgcaatgagcctagaccagaggactctcgtccctcaggaggaggtgggtcagccttttaatagcatctgcatcgtgcttatcttctgactagcattaagggggctttacgttgtttctgctggcctcattgtttgcatttctaccttgcagatttccgggggagaggctacggtggagagaggggctacagaggtcgtgggggcagaggtggagaccgaggcggctatggtggagacagaagtgggggtggctatggtggagacagaagcagcggtggtggctacagcggagatagaagtgggggcggctatggtggagacagaagtgggggtggctatggtggggacagaggcggcggctatggtggggacagaggaggcggctatggaggagaccgaggaggtggctatggaggagatcgaggtggctatggaggagaccgaggtggaggctatggtggagaccgaggaggctatggaggagatcgaggaggttacggaggagatcgaggaggtta

SEQ ID NO: 17796 - DNA, 2300 bp, Homo sapien
tattgacaatatgtatggccataacaatagttaacattaattgagcactcactatgtgccaggcattggcttagccccttacattcatcattctttttcatccttataaccctatagggttaggtacagttattagccctgtttatagtcaggaaaacccttagcaagagagggaaatgatttgccaaaagccccacagctcaaagaaaaataaagcaggtgggccgggcgcggtggctcacacctgtaatcccagcactttgggaggctgaggcaggcagatcacgaggtcaggagatcgagaccatcctggctaacacggtgaaaccccgtctctatgaaaaaaaaaaaaaaatttgccaggcgtggtggcgggtgcctgtagtcccagctattctggaggctgaggcaggagaatggcgtgaacctgggaggcagagcttgcagtgagccgagatcacgccactgcactccagcctgggcgacagagtgagactcagtctcaaaaaaaaaaaaaaaaagaaaaaagaaagaaagaaaaataaagcaggtgataaagctttacaattaagtttaaacccatcaggtctaatgccaaaatccatgcttttttttttccacccttaatttgcaaaattccaaacttatggaaatttgcaagaatacaccacatacccttcatctagagtcaaatattgacattttaccaatttgctttatctgtgtgtgggggcagtgtgtggtcagtatacacattttgtttctgaaccacttgagagtaagttgcaaatgtgatatcatgtcatccttaaaagtgtcagcatgtatctactaataacaaggacattataaataaccacaacatgcataccatactcaggaaacttaacaatgacacaatatacagtccataatcaaattcctcatagtccagtaaggaagacagacctgtgagcagattatacatatgaaaaagacttaaagtaaagcaaagtgtacaaaaaactgtggtcacactgtggagagagggaattctatcactgagtgggtggatgggcagggggtaggaaccctgagggagaataaagacttcagagatgagaaaacatttgagtggactttttgaaagatctgagtgccagtttaacaggtttacaagtaaaagactgacaggtagagggaacagcatatgcaaaagcaagaggtataaaaggcagctccttcatcaggtcaaatagcgaatgcatgctgggcttaatacctaggtgaagggttgagaggtacagcaaaccaccatgacacacatttaccatttatctatgtaacaaacctgcacgttctgcacatgtatcctggaacataaagtaaaataaaataaaaagttgaaagaaaataaaagaaaaaggcagctccttaccacacagataagagttcagtcttttgctgccaaagacggggagagggtatgtataaaagggactttctggggccaggcgcagtggctcacatctgtaatcccagcattttgggaggccaaggtgggcagattacctgaggtcagaagtttgagaacagcctggccaacatggtgaaaccccgtctcttctaaaaatacaaaaattagcctggcatggtggcatgcacctgttgtcccagctacttgggaggctgacgcaggagaatcgcttgaacctgggaggcggagactgcagtgagccaagatcatgccactgcactccagcctgggcgacagaatgagactccctcccaaacaaacaaacaaacaaataaataaataaagggactttcccatccctgccattttcccagtgaataatcctaagaacaggtcttgatcctaacatgggcttacttgagcttgacagttcaccagatggtttgattttcttctccagtttatgcctcaccacaggccctctagttaagccagacaggaatgactttcctactcgtccagtgagcaaactgaagctcagaaaataaagtgactagctcaagtccaggccagtagataccacagctggggctcagaagtgaaacctgagtgttctatttaccaaagtaacctggtcgcttagcacttggaagcttctacctccagaagtccagacacctcccctgtacctctcgtaccacagaggacaggtctcctccagctgtgcccccactcccctaaaagccttgtattcccccctgcaggttccctctggccccaccaggagaagaagatggcctatgaaaaatcaactgatatctctgatgtctccaggtcaatgttc

SEQ ID NO: 17797 - DNA, 2300 bp, Homo sapien
tcatcgtgaggaagaaatgtggcaaagtcttcccattctgggtgatttagtcaccgtcaaccaccatgttacaagtgtgagagtagctaacagaaaatgatctcagtagggggttacattttgtttattttgcttttgtcactctctttttttttttttttttttttgagacggagtttcgctctgtcgcccaggctggagtgcagtggcgcgatctcggctcactgcaagctccacctcccgggttcacgccattctcctgcctcagcctcctgagtagctgggactacaggcgcccgccaccacgcccggctaattttttgtatttttagtagaggcggggtttcactgtgttagccaggatggcctcgatctcctgacctcatgatccgcccgcctcggcctcccaaagtgctgggattacaggcgtgaaccaccgcgcccggccgcttttgtcactctcaataaacacttttctcttaaataattcagatgccggccgggtacggcctgtaatcccagcattttgggaagccaaggcgggcggatcacgagggcaggagatagagaccatcctggctaacatggtgaaactccatttctactaaaaatacaaaaaaattagccaggcattctggccagctcctgtagtcccagctacttgggaggctgaggcaggagaatggcgtgaacctgggaggcacagcttgcaatgagccgagattgtgccactgcagtccaacctgggcgacacagcaagactgtctcaataataataataataataataatattattattattattcagatgccaatttcagcctagcccggaccaaattgttgctaattctgaactactaaaataggaattgatgaagacttactgtatccagttctttggaatgcagtaaggaccctagctctaatccagaagttccacatgggttcagttttgaggatactcctaaccacgaaccctttaatgttgggcagtacttaatggacagagcactgaagtgggagtgagggcaactgggttctgatcccaactctgtcattcatttgctgtgtgttcttagcaagtcactcctgctcactgggccttggtttcctcttgtgcaactgaagaacatggaaaaaatgatccctaaagtcctttgaagctttcatattctgtaacttttgtgcccaagaaggccttacagtgagatgggatcccagtatttattgagtttcctcattcataaaatggggataataatagtaaatgagttgacacgcgctaggacagtggaatagtggctggcacagataagccctcggtaaatggtagccaataatgatagagtatgctgtaagatatctttctctccctctgcttctcaacaagtctctaatcaattattccactttataaacaaggaaatagaactcaaagacattaagcacttttcccaaaggtcgcttagcaagtaaatgggagagaccctatgaccaggatgaaagcaagaaattcccacaagaggactcattccaactcatatcttgtgaaaaggttcccaatgcccagctcagatcaactgcctcaatttacagtgtgagtgtgctcacctcctttggggactgtatatccagaggaccctcctcaataaaacactttataaataacatccttccatggatgagggaaaggaggtaagatctgtaatgaataagcaggaactttgaagactcagtgactcagtgagtaataaagactcagtgacttctgatcctgtcctaactgccactccttgttgtccccaagaaagcggcttcctgctctctgaggaggaccccttccctggaaggtaaaactaaggatgtcagcagagaaatttttccaccattggtgcttggtcaaagaggaaactgatgagctcactctagatgagagagcagtgagggagagacagagactcgaatttccggaggctatttcagttttcttttccgttttgtgcaatttcacttatgataccggccaatgcttggttgctattttggaaactccccttaggggatgcccctcaactggccctataaagggccagcctgagctgcagaggattcctgcagaggatcaagacagcacgtggacctcgcacagcctctcccacaggtaccatgaaggtctccgcggcagccctcgctgtcatcctcattgctactgccctctgcgctcctgcatctgcctccccatgtaagtcctggtcttgaccaccacagcccctggagtcagactctgcctagaatgcc

SEQ ID NO: 17798 - DNA, 2300 bp, Homo sapien
tgttcagaactcatctttgtccctgactttctatatgtagcacccgttttgtgtccaacccagggacaagtatgacactgtctctggaacatgaaaatgatagaagaaaaagaataagcataaaaatggaggtgtaaataataaagtactaaaacataatgcagaccatcagtgctagaattcaccagaatctgtgatccttgaattatggaggtcaggggaagctgcatcagtaaactaacactttacctggggcttaaaaattagctataatttgttaaataagaaaaaaataggagtacggtctaggcaaaggcatggttacaggtatggtcgaaattgagtagaacgacccacagctcagcctccagagaaacccaaggaggtggactcttcctcaacccaattagaggccccagctcagataccagagcaccctgaggagattaaatctgcagcaacccaccaagggactccggctgagcctccaggtcctcctgtggcagctgaaccttcctccagtaagcagcagcagccagctcagccttctgagtttcctggggaggttgaaccttctcagacccagcagaagaccccagttcagcctccagagtcttctatggagagtgcagctcaaactccaccgaatcatgggtgacaatttaacgtcagggtgaggatggagctcattataccttgccaagcattacagttaagcctgtggatgtagagattagcataacttgagagccaaggataatgaatcttctccagtccagcaggaggccccaacctagcctccagaggaggtggaaacttccacaacccaagagaaggccccaactgagcctccatgttctcctgtggagactgatccttttcccggtgagcatgagcagccagctcagccttctgagtctcctgggaggttgaattttctccagcccagcaggagattccagctcagccttgaaaacattatgaggtaacagtttcacctccagctcaccatcaagctcagtccttaatgtcccctgagaagtttaaccatttgaaagatgcacaagagattatcattcagcagttaactacccctgaaaatgatgaactttctccacttgctcaaaagcccacaacttggtctccagctcagctctcctcagacattgtaagtccattgaatgatgagatggaatttttcacctgaagatctgtcttcaatattcagaaataattcaactttgcctaaaatcacagttaaaaatgtggatatagagtttaccatacctacagcagtcactatagaggttgaaccttctccagtccagcaggacaaccctcctatttccagtgagcaggctgacttttctctagcccagcctgattccccttccctacctctggagtctcctgaagagagtgaatcttcagcccagcaagaggctacagctcagactccaaatccccctaaggaggtagaaccttctccagtccagcaagagtttccagctgagccaacagagcctgctaaggaggttgaaccatctgcaacccagcaggaagcctcaggtcatcctctgaagtccacaaaagaggtcaatcctccaccaaagcaggagataccagctcagccatcagagccacctgagaaggttgaactatctccagtcctacagcaggccccaactcagcttttagagccacttaaaaaggtagaatgctctccagtccagcaggcagtccctgctcagtcttcagagccctctattgtggtagaaccctctccagtccagcagatagcccatctttgcctccagagctccctcaggaagtggaaccctctctaactcagcaaaactttccagctcagactccataccccctatggaggcagagccttctccaaaccagcaggaggccacagttcaggcttcagagccccccaagaatatagaactttcaagccagcagatggtcccaggtcagcttccagagccacctaagcgggttgcagctcaacatccaatgcattatgagatgataatttcaacagcaaggcaggaccaggctcagtatccagtgtcacccagtgtcacatttcaacctttagacctagggcttactataactccagtatccacaaaggaggctgagcattcgacaaccctgagaaaaactgcagttcctccaaaacaccctgaagtgactcttgcaactccagaccatgtgcaggctcagcacacaaacctaactgaggtcacagtttaaactttggatctgaaacttaccacaactccaca

SEQ ID NO: 17799 - DNA, 2300 bp, Homo sapien
gtcaatgctcagtattcaaaccagacccaagtcacagttcaacttttggacttggaacttaccataaatacagaacctactacaggggtgaaacttttccaaccacagaggagacctcaactcagcctccagacctggggcttgccataactctagaccccatacagacattgaacattctacagccctggacaagactgcagcttcacgtccagaccaggttcagactcagcttcaaaacctgactgaagtcagaggtccacctttcaactagaacctactcaggattcattggttcagtctgaaagttacacccaaaataaggctttaactgcacaagaggaacagaaggcctccacaagcaccaacatatgtgatctctgtacctgcggagatgagacgctgtcatgtattgacatcagcccaaagcagaggctccgccaagtgcctgtgccagagcctagcacctacaatggcatcttcaccatcttgtaagaatcacctttcctcaattgttctctgtgtcctgcctgatatagcagctttttcctggaggccttcctgggccttctttatctcaccaaaccacatggacaactgactttctgcttctgcctttgcctgtcatttcttccttctcctcattctcctttactgttaggccccttccctggtcttttacttgtgattgctcttaatccttttcttatccatttttctttagccccatcacatcatttgcttcactgctgctgtcctcctatttgcacttcatcctctttacagcagtctgtctctccatctcagtgatagtgctctaggtggttaagagttgattctgaagccaggttactgggtttgaacccaggtctgtcatttgttagcttggttaccctgaacaagttatttttctctgtgactcaatttcctcatctttaaactggggattattctagttaccatttcataggattgttgtgaaatttaggtgagtgaatacctgtaatacttgcatcagtgcctagtatatgtaagagtggtggctgttaacatgattacttagctctttagttatgttcagaactcatctttgtccctgactttctatatgtagcacccgttttgtgtccaacccagggacaagtatgacactgtctctggaacatgaaaatgatagaagaaaaagaataagcataaaaatggaggtgtaaataataaagtactaaaacataatgcagaccatcagtgctagaattcaccagaatctgtgatccttgaattatggaggtcaggggaagctgcatcagtaaactaacactttacctggggcttaaaaattagctataatttgttaaataagaaaaaaataggagtacggtctaggcaaaggcatggttacaggtatggtcgaaattgagtagaacgacccacagctcagcctccagagaaacccaaggaggtggactcttcctcaacccaattagaggccccagctcagataccagagcaccctgaggagattaaatctgcagcaacccaccaagggactccggctgagcctccaggtcctcctgtggcagctgaaccttcctccagtaagcagcagcagccagctcagccttctgagtttcctggggaggttgaaccttctcagacccagcagaagaccccagttcagcctccagagtcttctatggagagtgcagctcaaactccaccgaatcatgggtgacaatttaacgtcagggtgaggatggagctcattataccttgccaagcattacagttaagcctgtggatgtagagattagcataacttgagagccaaggataatgaatcttctccagtccagcaggaggccccaacctagcctccagaggaggtggaaacttccacaacccaagagaaggccccaactgagcctccatgttctcctgtggagactgatccttttcccggtgagcatgagcagccagctcagccttctgagtctcctgggaggttgaattttctccagcccagcaggagattccagctcagccttgaaaacattatgaggtaacagtttcacctccagctcaccatcaagctcagtccttaatgtcccctgagaagtttaaccatttgaaagatgcacaagagattatcattcagcagttaactacccctgaaaatgatgaactttctccacttgctcaaaagcccacaacttggtctccagctcagctctcctcagacattgtaagtccattgaatgatgagatggaatttttcacctgaagatctgtcttcaatattc

SEQ ID NO: 17800 - DNA, 2300 bp, Homo sapien
aaatctgacctaactgattccattttgcttctaacctccaagctgcccttgctcattcctgggcacaggccaagctaactatgagaggaatttttgctgcttaactttgaaacaaagataatagtcccttcctgaaacaaaccacctccctgcttgggaatcagatctcctctgtaaaactaacaaattagccacaagattagaaattatggctcagaaattatgtagacagaggccacaagattcctaacctctccagttgctcctatacaaaacactgttgtagtctcagcaatgcaccaagatataacactctgtagttgtctgatataacccccggagttctttgtcctacctccaagatgattaaggagcgtggacacaaaggtggggttacagcaaaagtttaataagcgaaagaagaaagctctctgccagcagagcgtgggggccagaacgggtgtcccctgtgaggctggggtctttatggactgggaaggggaagcaatgtgcttagtccgacagctgtcttggagaactcagcttggcaaggagccttggcccaggaccaatcaggagctgaaatgattcttagatgctgcttagcttggcccaagacctatcaggggctgaagtgatgattcatagaggctggacttacaggtccaaaaaggaaagtagagtgcccactggaactcaccggagcccactatgcccatgcccacaaaagtagaagcaacttcatcctgggagcccactgactatacaaaggacaaaggcatttctatgccaggccttgttcttttgtctgagtgagctgaagttttgtgcaagcttttatccaaatgggccagaggtttttccatctgtgcagccgtgggcatgtctccaggcacaacaccctatgctagttctcttatgggtgctggtagcttgaattttttcccaggctgctttttatgttatgtgggggtaaggcactgaccctgtgagccgggatctctccggggacccttcccttgctttgtgtccaagctaactaactgctttcaacattactattgtaaaacctaatattggggttctaggtatttttcagacccttcattctgatggaccagctggcaccactcacatgggcaaactggctcatctggtcttgcggcccccaaccaggaattcactcagcacaagaacacaagctctgactctctatgatttcatccttgacccaaccagtcagcatttcctattccctggccccctgactgccaaattaccctttaaaaaacaccagcttccaaattttcagggaggctaagttgagtaatagtaaaactccagtcttctatttagctggttctgtgcttatgaaactctttgcctatttcaataacactgtctcagtaaatcagcttttctgggcagtgggtatgatgaacccaccagttgattacactcctccaccacgtagctgattatgacacctacccttctcagacaccatcagctccaatgttggtgccttatttggacttattctttgtgggtttgtttgtttgtttgtttgtttttcttttttcaaaattaatctctccttctcactcgtacctccaacctctcacatcatctgacccccacaagtacacatacacgattcaccagaatgacgtaggacaatcagggaattctttttaaggatttcatgcgagactgttaatggtttagtgagttatacttttatttgcaattttaaactcttaaaaaaacctcttaagtcaaaagattgcatctttcgtggttatttcccacaagtgctaatacttagtaccctaatctccttcaggagtgaagatgaagctggcttctataaacacgtccctacccttccatcctgtcagcctattttgggactttaccctaaacatgcattgaacggaagctctaaactcagggatcttgtggctgtgactggaggaggggaacagactcagaggctggccctaggtaggaggggcaagggagcgatccgagccccgtccccgcccctcgcatgcgcctctttttaaaaaagcgcgggcgtgccttgcgcaggcgcaatgctggggcgagggttagccgcgcaggtgcggtgaagggaggatggcggagttggtaccttttgcggttcccatcgagagtgacaaaaccttgctagtgtgggagctgagctccggacccacggccgaggctttgcatgtgagccggggccaggatggagggagggatggagaaagctgcccacccgctgactgggagtt

SEQ ID NO: 17801 - DNA, 2300 bp, Homo sapien
tttattctgatggtctaattgtcccagattgggttggaaaccattatgcaatggttccttagatatgacaccaaaagcacacccaacaaaaggacaaatagataacttgcacatcatcaaaattaaaaactttggggcttcaaagaacaccaccaagaaagtgaaaggcaacccacagaatgggaaaaaaatatctgccatatatctgatgctggtctagtatacagaatatataaagaactcttcccactcagtaataaaaagacaactcaatttgaaactggccaaaggttctgaatagacattttcccaaagatatacagtggccaataagcacataaaaagatgatcaacatccgtagccatctgggaaacgcaaattaaaacaacagggtgataccagttcatacccactaggataccttttgtcaagaagacagataataacaagtgttggtgaggatgtagagaaattggaaccttcatacactgctgatgggaatgcaaaatggtgcagccactttggaaatctggtaggcctcataagcttaagcctagggttaccccatgacccagcaactctactccaaagaaataaaaacatatatccacacaaaaactagtatgttaatgttcatagtaggattattcatgatagccaaaaatagaaacaacccaaatgtccatcaactaatgaatggatagacgaagtatggtctattcatacaatgaaatattattcaatcatagaaaggaatgaagtatcattacatgctccaacctgaatgaaacttgaaaacattatgctaagtgaaagaagccagatacaaaatgccatattttctgtaactccgtgtgtatgaaatgtccagaagaggcaaatccatagagacagaaagtagattagtggttgccaggggttgggaggtgggggatgggcagtgactgctaaatgggtgcagggttttgttttggattgatgaaaatattctaaaatcaagtgaggtagtagtcgtacaactctgcaaacatactgaaaaccactgaattgtacactttaactgaattaattgtatgatacatgaattatatctcaataatgctgttaccaaaaaacatcgtttcagatctggccagtcggtgcccctttgagctagctcttgtgtccatttgacatgccccaatacatatttcgagcactttttaaatttcttgtacagcaagataatccagacatctcataaccctttcctgctccagcctgggaatcagccatatttcctagagtcctggttcccttttgtgtggaatgtgaaccaagatctgggcattatttcatttaatcatcaaaacaacccttttaggtaggtattagcatatcttcattttacaaatgaggcccagaaaggttgagtatgttgcccaaagtcacatagcaccccaggatttgaaagcaggcagtgtgaatctagggcccttgctattcaacacacacacacgcgcacacacacatacacaatgtgaaagtgaaggttacgtctacagccagcccaccaagaattgtaccaggcagggtatgcccttgggaaaaatcatgtgtcatgtgtctgggggagtggggttgtggggagattagcacccagtgtcctggccctctttctaaaagcacatgctcagatacacacacacatatgctggtgaagatagtcttcagtaatctcctttgccaacctcactccccatcccaatacccaaatactacccatagctgggtgcccatataagaggacctatggatgaaatgagattggccaggtgtggtggctcacacctgtaatcccagcactttgggaggctgagatgggaggatcacttgaggccaggagttcaagaccagcctggtcaacagagtgagacccccatctctaaaaaataaaaaaataaaaaacaaacaacaacaaagaaagattggccttggtttttaaatgttgaagctcagaagtgggtatatggaggttcatgatactattctctttccttttttaaaggtttaattttccatgataaataaaaatctataaaataataaacaagagaaaagagattggaaacagccaggttggagcagtgagtgagtaaggaaacctggctgccctctccagattccccaggctctcagagaagatcagcagaaagtctgcaagaccctaagaaccatcagccctcagctgcacctcctcccctccaaggatgacaaaggcgctactcatctatttggtcagcagctttcttgccctaaa

SEQ ID NO: 17802 - DNA, 2300 bp, Homo sapien
aagataagaaaaatacatttcatggaatagtttcagtaatttataaattccacatctttattactcatcccaatattgtcagcccatcaacagagcacccagacatgcgcaataaacatgaaatttcatgatctttgacattttgctaactttctgtcatatacaaatcatagcttcatatatattttaaaattttatccttttaaaggcatatttgtcagaggatgaggataggacatactttaacatacataacataacataatcggccgggcgtggtggctcacgcctgtaatcctagcactttgggaggccgaggcaggcagattgcctgagctcaggagctcaagaccagcctgggcaacaaggtgaaaccctgtcgctactaaaatacaaaaaaaaattagccaggcatggtggcatgcacctgtagtcccagctactcgggaggctgaggcagaattgcttgaacccaggaggcagaggttgcagtgagccgagatcactccagagtgagactccatctctaaaaaaaaaaaaatacaaatcatagcttcatacacattttaaaattttatccttttaaaggaatatttgtcagagtatgagggtaggacatactttaacagtctgttagtttaatttataacttgcaaatattgagacagatggcctatggtatccatctgtcctcttgccctgagctgacttgactcatgggtcccagcttgggttttccagttgtttgaatgggtaggaatctacccatgtttgccacagctagggggctggaggtggagggtccctctggaccccctttgaatgaccataacttcagagcctatcaaagagactaaatattctgcagcccagcaggaggtcccaacccagcctccagagggagtggaaacttctgcaaaccaacaggattaaactgaggctcatgtgacttccttgggagaccatcctctctcagatcttaagtttcagagatcaaatttccaagcatgtggtccttggctatggaaacctttcctcctgcccaggactctcactctacagagacgagttcattcaggtcatctgaagcccatgtagatttttggccacaaatggtttctcataaagtggtgcccccagcatgttcagcctcccctctgcccctgcaggccttctatcccagggtgccatgcactgctgccctgctgggaagagaagtctggaggggcacggggcagcactgcccacttagaagccccttgtcctatttttctgtcagatcctgcctccctgtttcagagggaagagtgggccgtcagtaacaagatgttttctcccttgcctcttttttgctacagttggtagaaatttctcccagacttcctcggtgactaatgatgttgggatgttgtggccttcacagggaggggacagggtgtcaggtcaccatatcacagatggttgaccccatgccgactacaactggctcttttggctgtaagtgacagaaacccaactcaaacttgttctgtgagtggggacatttattgaatctcagaattgaagggaggggaagggtgtgtttgggtcccagaaagggtggaccctggggctggaatcccgtccagactccgctccctcttcacggaggcttagcaccttagatgggctatgtcctctggccctgcacacatgggcttcctgttggaagctgagcagctccaccagcttccgtttacaaatatagtgactggcacacaagcattcctatgcttatggggggtggtggggggcaggaccccaggactggcagcccccactaaaaccccatgagggaaggagtcaccccaaaggtggtgctgttcccaaaaatgaaggaaacagccagtgctctccaccctatcccacccggccattttcctcacagatgtcacctgtcctcccaggcccagctgctacttctgcctgatgcttggccaatttgcctggttaaaaccagtgtatttccaggagatggatgacgtcacagaactggggttccagaagccttctttagaacatggagagctgttagttgggcagggctgaagtgtatgtggtgaggaagaagaggctcctactgtagacagccttgttctacagatcctcccagaaatctctgggccaggtggaacccagggtcagagagggatgggagagaggtaagctgtggaaggggtgggaacataccttctggagccactgtcttccttgaggggaccctgagagggggcttaatgggcagggatggagcttcctgc

SEQ ID NO: 17803 - DNA, 2300 bp, Homo sapien
tgtggcaccctcggcatcaagcctcgctctgcagaagttttgctggagcctggtacaaaaaataggtcaggcctgcaatgcaggtagtgagaagcagaaagtgagaaagaaaagcagtgtaaagaccgtctcctcctcagcaacaacagtagcagaccccgttttcttaatgctttctatactccaagcactctgctaggcagtctgtatgcattatcttatttaagcttcatgacaagtgtaaaagctacaaatcatcatttgattttttaggtaacacttcataaagggctctctatagcagtcaaactccatagtccttttttctgtgctgttttcaaggcctttcttcactgctgtctggaataggaatgatgcatgaagacattttatccaacccctccccttcgcttacacacatcagattatactatattgttttactaacttttttatcccctagaaggcttagcagaaagcctagcccataccaggtgttcaggaaatggatggatggatggatggatgaaggaagggaagaatgtgtggatggaaggatgaagggaaggaggaatggatggagggagggaagcagggagggatgaagggagggaggaagggaggaagggagggaggaagggagggagggatggatggatggatggagagaaagagggagggagggatagagggacagatggaataagacagaaatcaagaggaggactatgctccaagaataagctctcaaacctatcttcagggcccaaggaggagctctgtgtacttggaataagagcttgcccagagtagggattatgaccaccctttcctggcctccagccttccacagataaggaagggcttgtgggccacattaagggccatatgggggcctgcatgccaaagtcacaaccaggcttctcaggccttgtcacctccataaacagaggtcaagaggatgccccacatacgtaccctccctgccctcacaaaaagccacagcttcaccaccaggtgaagccttgaacccaccaggagtaactgcattatacggtttacctatctatgagcagtcatgccaagcagaaagccccataaggatctgcacagtccctgtttctgcccctgcctcccactgccctcaacacctgaaacacatcacctatgcctctaaagcttgctgtccatcaacagcaaaatcccttatatctttgatctcttctctaaatgcagctttcaacatggaaaagggtcctgaggcacctgaagagagaggaagctgtgggacaggtccagccagagcccaggccagaggggcagaagctggagtcctggagcacagacgcaggttgtcaggtgcacagagttggagggtcccctgctggtcatggttggccatgggggcacccaggagggatcagcgagctggctacacctaaaaatcagtccaaagtccgaggtccaaagagataaataaaaacattgacaaataagtcaaacggtccagcaacaaatggggacccaaggatcaggcacattgttttttttttttttggagtattagcatacactgtgacatgaaagagtgtgagctcaatcatgtggccttggactgggagagggcatttccttctcagaggcaactaagccctacctttgcctcagtctgggctctgtaatcctgctttgtgctcatctccccaagactgatcacctgggggaagctggggtggttcaaccctgcctgcccttccccaacatacagatggtggcaggtaacatggtgaaatcaaacagatctggtttttcatccgcctatccacccaggtgaccttggacaatttatttagcctctaggcctcagtagtcccagggaagtaataatcgctacttcactattttaaggattatataagatagggcatgtaaggtagctgacacacattcgcccatttcttcacgtgaattcagattctactgaattcagctctgcaccaagtcccatcctctgctgccctctgtttcagcaaacactgaggcctgttgtttctcctcctctaccggctctgatgcggtcaaggtccagagagctgagtagttggcaagcggaccaccagcaacagacaacatcttcattcggctctccctgaagctgtactgcctcgctgagaggatgaaggtctccgaggctgccctgtctctccttgtcctcatccttatcattacttcggcttctcgcagccagccaagtgagtccacttgtctctgtagggcaggaacgagaaagggggatggag

SEQ ID NO: 17804 - DNA, 2300 bp, Homo sapien
ttctcactttctgcttctcactacctgcattgcaggcctgacctattttttgtaccaggctccagcaaaacttctgcagagcgaggcttgatgccgagggtgccacaccctggtgtcctcagtgcatggccaatgagtaaatcccgtagaaaggaatgaggccagggaagagcatgagtggtctttaattcaaagcagggaagctccaagagggtgactggggctgagagttagcggtgggtggaggagggggccttggcatcttctctttatgtctctgagctgtgccttcgccaccccttctgggtcactcagttctccttcatgtccttgatatagtcctggacccacttgtcactggggttggtacagacggaatggccccttttggtgatgaagctgtggagcaagagggagaaggatcacaaaccgaggggcccagtggccggaagagacagcccatcttccctccctcctaaattccccacctgacctatactgcttttcctttcttccacagaggcagcttagagccagtctcctctctgagacatactcttcggttcctaggacccctagacccatctagtctctgtgtccccctgaggaagtgccctcttgccttcttctcccttctctgtcatctccccatccatggggtcagtttccccatggctcctgcaggctccagccagaaagcgctcagattgcccctcagctgcctctccccatgtagtcacacctgggaggtacgctgggggtccccattccaccaccactccctgcttccctccaggaggccctgctggctccctctccccccagtgtgatgtgtgtgtaccacctacacaattccgggcttggagcactggctgttggtctcatagtaatccataatccgctgacgcgggatcttgtaggtagtgtaggtgaagcagcactctgaggggtggtaaggtccccctgaggagagagcatcagatgctgaggaggggccccttgttaaaggccataccattggctgctcctgcaagctgagggcatggaggagggaaggaaggaggagacagcccctcagaacttggaggggagagtaggctttcctcatcttctcttctccttctccatggtactcctgggctcttctttttctcctccctcatcatcaatcacccttcctccttttcttcaacccctcttggaaagactggtggatgactttcaactccaggattgaagagcagcacactcagatcttcttacaccatctctgggggccgactggcagagaaggctagggacttggccaatatcatgcagccttcatgccttattcgggaaaggtgctccaaataggaggaatatttggaagaaatcccaatagggatttggagacatgccatttgggaatgcaaacccagcccctcctagtgctccaccctgcccatgtccccattgaaccgacaacctgcagagagagcaggatgcccacagcaagccccaaggacaaaggccacagagtcagggcacccaaatcctaacctaaccttgcctgtgcttcctgtgtactgtggccattttactttccccctgttccctcctctgtaaatgaggcccttggactgcatcagtggtttttacactgagctccctggagctctgggggcctcagggactattgtggaggccttgctgcatttgagagtggtgtcttgtaccctactcaacccattttttctgttttacatattgggcctctgtggaagatattgcttgaagaaaaggttttgtggtctaaaaagttttaaaaatcactggattgggtgattttttcatctattttctgattgagaagtttcatggcttttataggagaagcaaggtgacagcagccaccccaagcttgaattatagaggtagcaggaaggacattgtaggccaagagccctgtacaaacaggcacatgttgtggttatggagtggagaaatcaggtgtgtgcatgttatgtgaccctgcttcatagaatcatggatgtgcatcacaatggcctcagaggtcactgagggtggccagatgtctgggtggaagggtctcatcctgttttccagctccattccaggcagcatcctcacgatccaaagaacggcataaggggcccctgtttcctgagacccagtcagagctcctatactctcccaccttgttcctctgagctgacaaatgacatcggagagggcaagtcaaactgtgcacatacccaccaactttagctgtattttaacaaccttcggtttccccc

SEQ ID NO: 17805 - DNA, 2300 bp, Homo sapien
ggtcccaaagagatccactatctgatttcagaaaggactaagactaaaggctttatagaaaacccataagcttttacagagctccgttgggagtcccatgtttctttatggcataatgggtgagaacacagacttggaagccaaaccacctgaatttgaaccccagttccatttaccaactgtcaaaagcttaggctttgattctgagcctgtttcctcaactgctgttctaaagattaaataggctaatattcataaggcaactgggacagtggcttgtgtgtatagcaaccattatataagtgaattatctactgagcaccacagcacttcttcactccatggtgtggtgaccagaatggagatgagacagagaactgcaggttctgcttcgagtttaagttaggatttcccttgaccaatgagacctgacttggaggagtcctggcctcattccattaccccaaacaccctctagtctctagatgaacagatcctgaatgtccaggccccacgtggcctgttctaaggcctgagatggaattggatacaggacacatccagccttgagatcttttgctaagtgtgacacagtgcccccagccctgtgctcatgttcatgcctagggaaaggcttctatcaaaagagttgaacttcttcccactggggatggaagaccatttcctcccttaaaccttggctctccctgcttccttcaggccaccaacaacacatgtgcaggatatgaaattgctgaggcatcactgctttcctacttcccttccaagtctcagctcccttattttaaaaaatatttggcctcaatgatcatttctcaacaattcctcaccgcaggagcctctgaagctcccaccaggccagctctcctcccacaacagcttcccacagcatgaagatctccgtggctgccattcccttcttcctcctcatcaccatcgccctagggaccaagactgaatcctcctcacgtgagtgcaatgccttgtcttccttccaacctagagcctgcagggaaataagcaggagtgaggttggggctcaggggaagaccaggagcagggactcagaaaggagggctggtatcttcttgaaattgtgtgtatagcaacattatataaatgaattatctactgagcaccacagcacttcaccccatggtgtggtgagcaggatggagatgagacttaggactgtaggttctgcttaagagtttaagttgggatcttccagccttgaccaatgagacttgacttgggagactccaggcttcattccactaccccaaatgccctctagtctccaaataaacagatcctgaatctccaggcctcacatggccttgatctcttatcattgccccccaggaccagtccccccttgccctcaaggacatggagtgagaccagcctgcctctctactccctcaatttctctctctttgccgctaagcaaaagagtggcccaccccatttggggtatatttcctcagggagattaggagcagtgtcttgagcccctcaagggcatttttctattggcctcctgaggtttgggcccagcctgcttccagcgtcacctgtgcccagtgagtgcagcattgcttgggtatgggctggggggaaacacgacagtgtggggtccatcctaggcccccttttctcagctgatttcttagaataagctgcctttagagataaccaaaactatttatcactcttccattttacctactctccttttcagaaactggggggaaaccgaaggttgttaaaatacagctaaagttggtgggtatgtgcacagtttgacttgccctctccgatgtcatttgtcagctcagaggaacaaggtgggagagtataggagctctgactgggtctcaggaaacaggggccccttatgccgttctttggatcgtgaggatgctgcctggaatggagctggaaaacaggatgagacccttccacccagacatctggccaccctcagtgacctctgaggccattgtgatgcacatccatgattctatgaagcagggtcacataacatgcacacacctgatttctccactccataaccacaacatgtgcctgtttgtacagggctcttggcctacaatgtccttcctgctacctctataattcaagcttggggtggctgctgtcaccttgcttctcctataaaagccatgaaacttctcaatcagaaaatagatgaaaaaatcacccaatccagtgatttttaaaactttttagaccacaaaaccttttcttcaagc

SEQ ID NO: 17806 - DNA, 2300 bp, Homo sapien
ggtcacaaaacctattcctttttcttcctaagcatacagatgatgtatattttccatccctttgtcattatgttggagccaggttacttgatgctggccatggaatgtgggtgaaagtaatttgtaccattttcagaactgatccacaaaaatctcccaatcctcctctgcttctccctttttgtatcaagcttggaggccttgtgctgaaaatggtggcatccaaggtagaaaaaggcctggttcctgaatgagtacatggaggatcccaacacacacaccatcatcccactactgacccacactggactgtaacatgagcaagaaataaacttttatttaattagtctgctggattgtttatgatagcagttggcacacacagactaatgtaggtaggaactcaatacttgctggaaaagtacaggaacttcctgtaagtctcctagaaacaacttggcaggttggctagtttccacaaaaacaagaagtaagcattatttctttccaactcacttttcctataaacaacttgtttcctgagattgttcctgataacaattattatcatttaacttgaagggtttacataatgttgttattgatgataagaaatatagaaaatttttaattgatgactgtctccacaactaaccatgagatttcagccatttcctataagatacacatatgtagacctggctcaatttgtttattcatccttcttttaaaatgtatattcataaagcacctggtatacactaggttctgcgtgaatgggcaaagataaataatagatgttctccatcctgatgattcagatgaggagaggagattaaataaccatctaaccacatcagcaagcagaatgggggatgtacctccaagaacagcatggtgagggcactaagctgagagcctgcggagatgagatctgtcctgcatccaaatcactgtgtgcacatgagaaagtcactggtcctttctgattcccagcttccattcagtaaatggccagtttagacaaatcaaatggcagatacatagcatgcaagctgcactgcaacagaaactgcacgttggtcacagcgtatcttcccaatgtgcctggatatggcctcagaatcatttccaacacagagctccagtccaccactaatcaatgaaacctactagctatccctgaattagacattttctagggttcccaccaagcttctttgcagcaaaagtcagagaaaccaggagaaggtcccaaagagatccactatctgatttcagaaaggactaagactaaaggctttatagaaaacccataagcttttacagagctccgttgggagtcccatgtttctttatggcataatgggtgagaacacagacttggaagccaaaccacctgaatttgaaccccagttccatttaccaactgtcaaaagcttaggctttgattctgagcctgtttcctcaactgctgttctaaagattaaataggctaatattcataaggcaactgggacagtggcttgtgtgtatagcaaccattatataagtgaattatctactgagcaccacagcacttcttcactccatggtgtggtgaccagaatggagatgagacagagaactgcaggttctgcttcgagtttaagttaggatttcccttgaccaatgagacctgacttggaggagtcctggcctcattccattaccccaaacaccctctagtctctagatgaacagatcctgaatgtccaggccccacgtggcctgttctaaggcctgagatggaattggatacaggacacatccagccttgagatcttttgctaagtgtgacacagtgcccccagccctgtgctcatgttcatgcctagggaaaggcttctatcaaaagagttgaacttcttcccactggggatggaagaccatttcctcccttaaaccttggctctccctgcttccttcaggccaccaacaacacatgtgcaggatatgaaattgctgaggcatcactgctttcctacttcccttccaagtctcagctcccttattttaaaaaatatttggcctcaatgatcatttctcaacaattcctcaccgcaggagcctctgaagctcccaccaggccagctctcctcccacaacagcttcccacagcatgaagatctccgtggctgccattcccttcttcctcctcatcaccatcgccctagggaccaagactgaatcctcctcacgtgagtgcaatgccttgtcttccttccaacctagagcctgcagggaaataagcaggagtg

SEQ ID NO: 17807 - DNA, 2300 bp, Homo sapien
gcagtcagcagcaagctccctttgcctagccacattcatctcctcccccaaactacctttcaaaaacttttaacctgtgagccttcgatgagattgatctgagtaataactctttactgcaatgcgatggtttttgtgcagcaggtacggtatctatctcaccgttggagacattcttcaaggaccttgtaactgcacacttggaagtttgttaagggggtaaatctcatgttatgtggctgatttgttttgttttgacacagggtctcactctgtcacccaggctggagtacagtggtgtgatcataggtcactgcagcctgcagcacgcccaagcacaagaaatcctcctgcctcagcctctcaagtaactgggactgcaggcccgtgccaccaagcctgtttttttttttttgtagaaatgaggtctcgctttgttgcttaggatggtctggaactcctgagctcaagcttaagtgctgggattacaggcatgagccactgtacctggccatgtttttttttaatgtctcacacacacacacacacacacacacagcctgttgtatgggggcgggggaatgaggagagccattaaataaataagcacttaaaatagaatgtgactggtgctatcgtagatttaagtaccagatagatgctgtaccagaaacactgaaaagggacacctggcccagcctcgtgggagcgacagccaagaagtctttctggcagagctgactgctgagtagagttaatgggttgctaggaattagtattgcacagggccaatttacccattaggcatttagtattggggtcctgaaaaaaaaattaactccaaaagaaaaaagtataaaatctaaattaataggtgcatcactatttaaacttaatatgcatttaaatgccattacattagaaactagaggagttgtgcatataaggagaaccctattctgaaggactttctacactcatacacaaaccttggagttgactcaagtccatgagaagccactggcagattctgtttgaaaaatcacagccaagttcgcagattagagaattccctctggtggccaccctttatcataggctttggaggcacttgaaggtccaagatggggtggttagaacttgacgtggcatcatcagtgcctgggaaggtcttctagcctctaatcttgagattttccagttctccattttcgtggccagcttgactcattcttacctttgaagtccctttgtttgggaggccgaggcaggtggatcacctgaggtcaggagttcgagaccaacctgactaatatggtgaacacccccgtctctactaaacatacaaaattagctgagtgtggtggcacatgcctgtaatcccatctactcaggaggctgaggcaggagaatcgcttgaacccagaaggtggagtttgcagtgagtgagaatgcaccactgcactccagcctgggcaacaagagcaaaactccgtctcaaaaaaaaaaaaaatccctgtttcatagtaggtagttattcagacatgagcagggcaggagagccccctgccccaccaggaatgtcagacaaccatcagatgatggtcaggcagttgttacactgtctctctaaaacagtaattggtcaaagccagcaccagcaaagacagtctcccaatagatagaaatatctcaaactggtgatcaacagtttcccattaagatctcaggagtcaggcaagtaggctcaagtatgtgcactaagaggcaaaatggcagagttcaactggtatgtgacctaggaacacttgactggtcaagaaggaatgcctcaagtgagcatgcgtacaactccagtaagcacactgtgcatgcagcccctccctagtgctggcagaccactgcgcatgcggaatgccagcatataaaaccccaatccaaaggtcaaaccaggcacttgaatctctccagtcacctgcttggcacttttccaagtgttctttactttcattcctgctctaaatcttgtctcggtctctcactctgccttatacccctcagttgaattatttcttctgaggaggcaagaactgaggctgctgcagactgatatggattcaccactgctaacacctcctggttggaactacaggaatagaactggaaagggaaaaaaggcagcattcaccacatcccaatcctgaatccaagagtctaagatagtcccccactcctatctcaggcttagaggattagattaatctcctggagggaagactcttccttgaaacatttttttt

SEQ ID NO: 17808 - DNA, 2300 bp, Homo sapien
actcaaatgatctttgaattattttaatagttctctcactaatgagttaaatacatctttgatgcatattcaatctaaattggatgagtaatatttttagttttgtaaaaattgtattatgatgtcccttgttttgaagataatgcttatccaaagttcagtaattcctttagtttctttttcctcttaaaattcaagtaaaggctgggcatggtggctcacacctgtaataccagcactttgggaggctgaggcaggaggatcgcttgagcctaagagatcaagaccagcctgggcaacataatcagatcctgtctcttcaacaaataagaattagtggagtatggtggcatgtacctgtagtcccagttgatatggacgggaggcagagaaacactgggtagaagagggcagttccctggcaaatgccccaccctcaagcctgggaacccacgcccctaaattggaacaggcattcctgtttttgcacccaaatgttgccttttccaagactactctggcctgccacgcccctatcctgtgtccatatgacagctaggcctccatgaagggaaagagagcccatattacttttacccaaaggaaagagagaggcggcaggatcttggaaaagagacagatccaatagttctgcctctttaccttttaaaccccaaactccatgagcagaggaacagaacggcagtggcagagaaggagagacgagaaggagcgtctgaatgtcaggagaagttcggctggggacagttgaagaggagatcagccgcgggatggctgaactccaagggaagatcatcttcccactccatccattctccagctcccattcatcccataagagccacatccataactcattaaaatctccacattcaccatcgttcaagtcttcttgaacgatgacctgattcttccaggatgtcagacaaggacctgggtaccaagagggcagggtataaaaggctgtcaccctgactctccactgagaggaagtagccgtctgcagatagcaactgctaaaagagtattaattgtaacacacctttggatgctaccatggggccagagcccaaaagtgcttgccccagctcctgcaccttcccatctgtgtgttccccctcctataaggggtaaagtgtgtgacagtggagcaaatgagccacacccctgtcgcaagtcccgtgagggggtcagggaactctcccatttcatctgggggctcgtctgggatacagcacaaggatgagtacagatttagaactgtcggatctgcctcttttccaagattctgccacctctctttttcctttgggtaaaaggaatattggctctgtttctcttcatggaggtctagctgttgcacgggatggaataaagtcctggggcaacagaagccatcttttgttgctggaaggctccaagactgaactctgtaggccaagaaccccagactttgctgtggtatcttctttcatggcttgaaatggctcctatctcttcttttatagtattaagggctttgctgcaactagcgagatgttactaagtacaaggtatgcttggttcagccatcagatgtgcaattcacaacaatgtagtttctgtttcttcttagaggtgccatccccagccgcaggtgtgcgcagtgcatgagtgactcccctccttctcccttcccctccttttcccctccccgccttctcccctctcctcccagctctgcacatgagctgcacccagtggccacgaggggcgggagaaaaccttggctgccgctggggccctagtgcagctggctggccggtgcctcccactcactgcaccaacagagcctctcctcccatggttgaggggtccttactggtctgaaccaggggcggaatacaataaaggaacccatttgcacagagcaagaagttccttccctcttttttagtagtataagcggtttcctttttcttttctaagtgagagggttcctttccccagcacgctgcttttaatagggaaaataacagaggagcgacccctgctggccgatagctgcaaattcggcagggcccctttgagacttgatctaaacagattcatgcagcccctgaaataccttttttgtctgaaactcaattccagccttcaggttgaggccctagaaaggaaaaccagatctgagggatccaaagcctggcaacaggcacaatgtaaatgggaagggccaattcctgctgactaaaaccttgcttcttgaaaggaggccatgctccatgacatagatgagg

SEQ ID NO: 17809 - DNA, 2300 bp, Homo sapien
tcctgataccaaaacctggcaaagacaaaacaacaacaacaacaaaggaaatttctggccaatatccctgatgaacatcattgcaaaaatcctcaataaaatactggcaaaccaaatccagcagcacattaaaaagcttatccatggcttcatccctgggatgcaaggctgattcaacatatgcaagtcaataaatgtaatccatcacataaacagaaccaatgacaaaaaccacatgattatctcaatagatgcagaaaaggtcttcgataaaattcaacaacacttcatgctaaaaacactcaataaactagcattgatggaacatatctcaaaataataagagctgtttatgacaaacccacagccaaaatcatactgaatgagcaaaagctgaaagcaatccctgtcaagaaatgacaatatgttgtgtaatcaacatactgattggtgaatattgtgaaatctattccttatattctttcactaaaaaaatatgcatctaatactgtgtcaggctcctctgtacaccacttccattctatcagctttatctctgactctagccaccactacagcagccagttgcacccaggctctgcccagctcaagacggtataatctgacagcacctcaccttgtccatcatgcacaccccacttttcctgcaccggggattctctgatgctgaggtataagaaggatcagctcattactcaggcacgtacaacctggaagtctggacaagtagttcctaccacacctgagtttatgtcaatgaagtgacttttggaaagccttagggatgagaactggttgccatgggagccaaccatgagaggattggaaatttcagcctctacccctaaactccagggaggggagagaggctggagattgatctgatcactaatggttaatgatttaatcaatcatgcttatgtaataaatcttccataaaaacctaacagaatggggtttagagagtttccaggttggtgaacttggaacagtgttcagtggaggcactgagaggatggtacacctggagaggacacagaagctccaaactcactccccatgcctttccctatgcatctcattgacctggctgttcctgagttgtatgctttataatataaccctgtaagtaaactgttcttctgagttctgagagctactttagtaattatggaatctgaggagggggtcttgggaaattctgatgtgtagccaagtcaaacagaagttgtgggtaacctggggacccactatttgagattggcatctgaagtgttgccagcctcacgggaccgagcccttaacctgtgtggtctatgctaacaccaggtagtctcagaagtgaagcattgagaatagtagtagagaataaatgggagttttcttttgaaggaataataagattctggctatatttttggaagtagggccaaaaatacttattaatgaattagatatggggtatgagataaacagaggagtcaaggatatctccagacactggacgaggactattcctttcccagagactaagcgcagggctgagaaggaaggcaggctaccccaacaaggcgacattttagctcccatgtgctcatccttgccctacactctccccattatattctagagtagctcagcttatgctagacaatcatgctgtgtgagtacacatcatgggctgtacattacgggatgtcgtatgagctgtgtttaccagcagagatcacagctctacaagttgaagtgttctctctggtggtccccatgtgtacaggctatttgagcatctgaaggtggttagctcctgaggaaaaaaaactccactgtttagaggatgaatgaatctcccagagggaaggatccatcataaagtatttgctctctctgcctgtacttattggaacaactcgggaagtccacaaggacagtccaagtcatctttgtcgtctacttcctattgcattctcagccttgtttcctttttagaaagagcctgttaactatcataagtcaaaaaacagcattctgacctctgccctgtaacttcctcttcttcttataaatacaagggcagaactggcatcccgagaagccaggaagcagtgagcccaggagtcctcggccagccctgcctgcccaccaggaggatgaaggtctccgtggctgccctctcctgcctcatgcttgttactgcccttggatcccaggcccgggtcacaaaaggtgagtccagtgagctttctctcagatgaccaggttcatggtaactcaagctc

SEQ ID NO: 17810 - DNA, 2300 bp, Homo sapien
cttctcccaggaaaaaagagtagattagaaacaatattgcaatctagtggaggggatggtggagactaatgccacccttaaggatacaaaaaatgcaaggaaaatggttattatcatatctatttaatttgcaagtctggcttctgcagaaactggatggatcctagagaatgactgtagaacactgtgagctcaaccaggtagtaacctgattgcagcttctataaccaggtactgacacatgccaggtattaagtacatgttatgtacctattgatttggcaaatgcattctgtcccataacaagtaggaaagaggataagaaaaagttcccattcataagaatggaaaatattcacttacagttttcctgtggactattaactctcatcttctgcatactgtagtctgaagagatctgaattttcatgtatctctcaaaacaacacattgatccattacattggtgacatcatgttgatagggcatgatagacaagaagtggccatatgttggacactctgtaagacatatgtattccagctgggtgcggtggctcatgcctgtaattccagcactttgggaggctgaggcgggtggatcacctgaggtcgggagttcaagaccagcctgaccaacatggagaaaccccatctctactaaaaatacaaaattagccaggcatggtggcacatgcctgtaatcccagctacacaggaggctgaggcaggagaatcgcttaaacccaggaggtggaggttgcggtgagccgagattgcgccattgcactccaacctagatgacaagagcgaaactccatctcaaaaacaaaaagaaagaaagaaagaaaaatacaaagaaaaaaacgtatgtattccatgaggtgggagataaatcttttaactatttatggacttgtcatttcaggaaaggttttatgagtccagttgtcaggggcatacagggatatctccttcaaagtgaaaaacaaattaacataatgtattagcacaaggataggaaaataaaccattggaacagaacagaaattccaaaagcagaccacaaaatcattgaaatcaataaaccgagtaaagcagattgccctctctaatgtggtgggcttcattcaattagttgaagttctgaatacaacaaaaagcctgaccctcctgcctgtaagagggaattcctcttgcctgattgccttcacactgggacataggtttttctcctgcctttgaacttaaactgaaacatcatctcttcctgggccttaagcctgcccattctcaggtctttgaactcaaactgggactacactagcagctctcctgggtctccagcttgccagctcaccctgcagatcttggaacttgtcagccttcataattaaatgagccaattctctaatttcttattttttatacacacaccattggttctgtgtctctggggaatcctgacttatacaatggtcttaccaatgagttgccaaggtccattgggtattcatgtggcaaaaaataaatcttgaatccttcttcacaccaaacataaaaatcaactccagatggattgtaatttaaatattaatgctaaaacaataaagcttctacaagttaacataggaggatatctttattgccttaggataggggaagatttctcattagatcacgaaaggcctaactgtatataaaagattgaagcatgtgactctcttaaaaggaaaaacaattgtgaaaatccattaaagcattctgctctatcaaaggaggctgtgaccactcatttctgagaaatatctgtcatgtgaaaacataatcacatgattatgcataatcctaagcataatccctgggtgcttccaactcctggtcacccatctggagatacaacttctccataagcccctcaatcaacaagtgaaccactcgtttgtgtaccctaaacctttcaagtaaccataggcaaccctgggctgagaactcacatgacaccaccatagttaaaatgtcttgcatcagcacctccaatgttcccatggtccagtctgcctataaaaaggagagacaacagctcataccccagaaggaggccaggagttgtgagtttccaagccccagctcactctgaccacttctctgcctgcccagcatcatgaagggccttgcagctgccctccttgtcctcgtctgcaccatggccctctgctcctgtgcacaaggtgagtctgtcatccatgtgctttgatggctccctgggcagaagtcaggcgacatcttccaagtgctgtg

SEQ ID NO: 17811 - DNA, 2300 bp, Homo sapien
tgaagttctctgaactagactgaaatctgcaaagcttgtcccctcaatgagggacccagagcaagtggttcaagaggactaagagagaaccagtttttagtgcaaggccccagcttctcaaatcttggtttttgagttaaaaatcacatactcatacttatgaaaatcaaagcacaaagaatggaaaatgaaaagtggagatcctcatttcttaaaagttatggttgccagggaaatcacatttaatagattgggatatatcacacacatcaaatgtccttcttatgtttatgtaaatatatatagcttttaccaaagcaaaatattattatatgtacagttatataataaatatgtggtaatatagatattggtatagagatacacatatggaatgtatattctatatacatagttttacattaatatcttagatacctttcatttcactatgtatatccacttcattcttttcagtaattttgtgtttattatgtggttataccacgatggtttaaactattcatcttttaaagaatttatttctattggttgttttacaaacagagctgcaaacaacagcaatgtgccaacactttgtgtctttttttttgagacagagtctcactctgccacccaggctggagtgcggtggtgccatctcggcttactgaaacctctgcctcctgggttcaagcagttcttctgcctcagcctcccaagtagctgagattacaggcgccttccaccatgcccggctaatttttgtattttagtagagatgaggtttcaccgtgttggccagtctggtctccaactcctgacctcaagctatccacctgccttggcctcccaaagagcagggattataggagtgagccactgcacctggccctcctttgtttctttagatagtgtttcttgaaatagattcctagaaataagattgaagagtatgtaaattttaaatttttctacagactgtgtaatttctcttcaaaaatgccgattatcaaaatgtcactttttgatactaaaaaatagattgttttaaacacacaaagtaagtagggcttatcaaaaagttaatatattttgcatttctcacaagtatgttgaatttctcccacttgcattttacagcaggaatcctgactcagtctaactttcttatacttaaaaacataacaggccagaagttagcacacattttctatagaaggccagatagtaaatactggtgtctttgtgggttatatcatttctgttagaacaatgtgactccacctttgtcttgggaaagctgcaatagataatatgtaaaagggcaggagtggctgtgtttcaaccaaactttatttacaaaacagggtcatgctagatttgttctgaggaccatagtttcttaacctcaatctaggcaatccgtcaaataattctgcattcacaatagaagtcttgttgtatatattggctgactgtctttcctttctctaatgttaaccactgattttgtggagcatggattctagggaaataatacccaggtaagatgtctattaccatgtgtgtcttatttttaaaagagtggttaaattcttattgaggccgggcacagtggcttatgcctgtaatcccagcactttgggagcctgaggcaggcggatctctccggtcaggagttcaagacctgcctggccaacatggtgaagacccgtctctattaaaaatacaaaaattagccgggtgtagtgccatgcacctgtaatcccagctacttgggaggctgaggcaggagggtcactggaacctgggaggtggaggttgcagtgagccgacatcacaccactgcactccagcctgggtgaccaagtaagactccatctcaaaaacacaaacaaacaaacaaacaaaaaaacaaaaaccagttttattgagaaattcagtagtttttggtctttggtctgtatgtatatcacataggggtttggtaaaagtctagattcccacatccaaacccaattctcttgtgagcattttaaacgaccatcccaggtggttctggaatgctcataggtttgcatattagttacactatttatttgctgcatggccttggacaagttgttttaaccctctgagccaacatttcctcttctatcaaatgggaatattaataatacttagcccttggagacattgttagaatttgaaggacaatgaataatttttaagagagcttgacccatgagaaaaataaacttaaatgcatgaatatatatatcaagcatgaatttacc

SEQ ID NO: 17812 - DNA, 2300 bp, Homo sapien
ctaccacggcccctgatcttgcttctgcttctcctccctcaagactggcactagccatcattggggtgggaaggaaacagagcccatgtgtattaaaagacctaagtctacagacacttagaaaggacagaattccaaaggcatggtcgcacttggcttctgtcctctgttattctccagcatcaaatgtgtcaactctaacccctttggggggaatacaaggcctgtcctggtttggtcccaatttagctttatcatccatattcacccccactgctctgcagctccactgaagcaccccctctttcctctgaacccacaatgtcacactcaggactctgcctcagctgggcactcatctatagatgcctaaatcccgggcagttatccagacacaactaaagttccatcccttccatgaagccttccccaaccctctggtggaaggtcacttcttcccctcgtgggattctgagctttcatttctttttctactaggagtcctagcactttcggctaaatgctacaattacctgttcatacactctacctgcccccacgagatcaggggcatctcagaaacaaagatcattaaaaccaactaaatctatttctcattataaaatgaggtatgctgattgattgtgaaagaataaaataacaaagtatggaaaagaaaaaaaagcatataatctggctgagaaggtagagacccttccacaccactgaaattatgtattgaaaagaataagtaaaaaactgcttcaatttggcatgatttatgtaagtatagtataggatccttaaaatggttcaaagaaatgggaaatcaagacttcattttggccaaaaccattgaacagaaacttcagcatatttatcaataatttctttcagattaaacaactgacaacaacctatttttcaaccagtgatgttggaaatgtttttttaaaaattagtttataaatttgtgggctgaccaagaaggtaataaagtctaactaagtaaaatgagaaaaattcagaaaaagaaaaaaataagaaaataaatcacccagggacctatcacacaaatataagaactattcattctttaaggcatgtatttccaagcctttgtatttttttccatgcttagggttggcaaggaatatatatatatttgtacaaatatatatgtgtatatgtacaaatacatgtatatatagtacaaatatatatatatatatttgtacaattcttcagactttgtagaatttgtataatgtcgtatcttgctttttttaaccactgatgttataagcatatttatgccacttcattcattttagagacttaataataaatgatctagtggataatttatcattccctgatggagaaaaatttagctttgtttattttagagttataaacgatgctgggtcaggtatctttatgtttgaagatggctccatatttgggttgtttccacagaactctttcctagaaatgctttttctaggttaatggctacagatatttctaggcacctgacatattgacacccacctctaaagtatttttatgatccacaactagcgtttaacacagcgccctagtcactacatgactaataaatagacaaatgactgaaacatgacctcatgctttctattcctccagctttcattcagttctttgcctctgggaggaggaagggttgtgcagccctccacagcatcagcccatcaaccctatccctgtggttatagcagctgaggaagcagaattgcagctctgtgggaaggaatggggctggagagttcatgcacagaccagttcttatgagaagggactgactaagaatagccttgggttgacatatacccctcttcacactcacaggagaaaccatttccctatgaaactataacaagtcatgagttgagagctgagagttagagaatagctcaaagatgctattcttggatatcctgagcccctgtggtcaccagggaccctgagttgtgcaacttagcatgacagcatcactacgcttaaaaatttccctcctcacccccagattccatttccccatccgccagggctgcctataaagaggagagctggtttcagacttcagaaggacacgggcagcagacagtggtcagtcctttcttggctctgctgacactcgagcccacattccgtcacctgctcagaatcatgcaggtctccactgctgcccttgctgtcctcctctgcaccatggctctctgcaaccagttctctgcatcacgtgagtctgagtttcg

SEQ ID NO: 17813 - DNA, 2300 bp, Homo sapien
tcttcatcatgaaatatctgccagatcctatgcccagaatcatattgtctaggttatcttacaggtatcatatttttatagttttatattttaggttttacatttaagtcttcaacccattgtgagttgatttttacagatggtgtaaggaaggggtccagtttcaatcttttgcatacagctagccagttatcccagtaccatttattgactgggaagtcctttccctgttgcttgtttttgttaactttgtcaaagttcggatggttgcaggtatgcagcattatttctgagctctctattttgttctattggtctatgagtctgtttttgtaccaaagccatgctgttttggttactgcagccctgtggtatagtttgaagtcatggctccctttttttactcttcttttttctttctcagagaagagcaggtaacaatgtggggttaaaggtgagcaggtgggttagagtagtggagctaaaggcagatagaggtcttgatccaattatcctcattcccttcatttgtccaaccttgcacattcctgtatgcagggcctttgtaagcttcaccttctgtacaggtgcccagcaactgtcaaaccagccagggcttaacatgagcatgggcattccctatggactggctgggacacacccacatccttagattacacattttgcctgtaacatagataaactaattactaggtatataattctgtttcgttttgttttgctttgttttgtttttgggacagggtctcattctgtcaaacaagcgggagtgcagtggcacaatcaccactcactgcagcctggacttttctgggctcaggtgatcttcccacctcagcctactgagcagctgggactacaggtgtgtatcaccactcccagccaaaatatttttttatagagacagtgtttcaccatgttgcccagtctggtatcgaacttctgggctcaagctatctgcctgccttgacctcccaaagtgctgggattacaggtgtgaggccctgtacccagctcaatcctgtttttatactagaagaacattctctatctgggtcttccaaacttgattcttactggttaatttgtcctgttcttttgctggtccaagaaaatatcctgaaatctttatttcttctccgtttcctccttgtcctaggacagactagccctatccccttcctgaattaagtccgaatatagtcagtctttgagtgtggaatagctcctagcagtctatcagtcaacgggttctctttgtggtcacattctttgtttattcaggagactacagcatggaaagaaaatggactttggagtcaggtgaatcttgattcaaatcttggcagtgccattcatcagctctgtggcattgagcgcatcagtggaccactctctgatccccaattgccttgtctgtaaaatgagattagacacccctgctcaagattatggtaggattatatataatgtgtgtaacacagcttttccagtgcctggtacaaggtaagtgtccaataagaagttacaaatgttcctgagccaccctactgggtccctcctcacatccaatgctggactcttcatgcccaaggaaacatataaggcacaaaagtcagtggcactcagctcagcagaagaaggcacaggaaggggatgggggagtcctggctcccactttgttcttggggtcaggcttgtggccagcctggaaagactgacatgaaccctccagcatctgagggtgccaaccaccaagagcagcacagttcttgtctacaagccacttgtagcaggtgtgaacatttcatcttttcctctggggtttgcaactctctccccagtctcggtcactgcctttggctgtaccacttcccttttcttctcgcctgcacctccctcatctttcctctatgatgacatcgccctggggaagagaagctgagaggaactcctcactcagctagcttcaggagcatgacgtcatctctaccatggaaattccactcactctcctgtgcccccacatttgtcctaggcctcagagtccctataaagagagattcccaagtcagtatcagcacaggacacagctgggttctgaagcttctgagttctgcagcctcacctctgagaaaacctctttgccaccaataccatgaagctctgcgtgactgtcctgtctctcctcatgctagtagctgccttctgctctccagcgctctcagcaccaagtaagtctacttttgcagctgctatttcgagtcaaggtgtaggca

SEQ ID NO: 17814 - DNA, 2300 bp, Homo sapien
ttcttatctccacttgctagggctgtcattgggacagtcctagagggtggtgccaatggatgaatggatggatggacagtagtccagggatgatgtccctgtctgtcctgaaccgggcccttcctccaatgagaagccttcctgagtgagtatatacagtcatcccttggtatccatggaggattagttctagggtccccgggaatgccaaaatccatggatgttcaagtctctgatagaacatggcctagtatttacgtataagctatgcgcatcctcccgtatacgttagaccgttactagattatgatgtgtaatacaatgcagatgctacataaatggtcgtgatactgtattctttagggaatgatgacaagaacaaagtctgcacatgttcaatagaaacataaccatccaatttattttctgaatattttccatctgctgttgccgaatctatagatgcagagctcctggatacgagagccaagtgtgctttgagagtagggtgggtgaggttgctaatgagtacaggggagcaggtgttgatcaggagggccctgcactggggcatctggacgtcctgcctcaggacttgagactccagttggatggcacagacagactcagcccaggtcaaagccgtccccttgaagtttcattttatcccaagctctttctggaccctggaatttggcatcccctaggccctgcgtggaaggacagatgaaccaggttttagataacatgtctagaagagtgagcccctactgtgtgctcggcactttccccacaggatcctctagctagaatatccaagggtcatggagagaaatacccagttaaaatatcagaaatgaaaaagcgataccattagatacactaaaaagaccattaggtaatagtattagcttttgtattctgagatccaacagcagcagtcacttccctccacccctatgtgtatcccaggaccaccctgggcggggagggctgaggttagggagcagccatggatgctctgatgctggccctgggcctcgggggtgacagtgatgaggaactgggtgcacacatgagtggggcagccgggcctggccagagaagcaacacacatgtgcacagacatgtttacccacatacacgtgtgcacgcacgtgcacaaacacgttgcaggcaggcatgttgacgcctcaggcagcggaggaccctgactctgggtgctgctgacccgggcaaggccccactgtgattcgtgccatgacctcagaatgtcactggtgcttagcacctatctgctctctggcctgcgtcagtggtctacagcagttacacacaggcagtggtatctgtgagcagctctgtggactcaaaggttttctccctgagaggcatgacccaggccagctgattcatcagaatcaggtgagcgtgacctgctctcttccctccaggcggacttggggacagtggctacggtgcgggcggtgttggcctctgtggggcagctaccgaggagggtcatccctgagcactcaccaggcgcccgttctacactgcccgtgtagacgattggctctttcgtctccatggtggcttcgtagagtgggtgctgttcccaaatgtccccattcgacagatgagacgtctggggtcagagaggcagtaaccggcctgggaatccggacatgaccctgagttttgctctcagccctgccgtgtgctgtgctggaattcaggcctgaaccctgtgacctccctgccctagatcccaaatctgcccaggtttcccatcccgatggggcagagcctggtcctggcagagccactggtatagagccactggtacagatccactgacggtcctcagaacacctctgtgccctaagctgggtcctgatggtcgctgtgggccccactgaacacacatggtcccttgtccgggggagcctgctgcccttgggcagctgtggaaaatgaaggagccctggagggctggctgaggggagactatcttcccttgtgttcaaaggggtccgggcactagggttctccccaggtatttcttgctctgcgtggtcctcttgaggcctcgccctccttttgcctcgagtattcccaggagggacggtccatccagctgttctccaggaccaaggacccactgttcttcctcagtgacccaggaaaatgaagcctcctcctgttgggacggctcagaatggtggactccacagtccctccgcgagagacgtggtttccatgcgtacaatagatcttcctcatcccccaaacccaac

SEQ ID NO: 17815 - DNA, 2300 bp, Homo sapien
gaggggtgggcaggagagcagatccaccctcctcttgaggaagcagccaccatccccaggaagagcagatgggggcacacaggcagagtccccacgtgctgtagagcagggccagcagaactgtactcagccccagccccaggggagctgcaagatagactgagaccctcacaggttgggctctgtgtccccaccgaaatctcatctggaattgtaatcctcctgtgtcaagggaggaacctggtgggaggggatgggatctggggacagtttcccccctgctgctcccctgatagtgagggagttctcaggagagctgatggtttgaaagtgtggcacttcctgcttctccgctcactccctcctgccgccttgtggagaaggtgcctgcttccccttcgccttctgccatgactgtaagttccctgaactgggagtcgattaaacctctttcctttataaattacctaggctcaagtatttctttatagcagtgtgaaaacaaactaataccccttccctgaggcgccttctccttaggcaacccgctgcccccatgctcctcctctgccccctgtcctttcttttcccctcatgaggcccaagtgataaacggggccagccccagtcccagccccagccccagccccagccccatcctactgcaggcctgtgtggctgctggagaggccgtgttcctttcctctccccgagcctgcctgatatgctttctggatcctggaggaaactgaccccctattctcatactggtgcaacatcttccaagacctcaaagctgtaccatttgagccagtcttttttcttatctccacttgctagggctgtcattgggacagtcctagagggtggtgccaatggatgaatggatggatggacagtagtccagggatgatgtccctgtctgtcctgaaccgggcccttcctccaatgagaagccttcctgagtgagtatatacagtcatcccttggtatccatggaggattagttctagggtccccgggaatgccaaaatccatggatgttcaagtctctgatagaacatggcctagtatttacgtataagctatgcgcatcctcccgtatacgttagaccgttactagattatgatgtgtaatacaatgcagatgctacataaatggtcgtgatactgtattctttagggaatgatgacaagaacaaagtctgcacatgttcaatagaaacataaccatccaatttattttctgaatattttccatctgctgttgccgaatctatagatgcagagctcctggatacgagagccaagtgtgctttgagagtagggtgggtgaggttgctaatgagtacaggggagcaggtgttgatcaggagggccctgcactggggcatctggacgtcctgcctcaggacttgagactccagttggatggcacagacagactcagcccaggtcaaagccgtccccttgaagtttcattttatcccaagctctttctggaccctggaatttggcatcccctaggccctgcgtggaaggacagatgaaccaggttttagataacatgtctagaagagtgagcccctactgtgtgctcggcactttccccacaggatcctctagctagaatatccaagggtcatggagagaaatacccagttaaaatatcagaaatgaaaaagcgataccattagatacactaaaaagaccattaggtaatagtattagcttttgtattctgagatccaacagcagcagtcacttccctccacccctatgtgtatcccaggaccaccctgggcggggagggctgaggttagggagcagccatggatgctctgatgctggccctgggcctcgggggtgacagtgatgaggaactgggtgcacacatgagtggggcagccgggcctggccagagaagcaacacacatgtgcacagacatgtttacccacatacacgtgtgcacgcacgtgcacaaacacgttgcaggcaggcatgttgacgcctcaggcagcggaggaccctgactctgggtgctgctgacccgggcaaggccccactgtgattcgtgccatgacctcagaatgtcactggtgcttagcacctatctgctctctggcctgcgtcagtggtctacagcagttacacacaggcagtggtatctgtgagcagctctgtggactcaaaggttttctccctgagaggcatgacccaggccagctgattcatcagaatcaggtgagcgtgacctgctctcttccctccaggcggacttggggacagtggctacggt

SEQ ID NO: 17816 - DNA, 2300 bp, Homo sapien
tttatcatccatattcacccccactgctctgcagctccactgaagcaccccctctttcctctgagccacaatgtcacacccaggactctgcctcagctgggcctccactgcccacccatctatagatgcctaaatcccgggcagttatccagacacaactaaagttccatcccttccatgaagccttccccaaccctctggtggaaggtcacttcttcctcatggggttctgagctttcatttctttttctactaagagttttacaattacctgttcatacactctacctgcccccatgagaccaggggcatctcagaaacaaagatcattaaaaccaactaaatctatttctcattataaaatgagatatgctgattgattgcaaaataataaaataacaaagtatggaaaagaaaaaaaaaagcatataatctggctgagaaggtagagacccttccacaccactgaaattatgtgttgaaaagaataaggaaaaaactgcttcagtttggcattatttatgtaagtatagtataggatccttaaaatggttcaaagaaatgggaaatcaagacttcattttggcaaagcccattgaacagaaactgtagcatatttatcagtaatttctttcagattaaacaactgacaacaacccacttttcaaccagtgatgttggaaatgttttaaaacaaaattagttcataaatttgtgggttgaccaagaaggtaataaagtctcactaaataaaatgaggaaaattcagaaaaagaaaaaaataagaaaataaatcacccatggatctaagcactattcattctttaaggcatgtatttccaagccttttaattttttccatgcctagagttggcatggcatatatatatctttatacaattcttcaaattttatagaatttgtataatgttttatcttgctttttttttaaccactgatgttataagcatatttatgccacttcattcacgttagagacttaataataaaggatcttgtggataatttatcattccctgatagagaaaaatttagctttgcttattttagagttataaatgatgctgggtcaggtatctttatgtttgaagatggctccatatttgggttgtttccacagaactctttcccagaaatgctttttctaggttaatggctacacatatttctaggcacctgacatactgacacccacctctaaagtatttttatgatccacaactagcgtttaacacagcgccccagtcactccgagactaataaatagacaaatgactgaaacgtgacctcatgctttctattcctccagctttcattgagttcctttcctctgggaggactgggggttgtctagccctccacagcatcagcccattgaccctatccttgtggttatagcagctgaggaagcagaattacagctctgtgggaaggaatggggctggagagttcatgcatagaccaattctttttttttttttttttttgagatggagtttcacttttgttgcccaggctggagtgcaatggcatgatctcagctcaccacagcccccacctcctgggttcaagcgattctcctgccctcagcctcccgagtagctgggattacaggcatgtgccaccacgcctgactacttttgtatttttagtagagatggagtttctctttcttggtcaggttggtctcaaactcctgacctcaggtgatctgcagcctcggcctcccaaagtgttgggattacaggtgtgagcgaccatgcctggctgcatagaccagttcttatgagaagggatcaactaagaatagccttgggttgacacacacccctcttcacactcacaggagaaaccccatgaagctagaaccagtcatgagttgagagctgagagttagagagtagctcagagatgctattcttggatatcctgagcccctgtggtcaccagggaccctgagttgtgcaacactcagcatgacagcatcactacacttaaaaatttccctcctcacccccagattccatttccccatccgccagggctgcctataaagaggagagatggcttcagacatcagaaggacgcaggcagcaaagagtagtcagtcccttcttggctctgctgacactcgagcccacattccatcacctgctcccaatcatgcaggtctccactgctgcccttgccgtcctcctctgcaccatggctctctgcaaccaggtcctctctgcaccacgtgagtccatgttgttgttgtgggtatcaccactctctgg

SEQ ID NO: 17817 - DNA, 2300 bp, Homo sapien
cttacaggtatcatatttttatagttttatattttaggttttacatttaagtcttcaacccattgtgagttgatttttacagatggtgtaaggaaggggtccagtttcaatcttttgcatacagctagccagttatcccagtaccatttattgactgggaagtcctttccctgttgcttgtttttgttaactttgtcaaagttcggatggttgcaggtatgcagcattatttctgagctctctattttgttctattggtctatgagtctgtttttgtaccaaagccatgctgttttggttactgcagccctgtggtatagtttgaagtcatggctccctttttttactcttcttttttctttctcagagaagagcaggtaacaatgtggggttaaaggtgagcaggtgggttagagtagtggagctaaaggcagatagaggtcttgatccaattatcctcattcccttcatttgtccaaccttgcacactcctgtatgcagggcctttgtaagcttcaccttctgtacaggtgcccagcaactgtcaaaccagccagggcttaacatgagcatgggcattccctatggactggctgggacacacccacatccttagattacacattttgcctgtaacatagataaactcattactaggtatataattctgttttgttttgttttggtttgttttgctttgttttgttttgctttgctttgtttttgggacagggtctcattctgtcaaacaagctggagtgcagtggcacaatcaccactcactgcagcctggactttcctgggctcaggtgatcttcccacctgagcctactgagcagctgggactacaggtgtgtatcaccactcccagtcaagttttttttttgtatgtgtgttttttatagagacagtgtttcaccatgttccccaggctggtctcaaacttctgggctcaagcaatctgcctgccttgacctcccaaagtgctgggatttcaggtgtgaggccctgtacccagctcaattctgtttttatactagaagaacattctctatctgggtcttccagacttgattcttactggttaatttgtcctggtcttttgctggtccaagaaaatatcttgaaatctttatttcttctccgttccctccttgtcctaggacagactagccctatcccttccctgaattaagtctgagtataatcggtctttgagtgtggaatagctcctagcagtctatcagtcaatggtttctctttgtggtcacactctatgtttattctggagactacagcatggaaagaaaatggactttggagtcagatgaatcttgattcgaatcttgattcaaatcttggcagtgccattcatcagctctgtggcattgagcaccatcagtggaccactctctgatccccaattgccttatctgtaaaatgagattagacacccctgctcaagattatggtaggattatatataatatgtgtaacacagctttcccagtgcctggtacaaggtaagtgtccaataagaacttacaaatgttcctgagccaccctactgggtccctccgcacatccaatgctggactcttcatgcccaaggaaacatatagggcacaaaagtcagtggcactgagctcagcagaagaaggcacaggaaggggatgggggagtcctggttcccgctttgtttttggggccaggactgtggccagcctggaaagactggcatgaaccctccagcatctgggggtgccaaccaccaagagcagcacagttcttgtctacaagccacttgtagcaggtgtgaacatttcatcttttcctctggggtttgcaactctctccccagtctcggtcactgcttttggctgtaccacttcccttttcttctcgcctgcacctccctcatctttcctctatgatgacatcgccctggggaagagaagctgagaggaactcctcactcagctagcttcaggagccatgacatcatctctaccatggaaattccactcactctcctgtgcccccacatttgtcctaggcctcagagtccctataaagagagattcccaactcagtatcagcacaggacacagctaggttctgaagcttctgagttctgcagcctcacctctgagaaaacctctttgccaccaataccatgaagctctgcgtgactgtcctgtctctcctcgtgctagtagctgccttctgctctctagcactctcagcaccaagtaagtctacttttgcagctgctatttcgagtcaaggtgtaggcagag

SEQ ID NO: 17818 - DNA, 2300 bp, Homo sapien
gaaaaggcactatagtatcctcctataccttccatccagctgcccctaataatgatgttttgcagtcccatggcacataagaaatttaggccgggtgtggtggctcacacctgtaatcccagcaatttgagaggtcgaggcgggaggttcaggttcacttgagtctagaagtctgagaccagcctgggaaacctaggtggacccggtctctagagaaaagtcaaagaaattagccaggcatggtggcgtgtgcctatagtcccacctagtcaggaggctgaggcaggaggattgctggagcccacgagttccaggaagcagtgagccatgattgcaccactgcactccagcctgggtgacagagtgagactttatctcttaaaaaaatttaagaaatttaatgtgggtacagttctattaactaaataataatgtgaactattatctaaggttatgaaggctagaattatcccatttttgcctaacttctcgtacctgtcccaagatcccaccttggactcaccctctgccttcagctcacgtctcttcagcttcctccacatggtccagcaaacacacacctgggctgaatggtagagctgattgctcatacacaaaggtagaccggtgggcagggattttcagacttacacagtcaatgagttttccttggtgttctggagagcaccgtttgagaaacactttgacagtgaatctaggcctcaagatccatcagctgctctagcttgaattttgctcaagctcagtgaacacctgctctgccgggtgcacgtgaaaggggcaaggatgagaaagctgtagataaagaagacaggacgcagggggtctgtctaagctctatcccctgccttcagcactgagggatgaaatccaactcttagggaacggtggccacgtgctgggccagccccaggctctcaggatctgacagtgggtgacgcagagccaggccttgcccctggggagctctccagcatacacctccctctcccctcccagcgtcccgcaaagcaggcgtcaacgccattgttaatgcacggaggaggaacctgactgttagacctgggttttccagggttgcacggcttctgggagacggatgtgaccctgaggacagggcacaggccagtgtaatgccaggatggaatgagctgtgatctgtgctgtatagaggcctaggccaaggtgggactgacggatgaccaggtcagccgggtcactgaaaacactcttgggtcctcacctgccggttcccaggagtccggaactgccaggagagtggtggcaggtcccccatcctcagctgggtgggcctggatagaacagcaaggcgagggcacatttccctggccattccctccaggcacagctgtgacctgttcattccaaatttgtggaagtatttccacacacacagaactgcaaatagcagtggacgtggtgagaggcgtttgcacatgggataggcaggattttggaggcagagcctccagggcttgccgatgggttagctgcagggcttgagagggaacggagaatccaggatgatgtgttcaaatcggtccattcacctcttccgttccacgcctgtgctgggcactgggagagacagatgcacacaggagccccggccgaggggaggtgtggggggaagcccagagtgtctgggcagggtaggaaacccagagcgtctactgggagctgaaggcttaggtccacctgggtgccgtccaggttctctgcatgtagaagtataggctgagcttcccggaggaggagcagctgctgttgctggtgaccagcacattcaggaacggagactactctgtcaacagacagggggatgacctgaggtctggatggtctagggggtggtagggcccaggaggacccaggaaagggtctcggggatgcagaacatcctatggagggcatttgggagtcagtgctcaggtcactccgggtcactcaggtcatttgccggcccctgtcataattattgccatatgagagtgccacccgtcctatgacatattttatatatttctgtgaatggcctacttgtttgtatttatgaatttatgtttaaaggatgggcaggggtgctcgagaggtccccaggagtttccctctggggagagaggggcccaccccttcccagcagccctctgagccccccgatcgcttggccacagcctctgcctggagaaagcatccccctcggagatatatggacatcagaagaaacctttctctgtcaccaggacaaatcctgttct

SEQ ID NO: 17819 - DNA, 2300 bp, Homo sapien
ttcttatctccacttgctagggctgtcattgggacagtcctagagggtggtgccaatggatgaatggatggatggacagtagtccagggatgatgtccctgtctgtcctgaaccgggcccttcctccaatgagaagccttcctgagtgagtatatacagtcatcccttggtatccatggaggattagttctagggtccccgggaatgccaaaatccatggatgctcaagtctctgatagaacatggcctagtatttacgtataagctatgcgcatcctcccgtatacgttagaccgttactagattatgatgtgtaatacaatgcagatgctacataaatggtcgtgatactgtattctttagggaatgatgacaagaacaaagtctgcacatgttcaatagaaacataaccatccaatttattttctgaatattttccatctgctgttgctgaatctatagatgcagagctcctggatacgagagccaagtgtgctttgagagtagggtgggtgaggttgctaatgagtacaggggagcaggtgttgatcaggagggccctgcactggggcatctggacgtcctgcctcaggacttgagactccagttggatggcacagacagactcagcccaggtcaaagccgtccccttgaagtttcattttatcccaagctctttctggaccctggaatttggcatcccctaggccctgcgtggaaggacagatgaaccaggttttagataacatgtctagaagagtgagcccctactgtgtgctcggcactttccccacaggatcctctagctagaatatccaagggtcatggagagaaatacccagttaaaatatcagaaatgaaaaagcgataccattagagacactaaaaagaccattaggtaatagtattagcttttgtattctgagatccaacagcagcagtcacttccctccacccctatgtgtatcccaggaccaccctgggcggggagggctgaggttagggagcagccatggatgctctgatgctggccctgggcctcgggggtgacagtgatgaggaactgggtgcacacatgagtggggcagccgggcctggccagagaagcaacacacatgtgcacagacatgtttacccacatacacgtgtgcacgcacgtgcacaaacacgttgcaggcaggcatgttgacgcctcaggcagcggaggaccctgactctgggtgctgctgacccgggcaaggccccactgtgattcgtgccatgacctcagaatgtcactgctgcttagcacctatctgctctctggcctgcctcagtggtctacagcagttacacacaggcagtggtatctgtgagcagctctgtggactcaaaggttttctccctgagaggcatgacccaggccagctgattcatcagaatcaggtgagcgtgacctgctctcttccctccaggcggacttggggacagtggctacggtgcgggcggtgttggcctctgtggggcagctaccgaggagggtcatccctgagcactcaccaggcgcccgttctacactgcccgtgtagacgattggctctttcgtctccatggtggcttcgtagagtgggtgctgttcccaaatgtccccattcgacagatgagacgtctggggtcagagaggcagtaaccggcctgggaatccggacatgaccctgagttttgctctcagccctgccgtgtgctgtgctggaattcaggcctgaaccctgtgacctccctgccctagatcccaaatctgcccaggtttcccatcccgatggggcagagcctggtcctggcagagccactggtatagagccactggtacagatccactgacggtcctcagaacacctctgtgccctaagctgggtcctgatggtcgctgtgggccccactgaacacacatggtcccttgtccgggggagcctgctgcccttgggcagctgtggaaaatgaaggagccctggagggctggctgaggggagactatcttcccttgtgttcaaaggggtccgggcactagggttctccccaggtatttcttgctctgcgtggtcctcttgaggcctcgccctccttttgcctcgagtattcccaggagggacggtccatccagctgttctccaggaccaaggacccactgttcttcctcagtgacccaggaaaatgaagcctcctcctgttgggacggctcagaatggtggactccacagtccctccgcgagagacgtggtttccatgcgtacaatagatcttcctcatcccccaaacccaac

SEQ ID NO: 17820 - DNA, 2300 bp, Homo sapien
aggggtgggcaggagagcagatccaccctcctcttgaggaagcagccaccatccccaggaagagcagatgggggcacacaggcagagtccccacgtgctgtagagcagggccagcagaactgtactcagcctcagccccaggggagctgcaagatagactgagaccctcacaggttgggctctgtgtccccaccgaaatctcatctggaattgtaatcctcctgtgtcaagggagaaacctggtgggaggggatgggatctggggacagtttcccccctgctgctcccctgatagtgagggagttctcaggagagctgatggtttgaaagtgtggcacttcctgcttctccgctcactccctcctgccgccttgtggagaaggtgcctgcttccccttcgccttctgccatgactgtaagttccctgaactgggagtcgattaaacctctttcctttataaattacctaggctcaagtatttctttatagcagtgtgaaaacaaactaataccccttccctgaggcgccttctccttaggcaacccgctgcccccatgctcctcctctgccccctgtcctttcttttcccctcatgaggcccaagtgataaacggggccagccccagtcccagccccagccccagccccagccccatcctactgcaggcctgtgtggctgctggagaggccgtgttcctttcctctccccgagcctgcctgatatgctttctggatcctggaggaaactgaccccctattctcatactggtgcaacatcttccaagacctcaaagctgtaccatttgagccagtcttttttcttatctccacttgctagggctgtcattgggacagtcctagagggtggtgccaatggatgaatggatggatggacagtagtccagggatgatgtccctgtctgtcctgaaccgggcccttcctccaatgagaagccttcctgagtgagtatatacagtcatcccttggtatccatggaggattagttctagggtccccgggaatgccaaaatccatggatgctcaagtctctgatagaacatggcctagtatttacgtataagctatgcgcatcctcccgtatacgttagaccgttactagattatgatgtgtaatacaatgcagatgctacataaatggtcgtgatactgtattctttagggaatgatgacaagaacaaagtctgcacatgttcaatagaaacataaccatccaatttattttctgaatattttccatctgctgttgctgaatctatagatgcagagctcctggatacgagagccaagtgtgctttgagagtagggtgggtgaggttgctaatgagtacaggggagcaggtgttgatcaggagggccctgcactggggcatctggacgtcctgcctcaggacttgagactccagttggatggcacagacagactcagcccaggtcaaagccgtccccttgaagtttcattttatcccaagctctttctggaccctggaatttggcatcccctaggccctgcgtggaaggacagatgaaccaggttttagataacatgtctagaagagtgagcccctactgtgtgctcggcactttccccacaggatcctctagctagaatatccaagggtcatggagagaaatacccagttaaaatatcagaaatgaaaaagcgataccattagagacactaaaaagaccattaggtaatagtattagcttttgtattctgagatccaacagcagcagtcacttccctccacccctatgtgtatcccaggaccaccctgggcggggagggctgaggttagggagcagccatggatgctctgatgctggccctgggcctcgggggtgacagtgatgaggaactgggtgcacacatgagtggggcagccgggcctggccagagaagcaacacacatgtgcacagacatgtttacccacatacacgtgtgcacgcacgtgcacaaacacgttgcaggcaggcatgttgacgcctcaggcagcggaggaccctgactctgggtgctgctgacccgggcaaggccccactgtgattcgtgccatgacctcagaatgtcactgctgcttagcacctatctgctctctggcctgcctcagtggtctacagcagttacacacaggcagtggtatctgtgagcagctctgtggactcaaaggttttctccctgagaggcatgacccaggccagctgattcatcagaatcaggtgagcgtgacctgctctcttccctccaggcggacttggggacagtggctacggtg

SEQ ID NO: 17821 - DNA, 2300 bp, Homo sapien
tgctcataggattgcatattagttacactatttattcgctgcatggccatggacaagttgttttaactctctgagccaacatttcctcttctgttaaatgggaatattaataatacttagcccttggagacactgttagaatttgaagcacaatgaataatttttaagagagcttgactcatgagaaaaataagcttaaatgcatgaatatatatatcaagcatgaatttacctagtgcatatgcattatacactgggtgcataatactttataaaataatcattgttttaaaaaatagagtttcattatttggggagaggcattaccgtcatttcctttctgctgacttcccctcttcagagttttctgctcttcccctcccatcccaccaccttgctttgtcacaaaacaaagccaataggatcaccaacagtttaagactggtttactcaaaacgaattcattgttttacatagctgaacacagaaatgataaataatgttctataaatatttgttggttgacagctttggaacaatgtcctctagaaaaagctgaacgtagccacccaccttgtacgagagccgcaaagaatagccatgtgcctgaatatgtgtcagccgctgtgtgactggaggggctgaggaaggggcgtagagggtgttgtgaggtcccttccgacaagcagtcaagaacgcatagaaatacattacaaaaattaaatagataagttgaaatgcatgttaagaagagccccagagtgtggttgcttgggtaggggtaggttcaggaattgaagggacgtccctagggcctgggtccctgcctcctaatttgccacaaatgtaacagtgtcttgttgcttccaggtcactcagggattcgactctgaggtcagtgatgcacttggcaccagaactcgatggggttggcacagacctgccagcctcagccactttcattctggaagctgttaaaagagacagttataaaaattgaggaatcagcaagagaattcctggttccgtgctaccttcttctctctgtcttggcaagtgtcgggcctgtccacttgctcaggactctttgtccaacctcagctccctagacctttcatcagtggctcagggggtctcttcaggcagcctcttccggctaacacttcctcctgtcttccctctgtcaggggcagctcttccgtggttccttgcagaccccaggtcaggccagaaaacacctctatggcccttccctgtgtcccaccaccagataggacctcaaaggcctggggtccccaggatggccctcaaaccgactggtgcccttgcaggctgccaccctccaagtcctgcttctctctagagatgggcaggagcaccagccctcacctggcaccagcagtgagtctcataattgccatctaccattttgctagggggcttctggggatcctaggaaaagcagcagatgcctgggtgcttggggacctgggcattctgagggaaggagcagcgtgaccctgagtcatttttcactggggacaaatgagccaactccttctacccagtgataaaatcagaaggaagcagatggagacagcactgttcaggggatgatttggggatgagaagaactggcaggaagttggggatgtgggggtgagaagaaccagcaggaagttggggatttcttgtttccccacttttcccttccatttctgtttgagccttaggtttggcctccgtctccctctgtaggaattgcagctaattaaatattctgcctcttattccagctttactgggggaacataatatggtctaagaagagatttttccagcaagaggccatctctgcaaatcacctgtgaggcagacctgtggcaattttatgactcagctggccaccgggattgtagctgggttctgccgcttgttgaaacctactcaatgttctccttccctaagtaggacaagaccgtatcctgcctttaaggtttatagaataaaaactgaaaactctttggggaagaaaatcttcctgaacagatagcccagggcattttgaaaatcccttaggaagttctctgtttcacttgggtacctttgtccttggactttggtgatgtggtttgaccccagctagagagtgaggggaacaacagcaaaaggcaggacaaagactgactcgtgagaggaggcccaggaacagggggccattgtgaatgaggaggacgtgggggcccaagaaagtgagcaaaagaggacagggcttgcgcactcagtcaccagcccccttc

SEQ ID NO: 17822 - DNA, 2300 bp, Homo sapien
acctttatcatccatattcacccccactgctctgcagctccactgaagcaccccctctttcctctgagccacaatgtcacacccaggactctgcctcagctgggcctccactgcccacccatctatagatgcctaaatcccgggcagttatccagacacaactaaagttccatcccttccatgaagccttccccaaccctctggtggaaggtcacttcttcctcatggggttctgagctttcatttctttttctactaagagttttacaattacctgttcatacactctacctgcccccatgagaccaggggcatctcagaaacaaagatcattaaaaccaactaaatctatttctcattataaaatgagatatgctgattgattgcaaaataataaaataacaaagtatggaaaagaaaaaaaaaagcatataatctggctgagaaggtagagacccttccacaccactgaaattatgtgttgaaaagaataaggaaaaaactgcttcagtttggcattatttatgtaagtatagtacaggatccttaaaatggttcaaagaaatgggaaatcaagacttcattttggcaaagcccattgaacagaaactgtagcatatttatcagtaatttctttcagattaaacaactgacaacaacccacttttcaaccagtgatgttggaaatgttttaaaacaaaattagttcataaatttgtgggctgaccaagaaggtaatacagtctcactaaataaaatgaggaaaattcagaaaaagaaaaaaataagaaaataaatcacccatggatctaagcactattcattctttaaggcatgtatttccaagccttttaattttttccatgcctagagttggcatggcatatatatatctttatacaattcttcaaattttatagaatttgtataatgttttatcttgctttttttttaaccactgatgttataagcatatttatgccacttcattcacgttagagacttaataataaaggatcttgtggataatttatcattccctgatagagaaaaatttagctttgcttattttagagttataaatgatgctgggtcaggtatctttatgtttgaagatggctccatatttgggttgtttccacagaactctttcccagaaatgctttttctaggttaatggctacacatatttctaggcacctgacatactgacacccacctctaaagtatttttatgatccacaactagcgtttaacacagcgccccagtcactccgagactaataaatagacaaatgactgaaacgtgacctcatgctttctattcctccagctttcattgagttcctttcctctgggaggactgggggttgtctagccctccacagcatcagcccattgaccctatccttgtggttatagcagctgaggaagcagaattacagctctgtgggaaggaatggggctggagagttcatgcatagaccaattctttttttttttttttttttgagatggagtttcacttttgttgcccaggctggagtgcaatggcatgatctcagctcaccacagcccccacctcctgggttcaagcgattctcctgccctcagcctcccgagtagctgggattacaggcatgtgccaccatgcctgactacttttgtatttttagtagagatggagtttctctttcttggtcaggttggtctcaaactgacctcaggtgatccgcagcctcggcctcccaaagtgttgggattacaggtgtgagcgaccatgcctggctgcatagaccagttcttatgagaagggatcaactaagaatagccttgggttgacacacacccctcttcacactcacaggagaaaccccatgaagctagaaccagtcatgagttgagagctgagagttagagagtagctcagagatgctattcttggatatcctgagcccctgtggtcaccagggaccctgagttgtgcaacactcagcatgacagcatcactacacttaaaaatttccctcctcacccccagattccatttccccatccgccagggctgcctataaagaggagagatggcttcagacatcagaaggacgcaggcagcaaagagtagtcagtcccttcttggctctgctgacactcgagcccacattccatcacctgctcccaatcatgcaggtctccactgctgcccttgccgtcctcctctgcaccatggctctctgcaaccaggtcctctctgcaccacgtgagtccatgttgttgttgtgggtatcaccactctctgg

SEQ ID NO: 17823 - DNA, 2300 bp, Homo sapien
cttacaggtatcatatttttatagttttatattttaggttttacatttaagtcttcaacccattgtgagttgatttttacagatggtgtaaggaaggggtccagtttcaatcttttgcatacagctagccagttatcccagtaccatttattgactgggaagtcctttccctgttgcttgtttttgttaactttgtcaaagttcggatggctgcaggtatgcagcattatttctgagctctctattttgttctattggtctatgagtctgtttttgtaccaaagccatgctgttttggttactgcagccctgtggtatagtttgaagtcatggctccctttttttactcttcttttttctttctcagagaagagcaggtaacaatgtggggttaaaggtgagcaggtgggttagagtagtggagctaaaggcagatagaggtcttgatccaattatcctcattcccttcatttgtccaaccttgcacactcctgtatgcagggcctttgtaagcttcaccttctgtacaggtgcccagcaactgtcaaaccagccagggcttaacatgagcatgggcattccctatggactggctgggacacacccacatccttagattacacattttgcctgtaacatagataaactcattactaggtatataattctgttttgttttgttttggtttgttttgctttgttttgttttgctttgctttgtttttgggacagggtctcattctgtcaaacaagctggagtgcagtggcacaatcaccactcactgcagcctggactttcctgggctcaggtgatcttcccacctgagcctactgagcagctgggactacaggtgtgtatcaccactcccagtcaagttttttttttgtatgtgtgttttttatagagacagtgtttcaccatgttccccaggctggtctcaaacttctgggctcaagcaatctgcctgccttgacctcccaaagtgctgggatttcaggtgtgaggccctgtacccagctcaattctgtttttatactagaagaacattctctatctgggtcttccagacttgattcttactggttaatttgtcctggtcttttgctggtccaagaaaatatcttgaaatctttatttcttctccgttccctccttgtcctaggacagactagccctatcccttccctgaattaagtctgagtataatcggtctttgagtgtggaatagctcctagcagtctatcagtcaatggtttctctttgtggtcacactctatgtttattctggagactacagcatggaaagaaaatggactttggagtcagatgaatcttgattcgaatcttgattcaaatcttggcagtgccattcatcagttctgtggcattgagcgccatcagtggaccactctctgatccccaattgccttatctgtaaaatgagattagacacccctgctcaagattatggtaggattatatataatatgtgtaacacagctttcccagtgcctggtacaaggtaagtgtccaataagaacttacaaatgttcctgagccaccctactgggtccctccgcacatccaatgctggactcttcatgcccaaggaaacatatagggcacaaaagtcagtggcactgagctcagcagaagaaggcacaggaaggggatgggggagtcctggttcccgctttgttcttggggccaggacagtggccagcctggaaagactggcatgaaccctccagcatctgggggtgccaaccaccaagagcagcacagttcttgtctacaagccacttgtagcaggtgtgaacatttcatcttttcctctggggtttgcaactctctccccagtctcggtcactgcttttggctgtaccacttcccttttcttctcgcctgcacctccctcatctttcctctatgatgacatcgccctggggaagagaagctgagaggaactcctcactcagctagcttcaggagccatgacatcatctctaccatggaaattccactcactctcctgtgcccccacatttgtcctaggcctcagagtccctataaagagagattcccaactcagtatcagcacaggacacagctaggttctgaagcttctgagttctgcagcctcacctctgagaaaacctctttgccaccaataccatgaagctctgcgtgactgtcctgtctctcctcgtgctagtagctgccttctgctctctagcactctcagcaccaagtaagtctacttttgcagctgctatttcgagtcaaggtgtaggcagag

SEQ ID NO: 17824 - DNA, 2300 bp, Homo sapien
gaaaaggcactatagtatcctcctataccttccatccagctgcccctaataatgatgttttgcagtcccatggcacataagaaatttaggccgggtgtggtggctcacacctgtaatcccagcaatttgagaggtcgaggcgggaggttcaggttcacttgagtctagaagtctgagaccagcctgggaaacctaggtggacccggtctctagagaaaagtcaaagaaattagccaggcatggtggcgtgtgcctatagtcccacctagtcaggaggctgaggcaggaggattgctggagcccacgagttccaggaagcagtgagccatgattgcaccactgcactccagcctgggtgacagagtgagactttatctcttaaaaaaatttaagaaatttaatgtgggtacagttctattaactaaataataatgtgaactattatctaaggttatgaaggctagaattatcccatttttgcctaacttctcgtacctgtcccaagatcccaccttggactcaccctctgccttcagctcacgtctcttcagcttcctccacatggtccagcaaacacacacctgggctgaatggtagagctgattgctcatacacaaaggtagaccggtgggcagggattttcagacttacacagtcaatgagttttccttggtgttctggagagcaccgtttgagaaacactttgacagtgaatctaggcctcaagatccatcagctgctctagcttgaattttgctcaagctcagtgaacacctgctctgccgggtgcacgtgaaaggggcaaggatgagaaagctgtagataaagaagacaggacgcagggggtctgtctaagctctatcccctgccttcagcactgagggatgaaatccaactcttagggaacggtggccacgtgctgggccagccccaggctctcaggatctgacagtgggtgacgcagagccaggccttgcccctggggagctctccagcatacacctccctctcccctcccagcgtgccgcaaagcaggcatcaacgccattgttaatgcacggaggaggaacctgactgttagacctgggttttccagggttgcacggcttctgggagacggatgtgaccctgaggacagggcacaggccagtgtaatgccaggatggaatgagctgtgatctgtgctgtatagaggcctaggccaaggtgggactgacggatgaccaggtcagccgggtcactgaaaacactcttgggtcctcacctgccggttcccaggagtccggaactgccaggagagtggtggcaggtcccccatcctcagctgggtgggcctggatagaacagcaaggcgagggcacatttccctggccattccctccaggcacagctgtgacctgttcattccaaatttgtggaagtatttccacacacacagaactgcaaatagcagtggacatggtgagaggcgtttgcacatgggataggcaggattttggaggcagagcctccagggcttgccgatgggttagctgcagggcttgagagggaacggagaatccaggatgatgtgttcaaatcggtccattcacctcttccgttccacgcctgtgctgggcactgggagagacagatgcacacaggagccccggacgaggggaggtgtggggggaagcccagagtgtctgggcagggtaggaaacccagagcgtctactgggagctgaaggcttaggtccacctgggtgccgtccaggttctctgcatgtagaagtataggctgagcttcccggaggaggagcagctgctgttgctggtgaccagcacattcaggaatggagactactctgtcaacagacagggggatgacctgaggtctggatggtctagggggtggtagggcccaggaggacccaggaaagggtctcggggatgcagaacatcctatggagggcatttgggagtcagtgctcaggccactccgggtcactcaggtcatttgccggcccctgtcataattattgccatatgagagtgccacccgtcctatgacatattttatatatttctgtgaatggcctacttgtttgtatttatgaatttatgtttaaaggatgggcaggggtgctcgagaggtccccaggagtttccctctggggagagaggggcccaccccttcccagcagccctctgagccccccgatcgcttggccacagcctctgcctggagaaagcatccccctcggagatatatggacatcagaagaaacctttctctgtcaccaggacaaatcctgttct

SEQ ID NO: 17825 - DNA, 2300 bp, Homo sapien
tatctccacttgctagggctgtcattgggacagtcctagagggtggtgccaatggatgaatggatggatggacagtagtccagggatgatgtccctgtctgtcctgaaccgggcccttcctccaatgagaagccttcctgagtgagtatatacagtcatcccttggtatccatggaggattagttctagggtccccgggaatgccaaaatccatggatgctcaagtctctgatataacgtggcctagtatttacgtataagctatgcgcatcctcccgtatacgttagaccgttactagattatttatgatgtgtaatacaatgcagatgctacataaatggtcgtgatactgtattctttagggaatgatgacaagaacaaagtctgcacatgttcaatagaaacataaccgtccaatttattttctgaatattttccatctgctgttgctgaatctacagatgcagagctcctggatacgagagccaagtgtgctttgagagtagggtgggtgaggttgctaatgagtacaggggagcaggtgttgatcaggaggaccctgcactggggcatctggacgtcctgcctcaggacttgagactccagttggatggcacagacagactcagcccaggtcaaagccgtccccttgaagtttctttttatcccaagctctttctggaccctggaattcggcatcccctaggccctgcgtggaaggacagatgaaccaggttttagataacgtgtctagaagagtgagcccctactgtgtgcccggcactttccccacaggatcctctagctagaatatccaagggtcatggagagaaatacccagttaaaatatcagaaatgaaaaagtgataccattagagacactaaaaagaccattaggtaatagtattagcttttgtattctgagatccaatagcagcagtcacttccctccaccgctatgtgtatcccaggaccaccctgggcggggagggctggggttagggagcagccatggatgctctgatgctggccctgggcctcgggggtgacagtgatgaggaactgggtgcacacatgagtggggcagccgggcctggccagagaagcagcacacacgtgcacagacgtgtttacccacatacacatgtgcacgcacgtgcacaaacacattgcaggcaggcatgttgacgcctcaggcagcggaggaccctgactctgggcgctgctgacccgggcaaggccccactgtgattcgtgccatgacctcagaatgtcactggtgcttagcacctgtctgctctctggcctgcctcagtggtctacagcagttacacacaggcagtggtatctgtgagcagctctgtggactcaaaggttttctccctgagaggcatgacccaggccagctgattcatcagaatcaggtgagcgtgacctgctctcttccctccaggcggacttgggggcagtggctacggtgcgggcggtgttggcctctgtggggcagctaccgaggagggtcatccctgagcactcaccaggcgcccgttctacactgcccgtgtagacgattggctctttcgtctccatggtggcttcgtagagtgggtgctgttcccaaatgtccccattcgacagatgagacgtctggggtcagagaggcagtaaccggcctgggaatccggacatgaccctgagttttgctctcagccctgccgtgtgctgtgctggaattcaggcctgaaccctgtgacctccctgccctagatcccaaatctgcccaggtttcccatcccgatggggcagagcctggtcctggcagagccactggtatagagccactggtacagatccactgacggtcctcagaacacctctgtgccctaagctgggtcctgatggtcgctgtgggccccactgaacacacatggtcccttgtccgggggagcctgctgcccttgggcagctgtggaaaatgaaggagccctggagggctggctgaggggagactatcttcccttgtgttcaaaggggtccgggcactagggttctccccaggtatttcttgctctgcgtggtcctcttgaggcctcgccctccttttgcctcgagtattcccaggagggacggtccatccagctgttctccaggaccaaggacccactgttcttcctcagtgacccaggaaaatgaagcctcctcctgttgggacggctcagaatggtggactccacagtccctccgcgagagacgtggtttccatgcgtacaatagatcttcctcatcccccaaacccaac

SEQ ID NO: 17826 - DNA, 2300 bp, Homo sapien
gagaggggtgggcaggagagcagatccaccctcctcttgaggaagcagccaccatccccaggaagagcagatgggggcacacaggcagagtccccacgtgctgtagagcagggccagcagaactgtactcagccccagccccaggggagctgcaagatagactgagaccctcacaggttgggctctgtgtccccacccaaatctcatctggaattgtaatcctcctgtgtcaagggaggaacctggtgggaggggatgggatctggggacaggttcccccctgctgctcccctgatagtgcgggagttctcaggagagctgatggtttgaaagtgtggcacttcctgcttctccgctcactccctcctgccgccttgtggagaaggtgcctgcttccccttcgccttctgccatgactgtaagttccctgaactgggagtcgattaaacctctttcctttataaattacctaggctcaagtatttctttatagcagtgtgaaaacaaactaataccccttccctgaggcgccttctccttaggcaacccgctgctcccatgctcctcctctgccccctgttctttcttttcccctcatgaggcccaagtgataaacggggccagccccagtgccagccccagccccagccccatcctactgcaggcctgtgtggctgctggagaggccgtgttcctttcctctccccgagcctgcctgatatgctttctggatcctggaggaaactgaccccctattctcatactggtgcaacatcttccaagacctcaaagctgtaccatttgagccagtcttttttcttatctccacttgctagggctgtcattgggacagtcctagagggtggtgccaatggatgaatggatggatggacagtagtccagggatgatgtccctgtctgtcctgaaccgggcccttcctccaatgagaagccttcctgagtgagtatatacagtcatcccttggtatccatggaggattagttctagggtccccgggaatgccaaaatccatggatgctcaagtctctgatataacgtggcctagtatttacgtataagctatgcgcatcctcccgtatacgttagaccgttactagattatttatgatgtgtaatacaatgcagatgctacataaatggtcgtgatactgtattctttagggaatgatgacaagaacaaagtctgcacatgttcaatagaaacataaccgtccaatttattttctgaatattttccatctgctgttgctgaatctacagatgcagagctcctggatacgagagccaagtgtgctttgagagtagggtgggtgaggttgctaatgagtacaggggagcaggtgttgatcaggaggaccctgcactggggcatctggacgtcctgcctcaggacttgagactccagttggatggcacagacagactcagcccaggtcaaagccgtccccttgaagtttctttttatcccaagctctttctggaccctggaattcggcatcccctaggccctgcgtggaaggacagatgaaccaggttttagataacgtgtctagaagagtgagcccctactgtgtgcccggcactttccccacaggatcctctagctagaatatccaagggtcatggagagaaatacccagttaaaatatcagaaatgaaaaagtgataccattagagacactaaaaagaccattaggtaatagtattagcttttgtattctgagatccaatagcagcagtcacttccctccaccgctatgtgtatcccaggaccaccctgggcggggagggctggggttagggagcagccatggatgctctgatgctggccctgggcctcgggggtgacagtgatgaggaactgggtgcacacatgagtggggcagccgggcctggccagagaagcagcacacacgtgcacagacgtgtttacccacatacacatgtgcacgcacgtgcacaaacacattgcaggcaggcatgttgacgcctcaggcagcggaggaccctgactctgggcgctgctgacccgggcaaggccccactgtgattcgtgccatgacctcagaatgtcactggtgcttagcacctgtctgctctctggcctgcctcagtggtctacagcagttacacacaggcagtggtatctgtgagcagctctgtggactcaaaggttttctccctgagaggcatgacccaggccagctgattcatcagaatcaggtgagcgtgacctgctctcttccctccaggcggacttgggggcagtggctacggt

SEQ ID NO: 17827 - DNA, 2300 bp, Homo sapien
gaaaaggcactatagtgtcctcctataccttccatccagctgcccctaataatgatgttttgcagtcccatggcacataagaaatttaggccgggtgtggtggctcacacctgtaatcccagcaatttgagaggtcgaggtgggaggttcaggttcacttgagtctagaagtctgagaccagcctgggaaacctaggtggacccggtctctagagaaaagtcaaagaaattagccaggcatggtggcgtgtgcctatagtcccacctagtcaggaggctgaggcaggaggattgctggagcccacgagttccaggaagcagtgagccatgattgcaccactgcactccagcctgggtgacagagtgagactttacctcttaaaaaaatttgagaaatttaatgtgggtacaattctattaactaaataataatgtgaactattatctaaggttatgaaggctagaattatcccatttttgcctaacttctcgtacctgtcccaagatcccaccttggactcaccctctgccttcagctcatgtctcttcagcttcctccacatggtccagcaaacacacacctgggctgaatggtagagctgattgctcatacacaaaggtagaccggtgggcagggattttcagacttatagagtaaatgagttttccttggtgttctggagagcaccgtttgagaaacactttgacagtgaatctaggcctcaagatccatcagctgctctagcttgaattttgctcaagctcagtgaacacctgctctgccgggtgcacgtgaaagggacaaggatgagaaagctgtagataaagaagacaggatgcagggggtctgtctaagctctatcccctgccttcagcactgagggatgaaatccaactcttagggaacggtggccacgtgctgggccagccccaggctctcaggatctgacagtgggtgacgcagagccaggccttgcccctggggagctctccagcatacacctccctctcccctcccagcgtcccgcaaagcaggcgtcaatgccattgttaatgcacggaggaggaacctgactgttagacctgggttttccagggttgcacggcttctgggagacggatgtgaccctgaggacagggcacaggccagtgtaatgccaggatggaatgagctgtgatctgtgctgtatagaggcctaggccaaggtgggactgacggatgaccaggtcagccgggtcactgaaaacactcttgggtcctcacctgccggttcccaggagtccggaactgccaggagagtggtggcaggtcccccatcctcagctgggtgggcctggatagaacagcaaggcgaaggcacatttccctgggcattccctccaggcacagctgtgacctgttcattccaaattggtggaagtatttccacacacacagaactgcaaatagcagtggacatggtgagaggcgtttgcacatgggataggcaggattttggaggaagagcctccagggcttgccgatgggttagctgcagggcttgagagggaacggagaatccaggatgatgtgttcaaatcggtccattcacctcttccgttccacgcctgtgctgggcactgggagagacagatgcacacaggagccccggacgaggggaggtgtggggggaagcccagagtgtctgggcagggtaggaaacccagagcgtctactgggagctgaaggcttaggtccacctgggtgccgtccaggttctctgcatgtagaagtataggctgagcttcctggaggaggagcagctgctgttgctggtgaccagcacattcaggaacggagactactctgtcaacagacagggggatgacctgaggtctggatggtctagggggtggtagggcccaggaggacccaggaaagggtctcggggatgcagaacatcctatggagggcatttgggagtcagtgctcaggtcactccgggtcactcaggtcatttgccggcccctgtcataattattgccatatgagagtgccacccgtcctatgacatattttatatatttctgtgaatggcctacttgtttgtatttatgaatttatgtttaaaggatgggcaggggtgctcgagaggtccccaggagtttccctctggggagagaggggcccaccccttcccagcagccctctgagccccccgatcgcttggccacagcctctgcctggagaaagcatccccctcggagatatatggacatcagaagaaacctttctctgtcaccaggacaaatcctgttct

SEQ ID NO: 17828 - DNA, 2300 bp, Homo sapien
gccatgacctcagaatgtcactggtgcttagcacctatctgctctctggcctgcgtcagtggtctacagcagttacacacaggcagtggtatctgtgagcagctctgtggactcaaaggttttctccctgagaggcatgacccaggccagctgattcatcagaatcaggtgagcgtgacctgctctcttccctccaggcggacttggggacagtggctacggtgcgggcggtgttggcctctgtggggcagctaccgaggagggtcatccctgagcactcaccaggcgcccgttctacactgcccgtgtagacgattggctctttcgtctccatggtggcttcgtagagtgggtgctgttcccaaatgtccccattcgacagatgagacgtctggggtcagagaggcagtaaccggcctgggaatccggacatgaccctgagttttgctctcagccctgccgtgtgctgtgctggaattcaggcctgaaccctgtgacctccctgccctagatcccaaatctgcccaggtttcccatcccgatggggcagagcctggtcctggcagagccactggtatagagccactggtacagatccactgacggtcctcagaacacctctgtgccctaagctgggtcctgatggtcgctgtgggccccactgaacacacatggtcccttgtccgggggagcctgctgcccttgggcagctgtggaaaatgaaggagccctggagggctggctgaggggagactatcttcccttgtgttcaaaggggtccgggcactagggttctccccaggtatttcttgctctgcgtggtcctcttgaggcctcgccctccttttgcctcgagtattcccaggagggacggtccatccagctgttctccaggaccaaggacccactgttcttcctcagtgacccaggaaaatgaagcctcctcctgttgggacggctcagaatggtggactccacagtccctccgcgagagacgtggtttccatgcgtacaatagatcttcctcatcccccaaacccaacaccctcctgctcaacaggcgttattcctaaagtggcttcactgttcagactgaagagccacggtagccaaagtgatgagcggagtagaaccgagcagtcgggagagatcttgttccctgtaggaaactgggcatcgctgaggccctgagcatcccaggaggccgattgcacagagacctctggtcgctgaccccagtctgcctccacatccctggaatagcccatcatgggcccttcacccttggcaggtggaaaccattcaacctgctggggccggtgtgtccccatttcatggcattgggggacaacaggattctctgtctaggtcccactgtactcaagtccttgggaagatgcccacccctgcttgggacttgagactccagagactggagcagctgtgggccactgggtctggcccctttttccctgggggcggcggtggaatgggggttacgcagccagccagcatctgggagcccggcgagagcggttcaggtgttctccgaagccgccgcgtacagtgtgacctttagacaattctgtctcacaggatggacgtggtagaggtcgcgggtagttggtgggcacaagagcgagaggacatcattatgaaatacgaaaaggtacaagtcggtctgcttcttggagggaggcctcttccagtgtgccctggtcaaagggtcctgggctccctaggagcacagggcagggacgggtggccaatgcccccaggcccttgcaaccctttaccttggacccctcaccaaggctccctctgggctacagggacaccgagctgggctgccagaggacaaggggcctaagccttttcgaagctacaacaacaacgtcgatcatttggggattgtacagtgagtcctctgcactcccctcacccctaaagcacctgtctcagctcaggaatgggtttgcttttagaaaggcctttctgacgcaggacatgtctcaccaggtcgggtcaacctcctttccagggacagaactcctccctgactcccctgcaggtccagcccgaggttgttaggccagaggtgtggggcccatctagggagccggtgggaatggagactgggctaggtcaggcccctgggcgctcagcagttctgtcggcaagtgagcacaagaggagcggggcagcctgagggtctggccctgtctacttggagacaaccccggtgagatgcaagggttatggccacagggtgaggggacgcctggcccagcctcagggct

SEQ ID NO: 17829 - DNA, 2300 bp, Homo sapien
ttcttatctccacttgctagggctgtcattgggacagtcctagagggtggtgccaatggatgaatggatggatggacagtagtccagggatgatgtccctgtctgtcctgaaccgggcccttcctccaatgagaagccttcctgagtgagtatatacagtcatcccttggtatccatggaggattagttctagggtccccgggaatgccaaaatccatggatgctcaagtctctgatagaacatggcctagtatttacgtataagctatgcgcatcctcccgtatacgttagaccgttactagattatgatgtgtaatacaatgcagatgctacataaatggtcgtgatactgtattctttagggaatgatgacaagaacaaagtctgcacatgttcaatagaaacataaccatccaatttattttctgaatattttccatctgctgttgccgaatctatagatgcagagctcctggatacgagagccaagtgtgctttgagagtagggtgggtgaggttgctaatgagtacaggggagcaggtgttgatcaggagggccctgcactggggcatctggacgtcctgcctcaggacttgagactccagttggatggcacagacagactcagcccaggtcaaagccgtccccttgaagtttcattttatcccaagctctttctggaccctggaatttggcatcccctaggccctgcgtggaaggacagatgaaccaggttttagataacatgtctagaagagtgagcccctactgtgtgctcggcactttccccacaggatcctctagctagaatatccaagggtcatggagagaaatacccagttaaaatatcagaaatgaaaaagcgataccattagatacactaaaaagaccattaggtaatagtattagcttttgtattctgagatccaacagcagcagtcacttccctccacccctatgtgtatcccaggaccaccctgggcggggagggctgaggttagggagcagccatggatgctctgatgctggccctgggcctcgggggtgacagtgatgaggaactgggtgcacacatgagtggggcagccgggcctggccagagaagcaacacacatgtgcacagacatgtttacccacatacacgtgtgcacgcacgtgcacaaacacgttgcaagcaggcatgttgacgcctcaggcagcggaggaccctgactctgggcgctgctgacccgggcaaggccccactgtgattcgtgccatgacctcagaatgtcactggtgcttagcacctatctgctctctggcctgcgtcagtggtctacagcagttacacacaggcagtggtatctgtgagcagctctgtggactcaaaggttttctccctgagaggcatgacccaggccagctgattcatcagaatcaggtgagcgtgacctgctctcttccctccaggcggacttggggacagtggctacggtgcgggcggtgttggcctctgtggggcagctaccgaggagggtcatccctgagcactcaccaggcgcccgttctacactgcccgtgtagacgattggctctttcgtctccatggtggcttcgtagagtgggtgctgttcccaaatgtccccattcgacagatgagacgtctggggtcagagaggcagtaaccggcctgggaatccggacatgaccctgagttttgctctcagccctgccgtgtgctgtgctggaattcaggcctgaaccctgtgacctccctgccctagatcccaaatctgcccaggtttcccatcccgatggggcagagcctggtcctggcagagccactggtatagagccactggtacagatccactgacggtcctcagaacacctctgtgccctaagctgggtcctgatggtcgctgtgggccccactgaacacacatggtcccttgtccgggggagcctgctgcccttgggcagctgtggaaaatgaaggagccctggagggctggctgaggggagactatcttcccttgtgttcaaaggggtccgggcactagggttctccccaggtatttcttgctctgcgtggtcctcttgaggcctcgccctccttttgcctcgagtattcccaggagggacggtccatccagctgttctccaggaccaaggacccactgttcttcctcagtgacccaggaaaatgaagcctcctcctgttgggacggctcagaatggtggactccacagtccctccgcgagagacgtggtttccatgcgtacaatagatcttcctcatcccccaaacccaac

SEQ ID NO: 17830 - DNA, 2300 bp, Homo sapien
gaggggtgggcaggagagcagatccaccctcctcttgaggaagcagccaccatccccaggaagagcagatgggggcacacaggcagagtccccacgtgctgtagagcagggccagcagaactgtactcagcctcagccccaggggagctgcaagatagactgagaccctcacaggttgggctctgtgtccccaccgaaatctcatctggaattgtaatcctcctgtgtcaagggagaaacctggtgggaggggatgggatctggggacagtttcccccctgctgctcccctgatagtgagggagttctcaggagagctgatggtttgaaagtgtggcacttcctgcttctccgctcactccctcctgccgccttgtggagaaggtgcctgcttccccttcgccttctgccatgactgtaagttccctgaactgggagtcgattaaacctctttcctttataaattacctaggctcaagtatttctttatagcagtgtgaaaacaaactaataccccttccctgaggcgccttctccttaggcaacccgctgcccccatgctcctcctctgccccctgtcctttcttttcccctcatgaggcccaagtgataaacggggccagccccagtcccagccccagccccagccccagccccatcctactgcaggcctgtgtggctgctggagaggccgtgttcctttcctctccccgagcctgcctgatatgctttctggatcctggaggaaactgaccccctattctcatactggtgcaacatcttccaagacctcaaagctgtaccatttgagccagtcttttttcttatctccacttgctagggctgtcattgggacagtcctagagggtggtgccaatggatgaatggatggatggacagtagtccagggatgatgtccctgtctgtcctgaaccgggcccttcctccaatgagaagccttcctgagtgagtatatacagtcatcccttggtatccatggaggattagttctagggtccccgggaatgccaaaatccatggatgctcaagtctctgatagaacatggcctagtatttacgtataagctatgcgcatcctcccgtatacgttagaccgttactagattatgatgtgtaatacaatgcagatgctacataaatggtcgtgatactgtattctttagggaatgatgacaagaacaaagtctgcacatgttcaatagaaacataaccatccaatttattttctgaatattttccatctgctgttgccgaatctatagatgcagagctcctggatacgagagccaagtgtgctttgagagtagggtgggtgaggttgctaatgagtacaggggagcaggtgttgatcaggagggccctgcactggggcatctggacgtcctgcctcaggacttgagactccagttggatggcacagacagactcagcccaggtcaaagccgtccccttgaagtttcattttatcccaagctctttctggaccctggaatttggcatcccctaggccctgcgtggaaggacagatgaaccaggttttagataacatgtctagaagagtgagcccctactgtgtgctcggcactttccccacaggatcctctagctagaatatccaagggtcatggagagaaatacccagttaaaatatcagaaatgaaaaagcgataccattagatacactaaaaagaccattaggtaatagtattagcttttgtattctgagatccaacagcagcagtcacttccctccacccctatgtgtatcccaggaccaccctgggcggggagggctgaggttagggagcagccatggatgctctgatgctggccctgggcctcgggggtgacagtgatgaggaactgggtgcacacatgagtggggcagccgggcctggccagagaagcaacacacatgtgcacagacatgtttacccacatacacgtgtgcacgcacgtgcacaaacacgttgcaagcaggcatgttgacgcctcaggcagcggaggaccctgactctgggcgctgctgacccgggcaaggccccactgtgattcgtgccatgacctcagaatgtcactggtgcttagcacctatctgctctctggcctgcgtcagtggtctacagcagttacacacaggcagtggtatctgtgagcagctctgtggactcaaaggttttctccctgagaggcatgacccaggccagctgattcatcagaatcaggtgagcgtgacctgctctcttccctccaggcggacttggggacagtggctacggt

SEQ ID NO: 17831 - DNA, 2300 bp, Homo sapien
cccaggctggagtgcagtggcatgatcttggctcactacaatctctgcctctagagttccggcgattcttgtgcctcagcctctctagtagttgggattacaggcgtgcaccaccacacccagttaattttttctatttttagtacagacagggttttgctatgttagccaggctggtcttgaactcctggcctcaagtgatctgcctgctttggcctcccaaagtgctgggatcacaggcgtgagccactgcgcctggcctaaatttttcgtctttaagacggggtctctctctctctgtcatccaggctggaatgcagtggcacaatcatagctcactgcagccttgaactcctgggctcaagtgagcctccagcctcaactttctaagtagctgggactacaggctgatgcgaccatgcccgacttggcacaggatttaaatatggccctggacaagtcactggccttctctggccttcccaggtaagcttggactttctgggatgcttcaagttcaaatcatcagtggtacaactgttgaacaatatgaggaacgctgcgggttactgggcctgtgtggacccgttttggattctaagctgggtcctgggcagaagttggaggctggggcagctgcaagcaggacaggcaggtggccagagggcccagcagcttcagcactgaggactggactgggtcgccacgcccaaaggaaggataattactcacctcccactcaagaagcaggcggcagaactgttttggagagcatggcttggggcctgggacctatgttcatgcggtccagacggagatccatgagagttaagactctttctagatatcaggtagcacttctgattacaaaacttttgcacatggtctcctctctgctttacaacagctcaggaaagtaggcccaaacatccactttaatagatgagggagctcagagggggtaaccaacccctccaggtcacacagccagggagggggttgagccaaggttcaaaccactgcctcggttgttgcagatacatccctgcagacacctttattgaagagggaccctgaaggctgaacggccaacacagaagaggaggcacttgggagtaagggtgatttatggccctgggagggcccagtgcaggtaggatgggagctaaggtaaggctgggccatgcctagctgcaagcaaatttccttaaaaaacaaacaacaaaaaacattactttgtctaaacctaaagtttgtggtggcattcaagtcccatcatagcccatctatccagactcatctgcctgggatccccgtcttgggactagtggtcactggcctgcttcctggtcaattagcttccgggactagggggaggtgtgaggagcctagagtgcaaaatttaagaagcactcagtctcaggggcgtgcaggtgcagggtagcgacggcaggactctaagagtgagtctctttcctccccgtttccccgtcctactttcactctaagcatttagttcccaggggacagagacgacttcttcattagaagaccccggggggtccccagcccggaagggctcacagttggagctcaaacatttgccactgttcaggctcatctttctttccccagtgaaaaatggtctaggttgggaagggcaggttcctgtctactgcgtgatccaaccgattctggttcgcccaatgtctggacttgtcctttgccaagaataagcagatgagatgggcggatgaaccccaatgtccctgcaagattcaggaagtcccagccagaaagtaaaggacgtttagttccatgtattgttttcttttttacatgcggggcaacacacctggacagtgtcgatggcttgctccaagccacacggccgcatagggacagggactgggctacataacaagttcttcgacgctgtgatctaatcaaggaaaacctgggacgcagctaatagatgcgcatcgagtgtatcgacgctctaagtacgagggctggaacagtgagcaggatcagtccattgcttttgcctacctgctgagcgctgattggtccccgtttaggaaacggaaaaaggggcgtgcacgcgggcgcggctgcgtgagaggcgcgcggcggcgcagtaaacagtctccttccacaaaaccatggcgtcgctcaaatgtagcaccgtcgtctgcgtgatctgcttggagaagcccaaataccgctgtccagcctgccgcgtgccctagtgagcggggaggtcgcggggtccaggggcgcgggtgtccggccatggc

SEQ ID NO: 17832 - DNA, 2300 bp, Homo sapien
cccagagtgagatgtggaaatgaagagaaagaggctggtctgtagaagtcaactgggaactagggagcagcacccattcgttcatccattcacttattgtgcactattttgtacccagctgatggctgtgacaaaagccacactggtacaatgttggggacagaagccagactcaggagggctgacaagcaattgggaggaagtgcagatatcaggtgccagcagctgtctgagaagtgttgccttgatgaggagcagggagatctgggggaggcagaggagactgtggggtcagagaggtcagaggggagatgtggccaagcatgtctgcgtcataggactggtccaattgtttggggagaggcctgtcagcccctttggagggaggcagcccgcaaatcccctgctaacacaagagatgctttgtgttggtagaccaaggcagcagggagagcagacccattttaaatagtctttatgggtttccaactaagtgatcctagaaatcgcttcaaaaccacattcacattcagtggggatactcggggagggcagcaccgtgctgtgttgttgagcagattaaatagaataacttctgatgagccctgaaccgttaacctggctcacagatgaagtaattctctacttctgcctgctttggcctccagggtctctcaccgaaactttgtagaacgatacaagttactaagaaggcttcatccttgcacatcctctggccccgacagcccatatcctgccaaagggctccctggtgagtgggacccatgagttagtcatttgtgcaaccacagtttactgagcatctaccctgtgccctgtcttagggctaggggctggggcttactggtgaataaaacacagccctggttttggttcagtgggggaaacagattcaaaaaagacaaatagcatggaaagtggaaaagcagagctatgagcaggatgctgtgggtggtgctagggaggtgtgaattggggaaggcttcctggaagaggtagtatctgagaataaattggattagccaggtgatgggtggtccacatgataaatgtaatctgaacaaaggcctagaggcttgaggcagcagtgtgggtatgaggaactccagccagttctgtgttgctggttcattgaggcagagaactggggcaggtgaggctggagtggcaggtagggctccatcaaggaatctggactttattctctgggcagatgagcaggcactgcaggggaaggagcaaatgactcttatcagcctcacactttctggagaccactctgggggcaccatggagggctgtgggattgaggctgcaaagttgccccaatagagagaaacaagaattgtgggcacagtcgggaaatatttgttggaagaaactggtcagtcttggtaggggcttgactagatgtagagggagaggaaaggagtaaattaacttagcctgggaagtgaggaaaagcaagaggaaaagaggttcagggaggctgaagagcccgggcatgggtgacttgtcctgcaggtccagtgaagaagtctgcaaggcacttaggcaggctttagtctcaaaggaaggatctggaggccctcatatgggggttgtcggcatgcagataaaagagaggctgtgggagccacagggcccagacacaggcagagggagaacaggccaaggacaggctgccggggggccccgcctcggcaggaccccagcccagcacctctgcccctcccacccagccttaccctgggcccctcacagccattggggcaatcctgctttgtttcctcccctcctgggcagttttcactttcctttcaccctttctcctttcttctccctctccatggtttgctgtcctgttccgtgtctcttgcccatagcccttctggcccctggttgattttgctgctgtttctcatctgtggtgtctcctttggcagcctctgtcttcagagaggcactgggcatctaaggtggtcagagccctcaggtaaatcctacctctccaggagtcagctctgcgagctgcgggagggcaggcagtgggacacgggacctttgcagggctgggattttttaaatttattttttaatttattctttttatttgcagtagaagattcccaaactaagggctgggattggatctcccttttcccatacatggtggggagttgaggggtcggggctgagggagtggcctatagctgccctatttggccctcaggatgtgtgtttgggccttggaaacaaatgctggctgagcagcctgg

SEQ ID NO: 17833 - DNA, 2300 bp, Homo sapien
tgcaaaccctctgggtcagtgtgccatggaggaggagtaagacactggggagacagagaagccttgtgccctatcctctacattagacagaaatatcctatttcagtcgttggtgaggagaggctggagtcatctctcgctgctccaggaaaggtgtggtgtggtagtttatatcacagttcaatcactcactgggtgtgtgatcctgggtcaggcacatcacctacctcaatttcttaccttgaaaatggggacagttaaatctgcctcataaggagtggttgtgaaggtcaatgaggtcatggtttgacagcaccacacaaagtacgaatctgagtattcactcagaggataaacactgttagcactacgactaagggttgatgatccatttgggagcgctaatcaggtgaacggtccagtgtcaacttcaagaaggtgaggatttcagggagatgaatccatctgggaggtggggtgttgtgaggctgggcctaagccaatctttgaagaatggttaagtgaccctcagacttggaattttctaggccttggcaccacccctagcaaggagagatgaggctgagggtgaagcgtgcctgcaatggattaaccctggtggagactttcttgaggctctgaatacatcaagtctttaaagaacccagggatagggacttccatagaagctggaaaaaggacaattgaggcggaaacaggtatcaggaccgtgctggaccacttaaggtgtggtgctacagccctaaaagatcctgaccctggacactgactgtaccccatccaagggacagccatgcagagggctccagagaacaaagctctttcaactgggaactcatctcaagcaataggtccagaggggcagcacaacaggtttggggtttgaatccaaaacccaaggcccctggcacagaacccaagaactaagcctcactctgtttcctcgtttacaaaacggagtgataatatccagatctcacggggctaaatgaagcgttaaaggggctaatacctgtgaaagcgctctgcaaatgttattacgatgcagcatcagctcctagctggagtcaagtgagattagagcagttttctccagttctcccagctcctgctccagtcggtttcgcggttaccagccaagaatttctggaaagggtgtgaacactgtgggcagaaaggagacggtaatgagtaaatggaacaccgaatcaaggcaagtggcaacctgatcaccagtccctccttctcagactgtttctttctaggcatggaggacagtgggagggcagacgctgagaagcgctgggtaaggatctcatcagtccagctggctccgcccccaggttcccggcgggaaccggggactcaaggtccgggcgtcgtgccgcaaacccagggctgggatgccgttccggaagcacctggcacggggagagtatgtccttcccaggaaggtggacgtgaccccagccaagggcgcagctgccctgacacctcccgggaccagccgccccctcccggggtcctcagctgggcgaagagtggagcaaggaccctctccccccaggccgccccctgccggccaggtggaaaggtggagggtgatcaagaaagacttgtttcaagcaagagccaagagctgggctaccccctcgtgagacacaagagggtcaaaaggaaaaggcaaaaaggagggaaacggcgctttggaaggggaggtggagacgcctacttcttcctcaccgctgcggggcaaactggcctcccaagccccttccgcgtctgaagggcttcagatataggttcgggttgacactcaccggtcccacggcccgagccgccgtgcttcaggcccccgcccggccagactggaaaggcgggcgggccaggtcaggcggcgggaagaacacgggcaggagagaaaagaggaggggcaagagcgtgcagtgaggaaaggaacctgggagcgccgaaccgcaccccgtcggctgcggcactgctaagtggccgggggtcggccggctcctccctaggggcggggcgagcactcgcggcgcggggcgcgcacgtggcttggccgggacgcctggtccggcttgctggcttcaactacggtgagatgttttgcgaccctggggtaaaatgagggtaaagcggcagcttcccacgttctgggggagaagcgcggaagcacggtttcctgggccttcgggcgacaccaggactgggggtctttcagtagaggtcgccgcggcggagtcttgtgcgagtgcggcgga

SEQ ID NO: 17834 - DNA, 2300 bp, Homo sapien
accacccctagcaaggagagatgaggctgagggtgaagcgtgcctgcaatggattaaccctggtggagactttcttgaggctctgaatacatcaagtctttaaagaacccagggatagggacttccatagaagctggaaaaaggacaattgaggcggaaacaggtatcaggaccgtgctggaccacttaaggtgtggtgctacagccctaaaagatcctgaccctggacactgactgtaccccatccaagggacagccatgcagagggctccagagaacaaagctctttcaactgggaactcatctcaagcaataggtccagaggggcagcacaacaggtttggggtttgaatccaaaacccaaggcccctggcacagaacccaagaactaagcctcactctgtttcctcgtttacaaaacggagtgataatatccagatctcacggggctaaatgaagcgttaaaggggctaatacctgtgaaagcgctctgcaaatgttattacgatgcagcatcagctcctagctggagtcaagtgagattagagcagttttctccagttctcccagctcctgctccagtcggtttcgcggttaccagccaagaatttctggaaagggtgtgaacactgtgggcagaaaggagacggtaatgagtaaatggaacaccgaatcaaggcaagtggcaacctgatcaccagtccctccttctcagactgtttctttctaggcatggaggacagtgggagggcagacgctgagaagcgctgggtaaggatctcatcagtccagctggctccgcccccaggttcccggcgggaaccggggactcaaggtccgggcgtcgtgccgcaaacccagggctgggatgccgttccggaagcacctggcacggggagagtatgtccttcccaggaaggtggacgtgaccccagccaagggcgcagctgccctgacacctcccgggaccagccgccccctcccggggtcctcagctgggcgaagagtggagcaaggaccctctccccccaggccgccccctgccggccaggtggaaaggtggagggtgatcaagaaagacttgtttcaagcaagagccaagagctgggctaccccctcgtgagacacaagagggtcaaaaggaaaaggcaaaaaggagggaaacggcgctttggaaggggaggtggagacgcctacttcttcctcaccgctgcggggcaaactggcctcccaagccccttccgcgtctgaagggcttcagatataggttcgggttgacactcaccggtcccacggcccgagccgccgtgcttcaggcccccgcccggccagactggaaaggcgggcgggccaggtcaggcggcgggaagaacacgggcaggagagaaaagaggaggggcaagagcgtgcagtgaggaaaggaacctgggagcgccgaaccgcaccccgtcggctgcggcactgctaagtggccgggggtcggccggctcctccctaggggcggggcgagcactcgcggcgcggggcgcgcacgtggcttggccgggacgcctggtccggcttgctggcttcaactacggtgagatgttttgcgaccctggggtaaaatgagggtaaagcggcagcttcccacgttctgggggagaagcgcggaagcacggtttcctgggccttcgggcgacaccaggactgggggtctttcagtagaggtcgccgcggcggagtcttgtgcgagtgcggcggagtgttgtgcgagtccggcggagtgttgtgcgagtccggcggacaccattaccctgatagggcctcgccgtgaggtctgaggggccgtgtgaggtgcatggcgcgccgtttcctctccaggcgctcctctcagggctacggccctagaagatctggcctgcaccagcccaaaggacatgacaggagtgggtagcccacgggacactggcacgagcgccatgatgggcggagacgcgcggaatcggccggcccggaagtgccagctgcctgcgtcggccggaagtgccgcgcgggaggcggaagcggctggttcccgcgtggtttggcgggtgcagcggcagtccggctgcccttcccacgtagaccgtctgctgggggcgccggcaccatttggagtacgtgaggtatacgggtagggcgcggccaggtcgggcgtctgttaggaaaaagactttttatttttatgtttattttttaagagacggagtctcgctctgtcgcccaggtaggagtgcagtggcgcgatctcggctcactgctgccttccacctctgggc

SEQ ID NO: 17835 - DNA, 2300 bp, Homo sapien
ccaaggattgtgggaagaagcttaacactaatgtgttcagatagaaatgtcatactaataatatgaaattattggttacaaagcttcagctattccctgtacaagacagactcacaaagaaagtgaatttggggccaggcgtggtggctcacacctgtaatcctagcacttcgggaggccgaggtgggaggatcacctgaggtcaggagttcgagaccagcctggtcaacatggtgaaagcccgtctctactaaaaatacaaaaattagccaggcgtgatggcacccgcctgtaatcccagctactttagaggctgaggcaggagaatcggttgaaccggggaagcagaggttggagtgagccattgcactccagcctgggccacagagtgagactccatctcaaaaaaaaaaaaaaaaaaaaggaaaagaaaaagcaaaggaaaagagagcgaatttgggatataaactctgagaatggcatcataggcagatgggaatttctattatggagcacagtacgtatcatgaagattctttgatgcaaattgaataggatttactaatgaccttaaagcaaattcaaacgctaggggccaagtacattttgaagttgggggccttggttccagttcagagcctctccaaacctactgccttggtacaaaacgtgacccctgcagtgatttctggatccccaggctgctcctttcctcatttacagacagctatgttttcaggttaggatggaagtaggtacggtgggtgcattaagaatggatgtatagcacatactagtgttagttgctcttttattaagggttgtaaaacacctctgaatgccacacatcattgtctgaaaaacggcatactggaagaacacatttgttggttaaacatgaacctagagtttctaaatgtaccatgagctgaataagtaagtgaatgcatgcgtgcattatggcctgtctggaacctgtgacaatatctcacagtaaccaactcaaatcagttgaccattaaaaataaaagtcctagccgagagaagtggttcatgcctgcaatcctagcgctttgggaggagagaggatcgcttaaggccaggagtgaaaaaaaaaaaaagaaaaattaaaaattagctgagcgtggtggtgcgcgcctgtaatgccaggctgaggcgggaggatcgcttgagcccagaggtggaaggcagcagtgagccgagatcgcgccactgcactcctacctgggcgacagagcgagactccgtctcttaaaaaataaacataaaaataaaaagtctttttcctaacagacgcccgacctggccgcgccctacccgtatacctcacgtactccaaatggtgccggcgcccccagcagacggtctacgtgggaagggcagccggactgccgctgcacccgccaaaccacgcgggaaccagccgcttccgcctcccgcgcggcacttccggccgacgcaggcagctggcacttccgggccggccgattccgcgcgtctccgcccatcatggcgctcgtgccagtgtcccgtgggctacccactcctgtcatgtcctttgggctggtgcaggccagatcttctagggccgtagccctgagaggagcgcctggagaggaaacggcgcgccatgcacctcacacggcccctcagacctcacggcgaggccctatcagggtaatggtgtccgccggactcgcacaacactccgccggactcgcacaacactccgccgcactcgcacaagactccgccgcggcgacctctactgaaagacccccagtcctggtgtcgcccgaaggcccaggaaaccgtgcttccgcgcttctcccccagaacgtgggaagctgccgctttaccctcattttaccccagggtcgcaaaacatctcaccgtagttgaagccagcaagccggaccaggcgtcccggccaagccacgtgcgcgccccgcgccgcgagtgctcgccccgcccctagggaggagccggccgacccccggccacttagcagtgccgcagccgacggggtgcggttcggcgctcccaggttcctttcctcactgcacgctcttgcccctcctcttttctctcctgcccgtgttcttcccgccgcctgacctggcccgcccgcctttccagtctggccgggcgggggcctgaagcacggcggctcgggccgtgggaccggtgagtgtcaacccgaacctatatctgaagcccttcagacgcggaaggggcttgggaggccagtttgccccgcagcggtgaggaagaagtag

SEQ ID NO: 17836 - DNA, 2300 bp, Homo sapien
gcactggtaattacacggaaacaggagatggctggattgtattctgattctagactgatgttcaagaatttttcaaggatttttaggaaaggcagtctggcatagcaggtcctccttcggtatatttgatacaacagccctgccccaaagataattacaccgagaagctcaaggaggataaatgaagcccaaatggtcaaagtggctaccatgggaactattaggacaacaaagtcagtgaggaatctagttttccaggtaggtgaaaaagaacacaagtactgtgagaaaatgatcaggaaccctctgcacaggatacagaatgcaggaaagcacaatccctgggtgatttccagcacggtggttccattgaggttactgacaaaagcttccttcatctgcttttcagacatttttcttcctgtgaaaacaagagcaaaggaatggatttgtgaaaagcagcattcttgtgtaattagcatacctggcttaattttactcttattactagatttcagagcagaactttgggccctaatgagttcacctaggatttgtgattccccttccaaggattgtgggaagaagcttaacactaatgtgttcagatagaaatgtcatactaataatatgaaattattggttacaaagcttcagctattccctgtacaagacagactcacaaagaaagtgaatttggggccaggcgtggtggctcacacctgtaatcctagcacttcgggaggccgaggtgggaggatcacctgaggtcaggagttcgagaccagcctggtcaacatggtgaaagcccgtctctactaaaaatacaaaaattagccaggcgtgatggcacccgcctgtaatcccagctactttagaggctgaggcaggagaatcggttgaaccggggaagcagaggttggagtgagccattgcactccagcctgggccacagagtgagactccatctcaaaaaaaaaaaaaaaaaaaaggaaaagaaaaagcaaaggaaaagagagcgaatttgggatataaactctgagaatggcatcataggcagatgggaatttctattatggagcacagtacgtatcatgaagattctttgatgcaaattgaataggatttactaatgaccttaaagcaaattcaaacgctaggggccaagtacattttgaagttgggggccttggttccagttcagagcctctccaaacctactgccttggtacaaaacgtgacccctgcagtgatttctggatccccaggctgctcctttcctcatttacagacagctatgttttcaggttaggatggaagtaggtacggtgggtgcattaagaatggatgtatagcacatactagtgttagttgctcttttattaagggttgtaaaacacctctgaatgccacacatcattgtctgaaaaacggcatactggaagaacacatttgttggttaaacatgaacctagagtttctaaatgtaccatgagctgaataagtaagtgaatgcatgcgtgcattatggcctgtctggaacctgtgacaatatctcacagtaaccaactcaaatcagttgaccattaaaaataaaagtcctagccgagagaagtggttcatgcctgcaatcctagcgctttgggaggagagaggatcgcttaaggccaggagtgaaaaaaaaaaaaagaaaaattaaaaattagctgagcgtggtggtgcgcgcctgtaatgccaggctgaggcgggaggatcgcttgagcccagaggtggaaggcagcagtgagccgagatcgcgccactgcactcctacctgggcgacagagcgagactccgtctcttaaaaaataaacataaaaataaaaagtctttttcctaacagacgcccgacctggccgcgccctacccgtatacctcacgtactccaaatggtgccggcgcccccagcagacggtctacgtgggaagggcagccggactgccgctgcacccgccaaaccacgcgggaaccagccgcttccgcctcccgcgcggcacttccggccgacgcaggcagctggcacttccgggccggccgattccgcgcgtctccgcccatcatggcgctcgtgccagtgtcccgtgggctacccactcctgtcatgtcctttgggctggtgcaggccagatcttctagggccgtagccctgagaggagcgcctggagaggaaacggcgcgccatgcacctcacacggcccctcagacctcacggcgaggccctatcagggtaatggtgtccgccggactcgcacaacactccg

SEQ ID NO: 17837 - DNA, 2300 bp, Homo sapien
ttctgcctcagcctccggagtagctggaattaaaagtgctcgccaccacgcccagctgatttttgtatttttagtagagacaggttttctccatgttgcccaggctcgtctcgaactcctgacctcaagtgacccgcccgccttggcctcccaaagtcttgggattacaggtgttagccgccgcccccgtcctggtttttgttttgttttttacataaaacgcaagattctctaaaaatgtccaaattttggctatgtatatgaacatcatacatacgtattagattcaagctaatactcactcttctactctgctaacatggccagaagacataaaaaaaatttttttttgagacgtagtttcactcgtcgcccaggccggagcacaatggcgcgatctcggatcattgcaacctctgcctcccgggttcaagcgattctcttgcctcagcctcccgagtagctgggataacaggcgtgcgccaccacgctcggctaattttgtatttttagtagagactgggtttcaccatgttggtcaggccagtctcgaactcctgacctcaagtaatccacccacctcgcctcctaaagtgctgggattaccggcgtgagccatgaccccggcccagaagacataaatatttgccgggtaatgacaccttcgggaatgaacaatggttcttcgtttattatgtcaccgaccctaacaatgaccacacaatgtactaagtcaacatggctaagggtgcactatgggttatttgttgtgaatctctaagactccatgtgataaccaaaatactttattttgttttgagatggagtttcgctcttgttgcccaggctgcagtgcaatggcgcgatctgggctcactgcaacctccgcctcccgggttcaagtgattgtcccgtctcagcctccctagtagctgggattacaggtacatgccaccacgcccggctaatttttgtatttttagtagagacgggggtttcatcatattggtcaggctggtctcaaactcctgaccctcaggtgatccacccacctcggcctcccaaagtgctgggattacaggcgtgagccaccatgcccgacccaaaatactttttttaaaggtatcacagctccaggaaatagagcagtaaattgatctgtccttcagatcaccaggactttcataggctaaatatcttcacaacagacctccaaaaccttcaaggtcagaactgaacacacggtggcgagaggaactgtcttcacagcagctctgcttcctcggagacggccagagggaaaggccgttggccagtgccagtacttcgcccaagggagtacctgctcacattaacccagcccaagaagttcctttggccaagacgcacacacacacaccactgtccggttttctatttccttccagtgtaacgacaaccacaagctatcagcacttcactatttgctgtcccctcagcgggatcgggatgcagctacgcagcgggcccctggcgagccgcggtgtcagggcccttttctcctcttcccaccgtgggaagcgaattcagtggcgtcaagggccaagagccagacctgagtttgtctctcaccccccgatgctcgtctcccttttctcactgccttccgccccctctgatctcgacttctcgcaacctatccaggtcctctctgggcctctgccctgagtcagccccgaatcagacgggcttgactcgctgaaagaattcccctttgagaggaggcagattcccctctacatagacgacaccctgacgtcgaggggcttgcccctcgtccgtggggaagccttcccggcccgcggctggggcctgaggttgggccgatcacccctcctaccagtcctagttcgggtctagcggaatggctgggctccgagaagggcgccgggcccacgggcgggacggccagggcggccccgcaccctctgggcgcaaatttctccagcggggtccccagcgcggccagccccagtctcgcgagaggacgtgggtcccgcccggcgcccgaccccgcccggccccaccttcccctcgtcccccgccctccttcttccactccccgcggcgcgagcggctgactgcccgtagaggaaacgacattcggagctgcgctcccgcccaggccggccctgacgcgggcctcgtcagccagtaacagggagcagaggtgggagttagcgaggcgaccacgaaaacggtgaaggtcggaaccgacagcctcctccgagaagggtgaggaaagggtctgagcctccccg

SEQ ID NO: 17838 - DNA, 2300 bp, Homo sapien
tatgggttatttgttgtgaatctctaagactccatgtgataaccaaaatactttattttgttttgagatggagtttcgctcttgttgcccaggctgcagtgcaatggcgcgatctgggctcactgcaacctccgcctcccgggttcaagtgattgtcccgtctcagcctccctagtagctgggattacaggtacatgccaccacgcccggctaatttttgtatttttagtagagacgggggtttcatcatattggtcaggctggtctcaaactcctgaccctcaggtgatccacccacctcggcctcccaaagtgctgggattacaggcgtgagccaccatgcccgacccaaaatactttttttaaaggtatcacagctccaggaaatagagcagtaaattgatctgtccttcagatcaccaggactttcataggctaaatatcttcacaacagacctccaaaaccttcaaggtcagaactgaacacacggtggcgagaggaactgtcttcacagcagctctgcttcctcggagacggccagagggaaaggccgttggccagtgccagtacttcgcccaagggagtacctgctcacattaacccagcccaagaagttcctttggccaagacgcacacacacacaccactgtccggttttctatttccttccagtgtaacgacaaccacaagctatcagcacttcactatttgctgtcccctcagcgggatcgggatgcagctacgcagcgggcccctggcgagccgcggtgtcagggcccttttctcctcttcccaccgtgggaagcgaattcagtggcgtcaagggccaagagccagacctgagtttgtctctcaccccccgatgctcgtctcccttttctcactgccttccgccccctctgatctcgacttctcgcaacctatccaggtcctctctgggcctctgccctgagtcagccccgaatcagacgggcttgactcgctgaaagaattcccctttgagaggaggcagattcccctctacatagacgacaccctgacgtcgaggggcttgcccctcgtccgtggggaagccttcccggcccgcggctggggcctgaggttgggccgatcacccctcctaccagtcctagttcgggtctagcggaatggctgggctccgagaagggcgccgggcccacgggcgggacggccagggcggccccgcaccctctgggcgcaaatttctccagcggggtccccagcgcggccagccccagtctcgcgagaggacgtgggtcccgcccggcgcccgaccccgcccggccccaccttcccctcgtcccccgccctccttcttccactccccgcggcgcgagcggctgactgcccgtagaggaaacgacattcggagctgcgctcccgcccaggccggccctgacgcgggcctcgtcagccagtaacagggagcagaggtgggagttagcgaggcgaccacgaaaacggtgaaggtcggaaccgacagcctcctccgagaagggtgaggaaagggtctgagcctccccgttccctggactccgcagagccgctgcggggtcgatccctcccaggggcggggtcgcgctgggcaactgcagtcctggggccgactgggcggggtgcgcccagaagcggggagaaggggtcagttgggggcagagggcacccgggcggcgggcggcggggaacaggctgcggggcccaggccaggggtggggtcctggggccgggactcctgcagcgggcggggaagcccccggcaggccggtcccttccgcctctcctttggaccctgactggaggccggcgggcgggcgggcgggcgggagagagggagggagcgcggcgcgaggggggcgggtcccggcggcgctgggcgctgattggctgagcgtgtgtggaatcgggtgatgggaaacgcagcccggctctcccgtaccctcccgctccgctccctgccccccgtggcgaatgtgctgcgcagcggcgggtgcttacgctcgcggggtttggctgttgcaggcaggagctgggaggaggcggcagcggcggcggcagaaacagcagcggcggcggcggcggcagctgggaggaggtggtgacggtggcaacggcagcgtcggggacgatggcgcgactcgtggcagtgtgcagggacggggaggaggagttccccttcgagaggaggcagattcccctctacatagacgacaccctgacggtgagcgggccgggccgggctgggcccgccgctcccctggcagctgtttcccctcctccc

SEQ ID NO: 17839 - DNA, 2300 bp, Homo sapien
tcttctaatcctttttaaagtactgcagctcaatcaagtcttaattgagactggcaagcataaaggcatagactggcatctctacaatgacttgcattttacataaaatttgaaaaaacttcggtagatatttgcaaaaaaaaatattgaggaacaaaactgatcaactgcctttgatagcaaaagaatactgatgagatgaagagacttaggtgcaccttatcgaaataagcaaatgtataatccaaagcttcagcatcatcaaaacgcagatttcaaaagatattcggaaaaggttaatttcatttcttaagtggcaagcaactgcactcatttcctgttcagattcaattcaaatttcagccatttccttttaaaggaaacagtacagcaacatagggcagagggtcgataatgctacactaccaaatctaaagaataaagtacccggaactgggtcttgacactcaagatgagcaatcagctttttatagtactcttacacattcaataatttggcttcctttaaaaaaaaaaaagtccacctgtaaactaaataatgcgaagaaagcccgttttgaagaaagggcctagcaatacaatcatttcaagagttttaatgcattaggcaatacgagactatttacaacgaaatcaaaccattttagtggaatcttgactgtgcacgagcatgtcactctgcccccagtaattaagcttatgtggtgagagctaccagtattaaaacagaaaatacacaggtagcagtgcagctgcgacattaccaggtaattaagcctccccgagggtaggtggtttctgtatggggtaggccctaaacgcccaagatccttcaacccctctctgagatgtgtgctttggcaaaagcagcgtctcctaaagggaaagggtcaaggaataaggttccaaaagaaggaaaatctggagagagggagtgcgtacggagctctgggcttggggccgacagaggttaccgagccacccactgcaaaggcgagtttgtggggcctgctgaagagaaggcctcgcctaggagttgcaacacactctttctccagtgcgcagcgctcggcctgggggagggggaggaggggaaacagctgccaggggagcggcgggcccagcccggcccggcccgctcaccgtcagggtgtcgtctatgtagaggggaatctgcctcctctcgaaggggaactcctcctccccgtccctgcacactgccacgagtcgcgccatcgtccccgacgctgccgttgccaccgtcaccacctcctcccagctgccgccgccgccgccgctgctgtttctgccgccgccgctgccgcctcctcccagctcctgcctgcaacagccaaaccccgcgagcgtaagcacccgccgctgcgcagcacattcgccacggggggcagggagcggagcgggagggtacgggagagccgggctgcgtttcccatcacccgattccacacacgctcagccaatcagcgcccagcgccgccgggacccgcccccctcgcgccgcgctccctccctctctcccgcccgcccgcccgcccgccggcctccagtcagggtccaaaggagaggcggaagggaccggcctgccgggggcttccccgcccgctgcaggagtcccggccccaggaccccacccctggcctgggccccgcagcctgttccccgccgcccgccgcccgggtgccctctgcccccaactgaccccttctccccgcttctgggcgcaccccgcccagtcggccccaggactgcagttgcccagcgcgaccccgcccctgggagggatcgaccccgcagcggctctgcggagtccagggaacggggaggctcagaccctttcctcacccttctcggaggaggctgtcggttccgaccttcaccgttttcgtggtcgcctcgctaactcccacctctgctccctgttactggctgacgaggcccgcgtcagggccggcctgggcgggagcgcagctccgaatgtcgtttcctctacgggcagtcagccgctcgcgccgcggggagtggaagaaggagggcgggggacgaggggaaggtggggccgggcggggtcgggcgccgggcgggacccacgtcctctcgcgagactggggctggccgcgctggggaccccgctggagaaatttgcgcccagagggtgcggggccgccctggccgtcccgcccgtgggcccggcgcccttctcggagcccagccattccgctagacccgaactaggactggtaggaggggtgatcggccca

SEQ ID NO: 17840 - DNA, 2300 bp, Homo sapien
cggcccagcttggtgataggcatccactctttatcctcggccttgcctccatgagctctgcggcctcagccgcggcctcagccccagccccggccccggatgccactgccgaaacctccacggaagccactgcatttccccatcccaggcgatccccaccaccggctgccaccagcatcatctgccatttggtgttttctcagagaagcatctatttttgtttttgttgtgcatgtgtgcttttggtgtcatagccaggaaatcatcacttagtccagtgtcatgaagagtttcccctatgttttcttctagttttatggttttcagatgttaacatttagtttttaatccattttgtgttaatttttgtatatttttgcccatatttaaaactttagtgaaataacataatttaacattatttgtcagcattgttgcctctgtttaccaagtgggcttagagcctctaatgtaacatatatatatatatatatatatatatatatatatatatatttttttttttttttttgagatggagtttcgctcttcttatgcaggctggagtgcagtggtgcgatcttggctcactgcaacctctgcctcccgggttcaagcaattctcctgcctcagcctcctgagtagctgggattacaggtgtatgccaccacatctggctaatatttgtatttttagtagagacggggtttcaccatgttggccaggctgatctcgaactcctgagctcagatgatccacccgcctttgcctcccaaagggctgggattacagacgtgagccaccgcgcccagcccatatcttcattttaagaaacattgttatctactattggtccagcaaaacgtgtgtgcatgaaacaaagatatggcagtagaagggtaaatactatagtaagaagtctaggccgggcgtggtggctgatgcttgtaatcccaacactttgggaggctgaggtggggggatcactttgaggtcagaagttcaagaccagcctggccaacatggtgaaaccccatctgcactaaaaacacaaaaatcagccaagtgtggtggtgggcgcatgtaatcccacctactcaggagtctgaggcaggagaattgcttgaacctggggggcgggggttgcagtgagccaagatcgccccaccgcactccagcttgggtgacagagtgaaactccatcttaaaaaaaaaaaaacacgaagaagagtgtaaatcagaagtattaataataagagacaactgaaaagtttgttttgttttgttttgttttttttgagacagagttttgctcttgttgcccaggctggagtgcagtggtgtgatctcggctcactgcaacctctgcctcccgggttcaagtgattctcctgcctctgcctccggagtagctgggattacaggcatgcgccaccacgcccggctaatttttgtattttattagagaccaggtttctccatgttggtcaggctggtctcgaactcccaacctcaggttacctgcccgcctcggcctcccaaagtgctgggattacaggcgtgagcaaccacgcctggccagctgaaaggtttttaagctgagacacagataatcagatttgtgctagaaaaattattttggtataagagatgcgtcaatgctaggaagagtggaaacaggaaagtcagttaagaagctttaaaaaaaaaaaaaagtgggctgggtgcggtagctcaagcctgtaatctcatcactttgggaggccgaggcgggcagatcacctgaggtcaagagttcaagaccagcctggccaacttggcgaaaccctgtctctactaaaaaatacaaaaaatttgctgggtgtagtggtgggcgcctgtaatcccagcgactcgggagactgaggcaggagaatcgcttgaacccaggaggcagaggttacagtgagcctcgatggcgccactgcactccagcctgggcaacagagagagactctgtctcaaaaaaaaaaaaaaaaaaaaaaaaaaaaaatatatatatatatatgtgtgtgtgtgtgtgtgtgtgtgtgtgtgtgtgtgtatatgtatatatgtatatgtatatatatgtatatatatgtgtatatatatatatatagcataggcaacttaaaccatgccagagggaattgaaaatagggacctacaggagaaacaagaaagaatgaatactagttggctctactcaataggaagacccagggagaagttggaattaactcagatttccagcctgggtgactctgaatggctgtga

SEQ ID NO: 17841 - DNA, 2300 bp, Homo sapien
atatagctcaagaagaagttctgacctgcttgggaattcatctttatgaaagactgcatcgaatctggcagaagctacgggcagaagagcagacatggcagatgcttttctatcttggtgttgatgctttacgcaagagttttgaggtaagaacagtgggctgttccagtatctcagattgcttagtcacgttattggactgaatcttaatgtaagccaccagtgcctaaaaggactgtccatcactgatagagcttcatggatttggctggatattgttacatggctttgggttggagtgggggtggtctagggaactgggatttagaagaagttgatggatttaaaaaaatgtttttaatcctgttaactttgctagctttggtttttagactttctcagagtagaaaactgaagatgtttaataagatgctgctatgaaacataactagtgaggctgggcatggtggcttacgcctgtaatcccagcactttgggaggacgaggcaggcggatcacctgaggtcaggagtttgagaccagcctgaccaatatgatgaaaccccgtctctactaaaaatacaaaaattagctgggcgtggtggcgggcacctgtaatccagctacttgggaggctgagacaggagagttgcttcaacctgggaggtggaggttgcagtgagccaagatcacgtcactgcactccagcctgggcaacaagaacaaaactccgtctcaaaacaaaaacaaaaacaaaaacaaaacaaaaaaaacacacataactagtgaaaagttaaatgcccccaaggattaagcaggaaatgttaaaaccttcagtgagtttcattttgcctgctaatgtccagtagtatgaagtaaatgctgtgtgaatgccatggtataaggactatttttctttctttcttttcttttcttttctttttttttttttgagacggagcctcgctctgttacccaggctggagtgcagtggcatgatctcggctcactgcaagctccacctcctgggttcacaccattctcctggctcagcctcccgagtagctgggactgcaggcgcccgccaccacgctcggctaattttttgtgtatttttagtagagacagggtttcaccatgttagttaggatggtctcaatctcctgacctcgtgatccgctgcctgccttggcctcccaaagtgctgggattacaggcatgagccacggcgcccagcccttactcgttttctctttgtatttttgtaccttcagagactagatcatctaatcaggttaaatagttttttcattatgtcagtaaatggtatgtttacttttgttgtgttaaaattctgaaatttaggccagatatggtgtctcatgcctgtaatcccagcactttgggaggccaaggtgggcggatcacttgaggccaggagttcgagaccaacctggccatgatggcgaaaccctgtctctactaaatatacaaaaatcagccagtgtggtggcgcatgcctgtggtctcagctacttgagaggctgaggcaggagaatcgcttgaacctgggtggtagaggttgcagtgaactgagatggtgccactgtactccagcctgggcgatggagcaagactctgtctcaaaaaaaaaaaaaattctgaaatttaaaactagaatcttgctggtttggaataggagtgtgtatattaccacagaaaacaaagggaccgggcacggtggctcacgcctgtaatcccagcacttcgggaggctgaggcgggtggatcacgaggtcaggagatcgagaccatcctggctaacacggtgaaaccccgtctctactaaaaaatacaaaaaattagccgggcgtggtggcgggcacctgtagtcccagctacttaggaggctgaggcaggagaatggcgtgaacccaggaggtggagcttgcagtgagctgagatcatgccactgcactccagtctgggcgacagagcaagattccgtctcaaaaaaaaaagaaaagaagttctgaccaatattcaccctcaaccttatttttataatagatgaccgtggaaaaagtacagggtattagcagattggaacaactttgtgaggaattttcagaagaggaacgagtaagagaactcaagcaagaaaagaaacgccaaaaacggaagaatagacgaaaaaataagtgtgtgtgtgatattcctactcccttacaaacagcagatgaaaaggaagtaagccaagagaaggtaatatttcttaatatcaactcttaagtgtgtat

SEQ ID NO: 17842 - DNA, 2300 bp, Homo sapien
gatgtaatgttaaagcgcaatgtgcaaaatttaaaataaagaatatttattaatacgcacagtaaaatttgctgtacatgtttctacttaatatgtggcagtactttagtatttgccacttgtggacttgatgcttggccagtgttgatgttagaaaggatgaaggacagagatacagattgttgaagacaaaaatcttcctttgatgagaattgacaactgagaaaagcagttttccagtctttttcttttgaggagatactttaaatacttgctaccatcttactttcccatgagactttaattgctattattaaaggttccctaatacataatacaaagtacttcttaaattcagaggttcatattgacctagaagaataaaaacaaaacttggcagaatttcaaccaagggttgcccgataagtaattgctcaacatgtaagactgggctcagaaggctgcactgagagctaaccacattgtgggctgtttaaatgcatgtgaggttcagccttatctggtatccagtaacaaagtcactgtggtcttacagtttactcctgtcacagctgtgagtactaaaggagagagttccccccaggagtagcattttgctgccatttaaaagatccagtcaaatagctccgtagacacatgatgcttagagatttgtgtctacatgtttataatacttggtggcagcataaaatcatgggacaatcagtacttctgtgcaatggaggtggagtgaattttatgtgcttttaatcagattttgagttagatttcaagtgggcagcagcagaaacttagattgaattttcatagtgccatttcttggatccacctcctgagttgtctttcaaatctaaatgttgtataggaatggggcagaggtaaaaggactcctcttggaccctttttgatttcatcccagaatctaaaaaatgactgtgggtctcccacagcccttggctcagaggtgaatcccctcttcaccactgttaagagtcaaatgttcttttgagatccctaaaaggaaaggctgatttagtttagttttaatctttgccattggggccaaacacaggataggcaaatgagtgtttttgaatgaataaaccagccacattcaccgcttactccattgcttgctggaagggagtcaggtggttattcaaagatgctttttctttaagagaatggctatattaagtacgcagttttcagcacttttagtaaagcgagctctactctgaacaaaaccagcaacccgagaagcgataatgatgtgaagacagttgaggagcacatccctggcgtaagactggactgcctgtggtccaaaccatgcttcaccacgtcagtatactcatctttaaaattaagatactaatatgtgccatctcagcgcggttgtgtagattagttactatatttaaaatgcctgctacaccataagcagcaaatgttagatactgttttaatctttggcatatatcatgatacatttgctacagtggggtaggggtaagcgtgggggtctagggcagttagacacagtgggccatttagggacagaataccccagtacacgtgtacttaggagtatttcagttctccgtggctagtaaagccaagggatcaggtagggtgaatgagtccttcccaaggtcacctagcattgatggcggagacactcggcgttttctgggccgaatcccttcccatcagccaccggcgggtttgggagggtgtggaagagtgttggagtcaccttaagtgcccttaattcctcatcctggcattagggttcaggagtagagaagggagactaagcgggacgcttcagtatgcgcccttggggctgaaggaacctccccgctaaacctcggtttccctgaccccaaagggcagcgctcactggggaagcggcgccgccagctgccaggacgctcccgcgcagcccggtttccctacgccggggcggggcagaggggcggaaggggcggggcggccgggccgcggcggcctccgactggatacggcggatcgccgggggcctgagggtggagtcccggccggaggcaggccgggactctggtgggtctaggcgcggatcggacccaagcaggtcggcggcggcggcaggagagcggccgggcgtcagctcctcgacccccgtgtcgggctagtccagcgaggcggacgggcggcgtgggcccatggccaggcccggcatggagcggtggcgcgaccggctggcgctggtgacgggggcctcggggggcatcggc

SEQ ID NO: 17843 - DNA, 2300 bp, Homo sapien
gacatataggaaaggctctgtagatggtaggtatcattgtggtcactgccagtggcagcttcggagggaggaggccgctgccggatatcaggcagccatcactgtgaagctggggttctgtggcctccatcctctcccctcgacctccccaagacctggcaaagctcagcccctgagaaggccctctctgttggcccagtgcatctctccaggtgtggtggagacacaattcgccttcaaactccacgacaaggaccctgagaaggcagctgccacctatgagcaaatgaaggtggggcctccctctgagcctggtgaagccactgactccctaaatgaaggcagagggaagctcggccttcagactccactcttccagcctttgtggctcctcctggagggttggggtggatgtgtggatgccacagagaagctcagtggtgggagggaatttgagtccattctgtccttgtctcaacccattcccctggtgctctcagtgtctcaaacccgaggatgtggccgaggctgttatctacgtcctcagcacccccgcacacatccaggtgagtctggccctgactgtctactcactggaggaacccaaccagccccagaggaggggagcagggagccctgcagggccaggggagagtgtcacagctgcctcatgccttgtaccttccacagattggagacatccagatgaggcccacggagcaggtgacctagtgactgtgggagctcctccttccctccccacccttcatggcttgcctcctgcctctggattttaggtgttgatttctggatcacgggataccacttcctgtccacaccccgaccaggggctagaaaatttgtttgagatttttatatcatcttgtcaaattgcttcagttgtaaatgtgaaaaatgggctggggaaaggaggtggtgtccctaattgttttacttgttaacttgttcttgtgcccctgggcacttggcctttgtctgctctcagtgtcttccctttgacatgggaaaggagttgtggccaaaatccccatcttcttgcacctcaacgtctgtggctcagggctggggtggcagagggaggccttcaccttatatctgtgttgttatccagggctccagacttcctcctctgcctgccccactgcaccctctcccccttatctatctccttctcggctccccagcccagtcttggcttcttgtcccctcctggggtcatccctccactctgactctgactatggcagcagaacaccagggcctggcccagtggatttcatggtgatcattaaaaaagaaaaatcgcaaccaatctgccttggcttcaggagtgtctttccattctttccccttctctgtgatcaggggtgcttgtgtctcagaatttcttccaggtaggtcccaggtgggtggattgggggcctcactcatgggagtatggattaccttaggtagcaggaatgggtttgtttgggccttgaaaacatgtaggagtttgacaaagcgaagacaggtgtgcaaggctgagaggtctggaagagcatgcagtgctgtgcgaacagctcagaacttaagcacaggagcaaggagccagatggggctgaagaggcagctccttcctgccttcctggatcgctggggggctgagtgctgcgcaagagtctcgccattacctgtgggacgggggcgttagtgagcttgtcagcaggaacacgacaggctcagagtcacttaggaagagaatcagcggcccgggataggaagtgactgttggggtcctgctggctggtgatgggctagtgagaagttctgggaaaaatcaccagcgccgggatgtggggagggaggcaacaagactgaattggttgaccaggaaggccaacccatctccttaaagggcccttcactggtgcgtgggtgaatgcggtccccggcctcctgggacctcgaggaacacaggacgcagccggtagtacggccagctcagctcgccgctcctctagccttgagggaggcgctgtgggggacagcctggcagccacgcatgcgcaaaacaccgtcaggaaggggccggggaggggcgggctcccgaacccggaagcgagggacccacgtgggagcctgggagcgggtggtcgtagctcggtagtccagttgtgggtaatcggggctgtttgttcctgtccgagagagctcggcggagacggctgtcgagtacccttcacctcggtgttgggagcctgggagcgaactgcggcgcgggttaccgctcccgggga

SEQ ID NO: 17844 - DNA, 2300 bp, Homo sapien
cgaggctgttatctacgtcctcagcacccccgcacacatccaggtgagtctggccctgactgtctactcactggaggaacccaaccagccccagaggaggggagcagggagccctgcagggccaggggagagtgtcacagctgcctcatgccttgtaccttccacagattggagacatccagatgaggcccacggagcaggtgacctagtgactgtgggagctcctccttccctccccacccttcatggcttgcctcctgcctctggattttaggtgttgatttctggatcacgggataccacttcctgtccacaccccgaccaggggctagaaaatttgtttgagatttttatatcatcttgtcaaattgcttcagttgtaaatgtgaaaaatgggctggggaaaggaggtggtgtccctaattgttttacttgttaacttgttcttgtgcccctgggcacttggcctttgtctgctctcagtgtcttccctttgacatgggaaaggagttgtggccaaaatccccatcttcttgcacctcaacgtctgtggctcagggctggggtggcagagggaggccttcaccttatatctgtgttgttatccagggctccagacttcctcctctgcctgccccactgcaccctctcccccttatctatctccttctcggctccccagcccagtcttggcttcttgtcccctcctggggtcatccctccactctgactctgactatggcagcagaacaccagggcctggcccagtggatttcatggtgatcattaaaaaagaaaaatcgcaaccaatctgccttggcttcaggagtgtctttccattctttccccttctctgtgatcaggggtgcttgtgtctcagaatttcttccaggtaggtcccaggtgggtggattgggggcctcactcatgggagtatggattaccttaggtagcaggaatgggtttgtttgggccttgaaaacatgtaggagtttgacaaagcgaagacaggtgtgcaaggctgagaggtctggaagagcatgcagtgctgtgcgaacagctcagaacttaagcacaggagcaaggagccagatggggctgaagaggcagctccttcctgccttcctggatcgctggggggctgagtgctgcgcaagagtctcgccattacctgtgggacgggggcgttagtgagcttgtcagcaggaacacgacaggctcagagtcacttaggaagagaatcagcggcccgggataggaagtgactgttggggtcctgctggctggtgatgggctagtgagaagttctgggaaaaatcaccagcgccgggatgtggggagggaggcaacaagactgaattggttgaccaggaaggccaacccatctccttaaagggcccttcactggtgcgtgggtgaatgcggtccccggcctcctgggacctcgaggaacacaggacgcagccggtagtacggccagctcagctcgccgctcctctagccttgagggaggcgctgtgggggacagcctggcagccacgcatgcgcaaaacaccgtcaggaaggggccggggaggggcgggctcccgaacccggaagcgagggacccacgtgggagcctgggagcgggtggtcgtagctcggtagtccagttgtgggtaatcggggctgtttgttcctgtccgagagagctcggcggagacggctgtcgagtacccttcacctcggtgttgggagcctgggagcgaactgcggcgcgggttaccgctcccggggacgcagcaaggggcatcgagtccctggcgggagctgcgccatggcattgctctcgaccgtccggggcgcgacctggggtcgcctcgtcacccgtcatttctcccatgcagcgcggcatggggagcggcctggtggggaggagctaagccgcttgctgctggatgacctggtgccgacctctcggctggagcttctgtttggcatgaccccgtgtctcctggctctgcaggccgcccgccgctctgtggcccggctcctgctccaggcgggtaaagctgggctgcaggggaagcgggccgagctgctccggatggccgaggcgcgggacattccagttctgcggcccagacggcagaaactggacacaatgtgccgctaccaggtccaccagggtgtctgcatggaggtgagcccgctgcggccccggccttggagagaggccggggaggcgagcccaggcgacgacccccagcagttgtggctcgtcctcgatgggatccaggatccccggaattttggggctg

SEQ ID NO: 17845 - DNA, 2300 bp, Homo sapien
ctgcgggtctccgcggcttcggtttccatgacatggtgacgccggcggcaaggcggggggctgcctgtgggccttgaggttgctgggcggtgcgggcggagtcagcaaaggggcgttggcaaagccctaaaaccccacggttccacggagcgcaagccagattctctgaagcagcttccccgttcgtccgaagagggtattccatctgcacagcgggattccctgccagcccaggttcactgcgactccgcttccccgagcatttcccccgtttcagcttccgtctggtctgcgcatcgcgagtggggtccaaaggccaattccacaataccagccagctccggagggacgcccactatcactgccttccatgctcgggccaaatgagccttcctagcaccccctcccccgaagcacaaaaacggggagcaaaagtgggaccgcccagcccaaccaccttcagactccacttcaggagaaatcctggttaagcccacccagaacaggtgtggtcgaaacggaatttagggtttgacttgagtgctccgaaaaactacagtaactcttccaggcgaaggcactctagaccaggatctgtcccccacgtgtgggaaaataggcccctgggggcggcggtcccgagttcctagccagagcgggattagggagttacgggttccctgaggagtgaactatggagggtgtggtttgctgttgtctggggaagccggtgccaacccgaagcctggacaggggaggactggaatcccggcacacgctgcccatgcactgcacgcccatctactgcagcctcttcgtggcgtcccggcaccccccctcctccttccctcttcccaacgccacgaccaccacccccagccgccgctggagcccccggtttcccgcctagtcgtttgtttttgtacgtaaaaggtgtctccggatcacagttttctcacaactttctcgccagggttgcaactcctcacccgaggcgcttcccggtccactccttcccccgcgccggcgccgcgcctccggtctccccgcccccatcaggaaaccgcccgaatcaactttgcaagagtgctctgcgggagacagacactcagctcgcccaggacccggaccctgtggactttggatggattgggggagggggcacagaaagagggacgggaggagggagattctgctgctaagagcctcctccccctccaaagatgtgcgctgcgcttgggacaaacttccaggtcaagaaagtacggggggacaatggcaacagccgctgaattgcaaagcccagcagtgcaggggagccgcctgggattccggacccggctgcaccccaaccttccacaaggctcggtcttggactacccccactctacagcagaactctggcctccgcctgcgcctattcccgctctctctctgtccctcccatcgaaacccacgccttaccggagcaggagggggcccaggcacggtgctgcccgccgtccgcgccgcgcggggccgcgggtgccgccgccactgatcctctaaacgcggtctccccgcactctcccgggccgggggatgcagaatggtttacagagggaccgcgaggcgctgattggtcgcaggccgcagtgacgtcggcgggcgctgcattaaggcgagggggcttccagagctcagccaacagccaggagcagtgaccaagccgccggagctggggagagacgcaccggggcggcgactgggccaggagaccagggactgagggacgcgcccggggagggccagcaacaagccgcggcccgggcgcgacagcggcggtccgcgccgagccgttccagccgccggcctactgtagccgctgcgccaggacatttttttttaaagctctccaagctgcccccctcctccccgactcctcccgctgcaaaagaaaaacaaaaaaaaaaaaggaaggaggctagaaaggaaacccagatttgccaccacaacgaaaaaaagaaggggaaaaggaaaaggagagaaagtcgagcgactgtggggttagacggaggcagacagagcgtgggccgagcgatgcggggctgtgcgcccaggcggccgcgagttgtgactggagccacgatgcacggccaggcgcggtgagaagccagcccgtagtgcctcccgaaggagcccgggcgcagggagggtcgccctgaggacacggaggccgccaggcaggccaagggccgaggtgactgggctggggcggtagggaaggagcgagtgcgcctggctgcctccgcacggagttg

SEQ ID NO: 17846 - DNA, 2300 bp, Homo sapien
gaatgcagttgctgcagagcttggctccgggaaagacagcagtccgggctacaacgcccgaggctgccctgtctcttccaagcttgaaggggcttctgggccgagtcaggctcagaccctttcttcccaggcacatgcagccaaacccagacccatagtttccaggatgcaagcagggccgcgtcccgggctcccagcgcgccagctggcggagaggcgggcgcccgcgggacttggctgccctctctagaagcagttcctaactgggcagcgaggccacgctaacctctgatccgaagctggccgggaagggcccgcggggaggtagcagcagaggcgtgggaggaaagtactcaccggaagaagtcgttcttgcagtagagtttgccttccctggagaagcacttctcggtcaggttgcatttacattcacagcactggacgcacttgacgtgccaggccctgtccagcacgttcaagagaaagcggtccaggatgggccttttgcagccggcacagtgaaccatggtctttggtttggtctgatgaggcccagagagagagaggggcaaagtagagcccaggggatgactcctgaagacaatcggcacgagctccccagtctctccaaaaagaggacacacactcggccgtgcaagccaaaactcgcaccaggaaatcaaagtagggtggaggaaacgaggctgatcggggcctgggggggcgtctcagtgaagtgtgcagccggggagtcccggggccccgggctggagcggcgccgcctgagctcccggggcgaggaaaagaagtctcaggcgggagagaatgcgacccttctgctcagagcccgcggaggagtgaaggtcagcgagaacggcggcgggaacggaaataaataaataaaaacggagaagaagaagacgacgactcgccgagctcgggttgcgaggaaagcgccgctgagttctccggggcttgaggtagagctgtcagaagtcaaagtgcatctgcttttgtcggggtatgagggcgactgtgtgcgtgccaggctgcccaccactgggatttcccccctctttttttaaaaaagggaaggaaagaacaaaaggagcagagaagctttggatcctaaactgccggcatcgcgccgcgggtctggacgcgccgagcgcccgcgctgggcctgggggagggggcgagggccgaccgcgggagaagggaaagaggggagggtaggaggaagatcttggtgttgattgctgttgttgcttaggtttccccgcttttggagaagtgtttgtgtcaatcgaaaacagagagggacaactccgtgcggaggcagccaggcgcactcgctccttccctaccgccccagcccagtcacctcggcccttggcctgcctggcggcctccgtgtcctcagggcgaccctccctgcgcccgggctccttcgggaggcactacgggctggcttctcaccgcgcctggccgtgcatcgtggctccagtcacaactcgcggccgcctgggcgcacagccccgcatcgctcggcccacgctctgtctgcctccgtctaaccccacagtcgctcgactttctctccttttccttttccccttctttttttcgttgtggtggcaaatctgggtttcctttctagcctccttccttttttttttttgtttttcttttgcagcgggaggagtcggggaggaggggggcagcttggagagctttaaaaaaaaatgtcctggcgcagcggctacagtaggccggcggctggaacggctcggcgcggaccgccgctgtcgcgcccgggccgcggcttgttgctggccctccccgggcgcgtccctcagtccctggtctcctggcccagtcgccgccccggtgcgtctctccccagctccggcggcttggtcactgctcctggctgttggctgagctctggaagccccctcgccttaatgcagcgcccgccgacgtcactgcggcctgcgaccaatcagcgcctcgcggtccctctgtaaaccattctgcatcccccggcccgggagagtgcggggagaccgcgtttagaggatcagtggcggcggcacccgcggccccgcgcggcgcggacggcgggcagcaccgtgcctgggccccctcctgctccggtaaggcgtgggtttcgatgggagggacagagagagagcgggaataggcgcaggcggaggccagagttctgctgtagagtgggggtagtccaagaccgagccttgtggaaggttggggtgcagccgggtccggaatcccag

SEQ ID NO: 17847 - DNA, 2300 bp, Homo sapien
attctcctctccctgttcctctcatctgctctcatctctacatcagtcagaggttgaaactcctcgccacagtccactctccatctccatccctaccccatcaataagcccttcccccaccatctcaagacactggaatgcaggtagggagaggcccccagagggagtatttgagaatttgctcccctgtcccttgcctcaactactctcagttgcatcttaattcctagaattacttcctcttccctccactcctggagtcctctttctaccttcagtataaggtcaggcaaacattttggggggccctgggatgtgtgtgacagtagaacggtcttgattccttgctaaaatggcttcccaagtcagtagggaccaggacagagaagggagagtaagtaaacaggtctatggcattttctgctgagtgtttgcccagcacagcccccaaattgaccagcagtgtcctgtttgcatgacagcttagaggtggtctctgcagtgactcacctccctttctcttttcttccttctctttacctcaaaggccaggtttctaagcattgtaagtacccaacatagcaaggggataggattgcaggaggtagtttcttaaatgtggggtgggagaaacatttttgtcctttgaagccccatggcaccttgtcaaggagcaaggaacacacttttgcttgggaggcccggacacaggcacaagactgcaattatagaggataaacgaaaaactgttctcttaggctaagctctcttatggatggtaaaaagccattttcttctcctgagtgccctgcctagcctggcattcttttccttccatgtctgagggggtttaccctcagacaggttctccttcccctctgcagccctggttgtcttcattcttcaagggccactttacagggacatggaacaggctccactaaagtggtgtcctcttattgctcttggccctgaggacatatgaagattgtgaaagtcagagatcctctcttcccttggttttcatgggagacagtagagagctgagggttccccagttgttcagctgtgggatccaactggcccgggctgtacccaaggggcactgccacagtgcaccactaacatctcttttctggatccttttgaggcagattctgtttagaggggtctaggtctctacaggcaacctccaacagataccataagaatagaccactttgtagtcacacttatcatcccttattgcagtttctgtttacatgtttgtctaccctcctaggctgattaccgttggggggagaatccaacttacttatcttgtatcttatctagcagtgcctgccacatagtgggcagtcagggaatgcttgatgaaggaaagaggatgtaaagcgattgtgtctttccgtgtgcggggtgcaattacatttatactattaagtctttatattttgagtctgtccctctaacggtagacctgtatttttctgcatttgtgcacctgcttaagctgcctgagcatgccctcatctctgaacagcaaagataatcaataccgaggggtatgcagtggagtaatccacaccccaccccctttcccttgctcaggcaagggtacttagagacgctactgaaactatctttagccacagcgattcctaagtattcccattaagaaagacgccagcagtccgccacacacttacacgtgcgtatccctgacataggattcccaaatcctggccgctgaagggcgggaggcgtgtgcccggcctcagactactataaattgcgaaatgacaaacctgctttgggtcccagtctctgcgtgcccgagtgcgcacccgcgattcgagcagcttaagccctactccctcctccttcccaaatcagccaccgtgggccacggctacgctatgctttattcctaagcgaatctcgcacaaatctcgaggcatattttgtacaaggggacactggccgcgcgcatcgcaatcgcatctcagcgacagaagcggtcacgtgccttggcgcgcttccgcaccgccccttcccgcgcactcgcacgcgcacgcgcacacgcgcccatacggctccaatcccttcaaccttctgcgcgcttccgccttcatgctagcaacgcccgcagtgacgcgcaggccccgccccctcccgcgcgcctcccggaagtggccggtccagagctgtggggtggcctccgcgcggtctctggcggagtcggggaatcggatcaaggcgagaggatccggcagggaaggagcttcggggccgggggt

SEQ ID NO: 17848 - DNA, 2300 bp, Homo sapien
ctccttatgttcggactaatggctcaccctacagtggagtgacagagaaggcagtgcattttggctactggagagggttatgagctgaaaaaccactgtgtctgatgaacatgttatccttgaattgtgacccctgacctttggttttccaggacttgcattgaagcactgtgtgatattagttatttgtgaaactcattttttgccattctaaaaaatcacataatccttctcttccctgcaaaagagttaggagtctgtgcgcttatagttttaaagaattgtaaatttctcagagtggaagaaggggctagatatggtgattattgggagaatgtcatttgttttcctttagaaaggtcaggggtgtcatgttgagaatccacagataatataaaaggaactatcatttaggttatgatatctatgatttagtccttgatgtagttctgggagctcctgataagctcatttcatattctttgcctagagactgataaagggaccaatcatgagacaaatatgataatatttattgagttcttaccatgcgtcaggcactgagtttagctctataatttaagttctaagagcctgggacacagtaagtcctcaaaaaaaaaattataaaattacctggaattagacagatttttataaaaaattatcaccattatcactacatgtgtcacctaatttaatcctcccaattgcgcaggaagttattactacttagccccattttacagataaggaaatcgaggggcaaattggttacataagtttgctcaaggtcatatagttagtaagtggaagaaacatgattcaaatgtaggctgtctgactccaagatgtacactctagtaaactctgtatgaatgtttcttaatctgagaaatggcgtacattcaaagaatttaaataataatttctgtttactgttttggcacttagtttttgtatttatatttttggcagctttgtgtcttaagtttatatatacctttttaaagaagcgctgaagacctgtcacgctttcctaaaatctttattttattgaagaaagtttttggaaactggtccctctatcttagaatcatacttgaaacacatggggcttttatgttctaccatggaacagattggataaactgtaaaaacctctacatatcagatgatactctaagcataagtcaaacaaagagccttaactagcactctgtctactataggatcaagttcagagtcctcatgaaagacgagacctttcctgattagtctcatctcccatcacttccttgtgcatcctgcactccagtgcgttttcccttcattatctatgagctgttgccttatgcttcataagtaaaattataatgtctccttctccacatgataccatcccccacctttccaggagagttaggtggttccatctccatacactgtgtactaatgaccttgtaatataattattggcatgcatatctaccactcccaccagaccatgaactcctcccagcaagtattaaattctatttgcctttccttagcccctggctcataatgagtgcttaataagtatttagtaaatagggcagacggatgtgatagattgtacattttttcagatcaggtttgggaaaactggtaattctctaacaccagttgaaatcttactgttcttcaagggccagagcaaatgctagctcttccttagagattagcttaaattcacttgccccacagttaaaatttctcactcttctgggttattgaaattttgtcaaagcacttctgatgcttccttgagttgtaatgttgtgagtctgtctttcccactagctccttttgttagggtaggacccgtgttctattcatctttgcttctcccttagcattttggagattgtagatgtgtaataaatatattgttgaattgagtgcagtaagagattttccccctgatgccacagtgcttaagttgaaatgaagtctatggcttggtattttctccaggtaatacccatttttctctttcttccctctcttctttgtagatgaggaaatatctgatgaggaagggtctggagatgaagattcagagggactgggtctggaggaatatgatgaggacgacctgggtgctgctgaggaacaggagtgtggtgatcacagggagagcaagaagagcagaagccactctgcaaaaacaccgggcttcagtgtccagagtatcagtgactttgagaaatttaccaagggaatggatgaccttgggagcagtgaggaggaggaag

SEQ ID NO: 17849 - DNA, 2300 bp, Homo sapien
cagggaagctcatctggtaggtaggctttgtgtttggtggcgagtggtgggggcaaggaggggggtgagagacagaaagaaagggggaaaaaaagaatggaaaacattacttatccaggtataggggaaacaggcaggcagacatgaaaaactacagctgtaactagcgtatgaatgaatagcatagaaaagaaatggaactagcaaatatacaagtagaaggattgactagttctcatatagaaggggattaaaacaggagagggctgtgagagtttgggaagagacatgtcacctctgccttttaagtcaatatcatttatttgtgtagctggccagatgctgctgaacagagagcagagatttacatatagtgcagcaagagattagttatttccatcctttggtttttctggtgctagaagaaagcaagagatgctcacaaggatgcaatgttgagcattggtaaattctagcagaaatggaacatacctgaaacaaatcagtaaagagtgtttctgttattcctatcaaatgctagaggacagtacaaggagcctggatcatgaaaagtgtacagtccgtgagacgtcatcctttttctgcttccttgtgtgttaaaggtttcttggaacaaatgtcacaaaagatggaaatagtgtctgtgatagtccatttgtgttgctataaaggaatacctgaggctggataatttataaagaaaagatgtttatttttggatcatggttctgcaggctctataagcatggcaactgcatctgttgggcttctgctaagggtctcaggaagcttatgatcttggaggaaggtgaagggggacccagcacatgacatggtgagagagggagcaagagagaggtgagagggagcaagagagaggtggggggcaaagtgctacactcttttttttttttttttttttttttttttttttagcaccgtgacatttttgagttaatttaagccacacctgggtgagagggccctgcacctagaagaaggtgttgggactcttggtggtgaagtatggcttatgctaaccatgcaggaccccatggggcagtgggaacttgatctcggagtcatggaactgtttgaccgccagctggcagcacttgctggccgcagtctccaccttcatgatctgggtggagtgggcctgtgtgtgatgccaggtgcccatgtctcactagcactggatgacagcacccatggtggtcaagtcctgatatccagtacatgttgtaggtgctgctacgggagtcgtagtgcagctagatgccagatttcttcacctgcaggggggatttctcaaacacctacctacagtagacaattttccctgaagactccttatcttctttagctgagataccaagtaccagagacgggacttgacaatgacatgattaggtgcaagattcgcataccatagaagggcagcatgtggcatttgggggtgggcaggcagcaacccaccaccttgtactcttgtagtgtgcccaaggcgttcatagcactctcttcatgcttgctttcacccacaagaggccacactctttcaaacaaccagatctagcataaactcagatcaaaggggagcaccaagccattcatgagggatccaccccatgacccaaacacctcacaccaggccccacctctaatgttaggaatcatatctcaacatgagatttagagaggacagacatccaaaccatatcagtgtcttagtatatatggcagtaaaatgagatatctagatttaatcaacagtgccatggcattcttccacatgtatcctgagtgcatttagattttggcttttctgtcttctttgagcaggcccaaagaaggaattgagacagttttgaaatacacagtagaccagctgttctcagcataatctagcagtatactagaatgtcttttgtagtttcccacagggagtttggctctttagcaatgtgtatctttacataatggctgtgcctaggtatactctgataccttcaatgaacctgaaaaaaattctgcctgtaagaaacttctgttcatttgtttgtttatgcctttccagattggcatggtagcttggaaaatgacctttaaaagtcctgaatatccagaaggccgagatatcattgttattggcaatgacatcacataccgaattgggtcctttgggcctcaagaggatttgttatttctcagagcttccgaacttgctagggcagaaggtattccacgcatctatgtatcagccaacagtggagcaa

SEQ ID NO: 17850 - DNA, 2300 bp, Homo sapien
gcagggagatatattcctgccactgcactgcagcctggtcaacagtgagaacccatctctaaaaattttttttccaaagtaactgagatatatataatctatgtttgtgtatatatataatatagtatcaaaattttttatgtatatacatgtataaatatatatttcaaaaatgtatatataggctgggcacggtggtggcttatgcctgtaatcccagtactttgcgaggccaaggcgggtggatcacctgaggtcacgagtacgagaccagcctggccaacatggtgaaaccccgtctctactaaaaatacaaaaattagctgggcgtggtggcaggcacctgtagtctcatctacttgggaggccaaggcaggagaattgcttgatcgagcaaacccaggaggcagaatttgcagtgagcagagatcacgccatcacactccagtctgggtgacaagagcgaaactccatctcaaaaaaaaagtgtgtatatatatatatatacacacacatatacatacacaaacacacgcacatatatacatatatatgtacacacacgcatgtgtgtgtggtttttttttttttttctttcgagacagagtttcacttttgtcgcccatgctagagtgtgatggcgcgatcttggctcaccacaacctctgcctcccgggttcaagcgattcccctgcctcagcctcccgagtagctgggattacaggcatgcaccactatgccccgctaattttgtttttttagtagagatggggtttctccatgttggtcagactggtctcgaactctcgacctcaggtgatatgcccgccttggcctctcaaagtgctgggattacaggcgtgagccaccgcgcccggccttaaatgtgttttatatataacatagtttttatataaaaacctcatggctatacatatagaaataaaacgtgcatatatatctctataagtatatattgatatatagtgtctgaatgtgtctttgccaaaatttatatgttgaggctgggcacggtggctcatgtctgtaacctcagcactttgggaggccgaggcgggcagatcacctgaggccaggagttcgagaccagcctgggcaacatggcgaaactccatctctactaaaaatacaaaaattagccgggtgtggtggtaggatcctgtaatcccagctactcaggtggttgaggcacgagaattgcttgaacctgggagatggaggttgcagtgacctgacattgtgctactgtactccagcctgggctacagagcgagactctgcctcacacacacacaaaatgtatatgttgaaatctaattaccactatgtcaagaagtggggcctttgggagttgagtagatcatggggcagagccctcatgaatgggattagtgcccttataaaataggctccaggcgaggcatggtggctcatgcctgtaatcccagcactttgggaggccgaggcaggcggatcatgaggtcaggagatcgagaccatcctggctaacatggtgaaaccccatctctactaaaaatacaaaaaattagccgggcgtggtggcgggcgcctctagtcccagctactctggaggctgagggaggagaatggtgtgaacccaggaggcagagcttgcagtgagccgagatctcaccactgcactccagactgggagagagagcgagactctgtctcaaaaaaaaaaaaaaaaaaaaaggctccaaagatctgcctttccccttccactctgtgaggacacaatgagaatcatgcaagcgagtaggacctggaggcagggaacccaagaactttctagaactaaatcaaatggaaacaagcacttcagttatgacaggaagcatcctcttcctttacataggatatacactgaataaatgactttgtaacttcatcatctttatttacacagggtgtataccaagtaacaatggaaatctctagagggtatttaaaccccagaaaattctgtaaccagacccttgagtggctggcttgcttgggccagctcccaacctgtagagtgtgctttcattttcttttttttattttttattttaattttttgattttttgaaatggagtctcgccctttagcccaggctggagtgcagtggtgcgatcttggctcattgaaacctttgcctcccgggttcaagcaattctcatgcctcagcctcccgagtagctgggactataggtgcccaccaccacgcccagctaattttttgtattttttagtagagatggggtttcactgt

SEQ ID NO: 17851 - DNA, 2300 bp, Homo sapien
tcaaatttccagcagcctttctttttctttctagaatttgacaagccgatcctaaaatttacatggaaacaaaggacctagaatagccaaaacacttttgaaaagggaatgtgaagttggaggtcttcatactacctgatttcaaaacctactataaagtcacagttatcaagaccatgtggcattgcttcaaggctaggcatataggtcaatggatcagaatttagagtccacaaagaaacctttaaatatatggtcacttgattttttgacagagacacatccttgatccaagatttctctgcttgtaaaaacccaatgtaaaacagtctctcacagtgtgtgtgctgcagtataactcagactgtgttgcagtcaagctagcgaatgcatcactgtctgccgggtaaactgctacgtcatccttggtgtttggcatgttacaatgctgggatcagtgtgggcttctagttggattttgtgccaggtatgtgtctacgttggacactgttcatggtagattaaaagggggatgctttaaatttggagaaatgaatgtggctttttatttcttgtattctaatattagagaaagattgtgagcagcagtgtctataaaagatctatatagatctctagctttgcttttggacctgggtatgctgtgttagtgtttggttgtcgtagaaagatccgtttggtgaaaggaagcataaactcgattattgagtgtgcctctttagtatatttttctgatatagttgagtgcaaaatagtctgccttatttttacacttagtgctttatttgcatttttgaatggtgaacttgtataacaagtttgttttgtagacacttaagtgtgtgtaaaattgagcagcttctcatctgtggctactgaactttcctgaacaaaggctgcagtgctctatttttgagacaggttattctgaagagacgtaaagatagaagggctcctctgtgtcagcttggttctttaaagggaaagtaaacttgactaacttaatgggcattggcacattgtggaagggatgatgtgaagtacagaccagagaacaaccaggacttccattttttattatagctggttgtcatgttgggtggcctgattgagttgctttcaaatttgggcaacttgagtctttacaacttaagttgcccgaatgtccttcagatcaatgtttgtttgttgtaatcatttatcttttatctgattatttaacttctatctatgctccaggtcatttgtgtacttctgtttttgaaggtttttctggaagcttaatatattctcagcgtggttggcatcagattgttaactatttctatccagcattttgatgggaataaattttttatggttcatgattcaggttagatttggtgtacaggcctgaggacttgcctcaggaagttgtctttctatagattctaagcctttagggtcttttgccattgatttttctcctaatacacagaatatcatgagcatctacttaagtaaaagctaaaaacaggaagatattacaagataacattcagctagtgtttatttctttaagagatctgtctgtggcaaatttgctttcatagtaatatatgtgtctcagtaagtagtctttctaggcaggatttttcttccctgcttaagggggttagacctccaaaatatttgtcagggtctcttttccttttaagggtttaacccacaatcttttctgtatccgttttgtaccagctccattcctattctcaagctttggtgcataaaaccttagtttaggtgtctatatataccactactttggcctgaaaattagaatcgtggctcacacttgattctaagttccctagtagtggcgtgtttcctttctacgtgcttactttcccacctgacctgcttttccccaccgtgcagtctgataattggtattatttgttttgattggatctcagaaattacctctttagaccgagctgtgctcctccctctggatttcatgagcccattattttcttggcttaattgtccttgtaaatttggtctttttgtcctgggctttccctgtcatgtgctcctggcagccaggagaggcagtggagcttttctccgttgactgtcagaagaaagtgactgttgttgaaaatgtttgctgcaactaaaggagagctgctaagatctactttctagttaaacaagcttttatatttctccccggctcctctcagttcccttgggaaatcaactaattgtgtgtgtaagctaagtgtgtggaggag

SEQ ID NO: 17852 - DNA, 2300 bp, Homo sapien
aaatacaaaaattagctggacttggtggtttgtgcctggagtcccagctattcgggaggctgaggcaggagaatggcttgaacctgggaggtggaggttgcagtgagctgagattgcaccacggcactccagcctgggcgacagagcgagactccatctcaaaaaaaaaaaaaaaagaatcctggggaaagaattcctattacttaagaggatctaggaaaggtaaaagaaaagtaagaggcaaccgcatggtttttagttcttttgaagtcactcccttcatgtcagcttcagagactgctgttatggaaaggcaaggcttccctcttcccaggccatttttttcggtgagtcaaatcaaacatcttactaaaccaggaagtcttgcccaattatctttttcctcccactacatttgtccaactgattgatatattagtgatataattattgtgaaatatgaatccctgttctgtaaagtccacatctttcctaagttctctgcttccaatccctgttatttaattaacttatttatttagagatggggtctttttacgttgccagtgctggggtgcagtggctattcacaggcgcaggcacagtacactacatatagacttgaactcctcgcctcaagccatccacccacctcagccttctgagtaggtgggactacagtccaggtacgtgccactgtgcttgaccctattattttaaaaatgggttgataaattcttagggaagccccacttagtgggattatgagggctcctagataaatattgttccttgttgaccaatctttccctctttctgcctcagcttccgccaagaacttcttacctgggcatgtatttctatcctattcactttttactctctggcgtggaacttcttcctaccaaactgtcatcctctgcacctctcctggccttcctcacaagtttgtaagcattaagaaggtgcgctgcatgcttcattaaattcctccttggaagggctgagttcaccctgttcttctcaagtgcaattttctccaagtttcttccctacgcaatgtttgtattgtgttgggaccccttccagttattattaattttcaacacacagctaccatgaaagtcttgctatgaagtaactggcaaaactagagacaccgactggcttcctctcaaaggctcggcgtgcccacagtggaggacgggaagcattctccaatccgaaaagtctggaacgctgtggcaactattttgctcagggcaggcagaagacggtggttctttggtacattccccttcttactgagcttcgtttactgaggcttctcctcaacacgccaggatccagcatgtataacacctttggagtgggctgtctcggggctgaggagcgaaacggggggctggttatggagttccagcatggggttacttagctcgcccagacttggaaaccagccagcgtgatgaggacaggtagtggacgcgattgcccaccccttgttaatgtgttaggattaaacagacaaacgggcccgcacaccgcctgccccattctagcccgccttaattctgggttccctttccccgcctctacaggccggctagtcctggcccctcacttgggacgcctctgtccctgatgcgaggcgcatgcgggaccgcttcccccactcccctctccgccaggaggaggagccgaggggttggccccgtacccggctgtggcagaaggggccgcgaaggccgggccaggggcgccacgactgcccagggcccgcccgcggcccgcccgcggcccgcccgccctctagccgctgggccccgaatggcagatccgcgctcggaccatcggcatcgcctcacatcgctccgccccgcgccgccctcccattggctgccgctgagccctcgggcccgcgcctcgccccccggcggccctggcagcgccgcagcccggagcggggtcggaggtgaacggcctggagtaaccccggacgtagtcacctcatggagctcgccggctgaggtgggagacaggggcggggcgggggcgggtcaggcccctgaagccccgccccttctccgtgtgccgggccggcctggtgctgcacgcctgtcagccatcgcccgagccgccggcgtctcctcccgcccagcagttcctccacgcaggggctccggaatcgcccgaccgcacacgttgccaccctgaggtgaggtgagggccggcccagaacctgtgaccggggacctggagaaactggggccaagggaggggcggcggcaggcaggggg

SEQ ID NO: 17853 - DNA, 2300 bp, Homo sapien
gcaatggagcccctctgccctaaccacctcctctgctaagagaagcaggcagccagaggcaagagggtggggaggatgaataaagatttccttggaccaataaagatgtgaggcatttatgttccctctagtcagtggcctcatttctctgctttctttctcatagcaaaacttttttaaaaagttttctagtctgggtgcagtggctcacacctgtaaccccagcaatttgggaggccaaggtgggcagattactggagctcaggagtttgagaccaacctgggcaacacagtgagactgtgtctctacaaaacatagcccatctccaaaataaaacaagaccaaagaagctgtagagtttgataaagatggggtagatctttattctcttttttttcttttcttttttttttttttgagacggagtttcgctcttgttgcccaggctggagtgcaatggtgcaatctcggctcactgcaacctccacctcccaggttcaagcgattctcctacctcagcctcccaagtagctgggattacaaacatgcgccaccatgcccagctaatttttgtactttcagtagagatggagtttctccatgttggtcaggctggtctcgaactcccgacctcaggtcatccacccgcctcagccacccaaagtgctgggattacaggcgtgagccaccgcgcccggcccttcattctcttttatgctccatctatctatgccatgacaaagtctacagattattacactagacactaaaaaaatacaaatttggaaaaatcttcaacaacagttatctgtctaggaaaaccttcccaagccacagacagtaccactcacctgccgtatttagctcttcctcacaacctctcagcccaatggtcatcagaatgttgtccaccaatactcacttcactattcaggagtgtgaagatgtgcaaaactcaataggtatgtctgtgctaatgtgagtttatatatataactggattaattctagagatcatatggttcagggccggctggggtggctcacggctgtaatcccagcactttgggaggccgatgggggcagatcacttgaggtcaggagttcgagaccagcctggccaacatggtgaaacctgtctctactaaaaatataaaaattagccggcagggtggcacacacatttaatcccagctattcaggagactgaggcaggagaatcacttgaacccaggagatgaaggttgcagtgagccaagattatgccactgcactccagcctgggcaacagaacgagactccatttcacaaaaaaaaaggccaggcacggtggctcatgcctgtaatcccagcacttcgggaggccgaggcaggtggatcacgagatcaggagattaagaccatcctgtctaacacggtgaaacgctgtctctactaaaaatacaaaaacattagccaggcatggtagtgggcgcctgtagtcccacctactcaggaggctgaggcaggagaatggcgtgaacctgggagacagagcttgcagtgagccgagatcgtgtcactacactccagcctgggcgaccgagcgagactctgcctcaaaaaaaaaagagatcatatggttcaggactctcaatttatagaagagaacatttagatcccaagaagtcaagtaattttctcaaggtgatagctcataaaagggcctgtactagaactcaattgtactgactcctagtcctagtttcctgctctatttctataattcctgctctagaaattatattccttactagaaatctccacatcttttcatgaaagtatataaatctctgtgcctgtgtcagtgagcatgcatgtaaatgtctacgtgtctatctgcaagtatttgtaaagcatatcaatgggcgtttatggccttcctgctcgagaaacctctaggtaatctagttctctatgtcggcaccggcagcgaagtcagaagaagtctgagtgaattattaataagcagaattagccctttctccaattagatctattcctgggtcttcaggaaatggggcaaaataatcagggtggaatcagagtctctcagggtcaaacttggttccagctgcgtgtggtgaaagcaactagaggcagagctatcaagggctgtgacagatgagcagtggtctgtctgcaatgagcatgtgctcaagctaacatggataccatcttggtcttcagcctaatcattgcatcctatgatgccaacaagaaaggtatgtaattctctagcctaatctcctggaaaata

SEQ ID NO: 17854 - DNA, 2300 bp, Homo sapien
ctggtctcgaacttctaacctcaagtgatccgcctgcctcggcctcccaaagtgatgggattacaggtgtgagccaccgctcccagcccacagtgatccttttacagcaaagctactcctttgctctcaacccttcgtcatattctgtcacttcccaataaaatccaaaccttaccagatgatacatgatctgccttgatttccatctaatttctctcatttgctgtgctccagccacactggtcttgccctttctccatgccaaacaaatccccatttcagggtcactgcacttgctgcttctcttctaggatagtttccctctagaaatccatgttgctccttctctcattaaatgatcagatatttatgtgcctccttagctaagaggccttccttatctaccctaactaagagaatccccatatcactcttatccttttatcctgatttatttttccataaaacttgccacattactgggcattatctatcatttagtaatgtgtatattgcttattgacagtcttccctactataatatgagctccatgaggcagagactttgttttgttcactgctgaattcccagcacctacaacaagcctactcactaaacatttgttgaattaatcttcaggatacatcaaatgtaaaatatcctatcatatatttattgatgtgatgcataggaaaatgtctggaagggtacataccaaaatgttaattatttatttaacctggtgggaggtggtttttctttccttttcttttctttttgagacagagtttcgctctcgttgcccaggctggagtggaatggcaagatcttggctcattgtaacctctgcccccagggttcaagcgattctactgcctcagcctccggagtagctgggattacaggtgcctgccaccacacccgcgtaattttttgtatttttagtagagacgggatttcaccatgttggtcaggctggtctagaactccagaccctgtgatccgcccgcctcggcctgccaaagtgctggaattacaggcgtgagccaccgcgcccggcagggcttttttttttttttttttttggaatgaacttgtattatgcatataccaaaaaagaatgaaagggttcacacaggtataaagtgtaagtgaattctaaaaaaaggttgggcaaatttatcaaaggcagacttctaaatagatgtaacagttatatagttcagataaaccatggtttgaattcccttccccagtacttcctagcagtgtgatcccaagttatttatgtcagtgcctagatttcttcacctggaaaatagggataacaacaggtgcctacctcacaagttttaaatgagaccgtatgtgtaacctgctttgtgcaatgtctggcatgcaataagtactcgacaaatggtagctattagaatcatcattaacagcagtaataagagatcttgggacatacctagccctcaagattgacatcagagtagaccaccacatcctctcatcattgcgcctcaatttgggcctctgaagcccaaagaggggatggttctttccaaagaagacaatttcgacgttccagaagcatctgattgaaacgcaccctcttcaccccttaaaatcagtctggttcatccacgagcagcccttcggggcccggactggagaggcagccacggctcgccgtccctgggcccagttccctcagcctcaatttcccttgctgcaacaggggtggagatgggaacgttatccccaaacccaggcagtcccggctcggcccgcctcaccgcactccggaggggaccaaacagccccacgcgccaggaagcctcaggcaacgggccacgcgccacacgggcaaagtgattactggtcggatcaaaagtcaggcaagcggctcagccccatcctcccagtcctcgggcacggggacagcagcaggcgcgcggcggggaccgggaaaaggccaagagggcggtggcgggcgctcagcacccggcgggggcctccacggccgaggggcggaggcggcgggcgcgcggcacgcggcgcgctcgccactgcgccgcccgggggcgcgcacgcaaagcccggaggcgcgcgcgaccggcggctctttggcgcggattagggggtctcggcgaggtgaggcgccaggcagcgctgggcgggcgggcgggtggcggagcgcgagcccctctagcgggactagggagaagcgggggccacgaggtgcggcgggggaggagtcgcgggctgcgggccccggcggcgggcttgacgc

SEQ ID NO: 17855 - DNA, 2300 bp, Homo sapien
catgttgctccttctctcattaaatgatcagatatttatgtgcctccttagctaagaggccttccttatctaccctaactaagagaatccccatatcactcttatccttttatcctgatttatttttccataaaacttgccacattactgggcattatctatcatttagtaatgtgtatattgcttattgacagtcttccctactataatatgagctccatgaggcagagactttgttttgttcactgctgaattcccagcacctacaacaagcctactcactaaacatttgttgaattaatcttcaggatacatcaaatgtaaaatatcctatcatatatttattgatgtgatgcataggaaaatgtctggaagggtacataccaaaatgttaattatttatttaacctggtgggaggtggtttttctttccttttcttttctttttgagacagagtttcgctctcgttgcccaggctggagtggaatggcaagatcttggctcattgtaacctctgcccccagggttcaagcgattctactgcctcagcctccggagtagctgggattacaggtgcctgccaccacacccgcgtaattttttgtatttttagtagagacgggatttcaccatgttggtcaggctggtctagaactccagaccctgtgatccgcccgcctcggcctgccaaagtgctggaattacaggcgtgagccaccgcgcccggcagggcttttttttttttttttttttggaatgaacttgtattatgcatataccaaaaaagaatgaaagggttcacacaggtataaagtgtaagtgaattctaaaaaaaggttgggcaaatttatcaaaggcagacttctaaatagatgtaacagttatatagttcagataaaccatggtttgaattcccttccccagtacttcctagcagtgtgatcccaagttatttatgtcagtgcctagatttcttcacctggaaaatagggataacaacaggtgcctacctcacaagttttaaatgagaccgtatgtgtaacctgctttgtgcaatgtctggcatgcaataagtactcgacaaatggtagctattagaatcatcattaacagcagtaataagagatcttgggacatacctagccctcaagattgacatcagagtagaccaccacatcctctcatcattgcgcctcaatttgggcctctgaagcccaaagaggggatggttctttccaaagaagacaatttcgacgttccagaagcatctgattgaaacgcaccctcttcaccccttaaaatcagtctggttcatccacgagcagcccttcggggcccggactggagaggcagccacggctcgccgtccctgggcccagttccctcagcctcaatttcccttgctgcaacaggggtggagatgggaacgttatccccaaacccaggcagtcccggctcggcccgcctcaccgcactccggaggggaccaaacagccccacgcgccaggaagcctcaggcaacgggccacgcgccacacgggcaaagtgattactggtcggatcaaaagtcaggcaagcggctcagccccatcctcccagtcctcgggcacggggacagcagcaggcgcgcggcggggaccgggaaaaggccaagagggcggtggcgggcgctcagcacccggcgggggcctccacggccgaggggcggaggcggcgggcgcgcggcacgcggcgcgctcgccactgcgccgcccgggggcgcgcacgcaaagcccggaggcgcgcgcgaccggcggctctttggcgcggattagggggtctcggcgaggtgaggcgccaggcagcgctgggcgggcgggcgggtggcggagcgcgagcccctctagcgggactagggagaagcgggggccacgaggtgcggcgggggaggagtcgcgggctgcgggccccggcggcgggcttgacgcggcaggctggcgggccggcgggcgggcagcggcgggcctcgccgctctgtgggggagggcggtgtggggccgggcctgaccccgggggcccgccccgcgtctgggcggtgccccagtgccccggcctcgccatttcccgctcagccctggagcgcgtagctctaccaagaatggccactgtgccagatgcccctgaccagcgttgcccatttgaatttcctagcaggccccccaaagtaggtatttcagtaccctgttagagctgaggcgcaggtaaaatgactggcccaggccggtcccaccccgtaaggatttgaacgttggctccacaa

SEQ ID NO: 17856 - DNA, 2300 bp, Homo sapien
cttggagaataattcatcactaagtgtgggcaacatttctgctaacgctgccatcaaagaactttccctttttggggtggggtaggtctccctttgctgtcctctcaggaaaagttgagctctgaagaaaaatgagtctagcaagggtgtattacgaacgcagcaatcaaataacagccaaatttactgaactttttcaatttgctaggtacccgtgggtaccaaggtgtggggattctttgaatcctcactcccacacttttggggcaagctgctttttcaaaagcaagcaagctctgaaagagtatgttacttgcgcagtgtcttacaagggatagctgtgtcatttcaaatacagatgtcaaggctggacgcagtggctcacgcctgtaatcccagcactttagcaggccgaggcaggcagatcacctgaagtcggcagttcgagatcagcctgaccaacatgtagaaaccctgtctctactaaaaatacaaaattagctgggcgtggtggcgtatgcctgtaatccagctacttgggaggctgaggcaagagaactgcttgaacccgggaggtggaggttgcggtgggctgagaacgcgctgttgcactctggcctgagcaacaagtgtgaaactccctctcaaaaaacaaaaacaaaaacagacgtccagtaaaggatgcacagtcaatagggactgatcaacactcgaaaaagcacagtaggaggccgggtgcggtggctcacgcctgtaatctcagcactttgggagtcccaggtgggcagataacctgaggtcaggagttcgagatcaacctggccaacacagcgaaaccccatctctactaaaaatacaaaaaatagccaggtgtggtggcgggcgcctgtaatcccaggtactcgggaggctgaggcaggagaatcgcttgaacctgggaggcagaagttgcagtgtgttgagatggcgccattgcactccagcctgggcgaaagaaacgccatctcaaaaaataaaaaaatagtagggccgggcgtggtggctcacgcctgtaatcccagcactttgggaggccgaggcggaaggatcacttgaggtcaggagttcgagaccagcctggccaacatggtgaaaccccacctctgctgaaaatacaaatattagctgggcgtggtggcccacgcctcaggcacgagaatcgcttgagcctgggaggcggagattgcagtgagccgcgatcgtgccactgcactgcagtacagcctaggagaaaaaaaaaaaaaggcaaaaaagcacaatattgcagtctgcagaatcttctttctccccctttcacaagagaccacattctgacaccaacttccgtggaaacactggcgctagctccaaactaacaatcaccaaattcgaatcagttaccgggagaaggaagtgaggcacttcgccgggcaggagtccacgttgggaggaggaaaggcgcaggctcccgagttgtggagccaacgttcaaatccttacggggtgggaccggcctgggccagtcattttacctgcgcctcagctctaacagggtactgaaatacctactttggggggcctgctaggaaattcaaatgggcaacgctggtcaggggcatctggcacagtggccattcttggtagagctacgcgctccagggctgagcgggaaatggcgaggccggggcactggggcaccgcccagacgcggggcgggcccccggggtcaggcccggccccacaccgccctcccccacagagcggcgaggcccgccgctgcccgcccgccggcccgccagcctgccgcgtcaagcccgccgccggggcccgcagcccgcgactcctcccccgccgcacctcgtggcccccgcttctccctagtcccgctagaggggctcgcgctccgccacccgcccgcccgcccagcgctgcctggcgcctcacctcgccgagaccccctaatccgcgccaaagagccgccggtcgcgcgcgcctccgggctttgcgtgcgcgcccccgggcggcgcagtggcgagcgcgccgcgtgccgcgcgcccgccgcctccgcccctcggccgtggaggcccccgccgggtgctgagcgcccgccaccgccctcttggccttttcccggtccccgccgcgcgcctgctgctgtccccgtgcccgaggactgggaggatggggctgagccgcttgcctgacttttgatccgaccagtaatcactttgcccgtgtggcgcgtggcccgttgcctgaggcttcctggcgcgtggggctgt

SEQ ID NO: 17857 - DNA, 2300 bp, Homo sapien
tccacctgcctggttcaagcaactctcatgcctcagcctcccgagtagctgggattataggcgcccgccaccacgccaagcaaatttttttgtatttttggtagagacggggttctcactatgttgcccaggctggtctgaaactcctgacctctggagattcatctgcctcagtctcccaaagtgctggagttacagacatgagctaccacacccagcctgctttcacttaatttagaagtgggggaaaatagacattcagaagtaatactcacaaagtagaatgtgaaaaatgccagataaaaagctgtgagtgggccgggtgcggtggctcatgcctgtaatcccagcacttggggaggctgaggtgggcagatcgcctgaggtcaggagttcgagaccagcctggccaacatggtgaaaccccgtctctactaaaaatacaaaaattagccaggcctggtggcccgcgcctgtaatcccagctaattgggaggctgaggcaggagactcgcttgaacccgggaggcggaagttgcagtgagctgagatcgtgccattgcattccagcctaggcaacgagagcgagacttagtctcaaaaaaaaaacaaaaacaaaaacaaaaagctgtgagtgtacagaagaaggattattttttgacttagtgtaaaatattattttatttctgcttcaaagaagatactttgggccaggcatggtggctcacacttgtaatcccagcactccagcacttttggaggccgaggtgggcggatcacttgaggccaagagttcgagaccagcctggccaacatggtgaaaccctgtctctcctaaaaatacaaaacaattagccaggtatggtggtggcacatgcttgtaatcccagcttctcaggaggctgaggcacaagacacaagaataaaaaatgagaaccaaatggagaatgagaatcccttgaacctgggaggcagaggttgcaatgagtactccagcctgggcaacagagccagactgtgtctccaaaaaaaaaagaaaaagagacttagtctgtcctccaagctggagtgcagtggtggctcactgcatcctcgacctcctaggcccaagcgttccacctcatcctcctgagtagctggaaccataagcatgggccactgtacccggctaacttttttttttttttttaagagatggggtctccctatgttgcccaggctggtcttgaactcctgggtcccagtaatcctcccacgtcagcctcccagagtgctgggattacaggcatgagccactgtgcctggccctgttacgtacttgttgaaagagtgaggaacaaatgtatgttgtaatagataggattttttggtttccagttacagaaactcgttcagtcttatgattaaagttgagtttattaaagtttattaaagagagagaaatgagagaagagttaaacagttgagccacctggggctagggatttcaacagccagagcacatggactgaattctttgaatgaattctagtgaataactaagctccaactgccttctgtcctttcatgtcttactcaagatccagatttctggaagaagagacctggttgctttagcttttgtcaggggtggggaatggggtattgtgattggcagccccaccagtatcacatgaaatgtgggagggtcagtttcccaaataaagatggcagctaaggagagaaatgatgctgagtagagaaagccaacagttgtttattagaaatatgtagcatttgcccctgccaccctcagtgccccatagacccagatccttcctcataaaaaagaaaaatatgtagcatttatagaggaccaggtaccatgctacattacttatatggattatgatatttgattataacatttaattctcacaactttggaaggtaggcactgttatacccactacagaggaagaaacaggttttcagaggtggaataatttttcaacattacaaagctaagatgtggcagagctgagtatgttgcatatcttctctttatcttgtccctttgaatgattttctgatccatgtgccacttttgtttgttcctagggagtcatcaagctttggtgtatgtgttggccggttctgaagtcttgaagaagctctgctgaggaagaccaaagcagcactcgttgccaattagggaatggaccgtttgggtccctttagcagtaagtacagtgggaacaagtctcaggtgacttattattattttttttttgagatggactctccctctgttgcccagg

SEQ ID NO: 17858 - DNA, 2300 bp, Homo sapien
tgattgcaccactgcactccatcctgaagcctatcttaaaaaaaaaagaagaaaaagtgacacctataaaaaaactcacatacttatagtccagaaatgtgctgtccagtaaggtagccactagccacatgtggctatctaaatttactaaaataaaattttaaattcacttccttagttacactagccatatttcgtgttcagtagcaacatgaggctagtggctactgtactggagagtggagatacagaacatgtccatcatcacacaaagttctactggacagtgctggtccagaagagaataacttcaaattgcatttttggtacaggcatgtataagcccgcacttccacattctgtaaaggcataaagcgcctccctaccccagggcatgtctgtacagtcattaaatggtctgactccagcacttctttctacttaatctctaaatctctaaatcttgacacgcacatcgcacacaacacaaactctattttagcccacctccctcttcactgactcttcatggtaggtttagttcccataatccatgaaaatgcctagctccttgtcactagagcttgttttggaaacctgcctacagtgtaacaagctggaatgtgaagagggatgcatctatttgtgttgctgagtcattgaattgactgaagcttcaaggactagggggtgctgagcagaaatgaaaacacacaatcctttctgttagagatttgctcttttcgtattggcatgtaaacaagtaagtcactaagtgaactgacgtcacaatttagttttaggaagatgcttttcccaggcacgatttgaactcagtggtttcctgaatctagcaaagtatgctgctttgttttctcttagattaattttgcctaattttaaagctttgattctctttttacgaagacgaaaataaatctctctagtctgggcctttttcgtttcccaggattatgattaaaattatcactaacttttagatagtccagcacgcaccggatgactctgaagccggttgggcagtggagatcgggaagaacatgaaaaagcttcaaagcttttggttgaggacatcgggagatgtaaaccccaaacgcgggttttacttctcccctccacccctccccgcaaacccatgcctactcgttttgactgctcagcaattctgaggccaaccatttgcaacggcgaggagcaggggctggtgagtcaaggactgggcatggagtcaggactcttaggtgccttgactcacggcagagccttgaggaagtcgctttgcctcccacgtgtctcccttcacctgccagaggcggaggggaggcggggctgtgctggaaaacgtccgtttcgcaccgacttatgttacagatgggcagacctgaattttaaaagaccctcagagtcacacagcaaatgagccctcaaatgcccgtgtcccgcctgcgctccggagaacccctgccctgcctcggggactcgggaggtgggtgtgggctccgagactcggacggcaccttggcgtggcgagagcaggtggagatgcgcacggaggttgcatgttcacctccgggtctcgggcgccacggctgcccgtacctgttccagcaagcgtcagccaggaactgccgcgctactgattttcccttcgctcttgggtcccaacccccgggctctccgggctagggaggcggtggggtggggtcgaggccgtcccgagccacccgcggcggcttcacacctgtatcggatttgctttctcgcctttaatcctctccaatcccgaaagcaccccagcagagcgcccccgcagcccgcctcgagcccggctcatacgcagacgctgactggggaagcgaggggtcgccggtgtgtgaggcagggtaagagaccaggggacctgcacggaggagcgctctaggggaggctgctgcctcgggagctagggcgcgcccggaccacaccgcacggcgcagaagcccagcgcgcacgcgcgccgcctgccgccccgcgcgtccccccgccccgcgtcgcgtccccccacctcgggagagggcggccaggcgcagggagcgtgcgcgcggcccgccccgggcgcgggcggagggaggaggaggcggcgcgcgcggcgcccagcccgcagaagccggtggccgcgcaggaggacggagccctaaccgcaacccgcgccgcgccgcgccgcgccggtaggggacccgcaggcccgggggtgggggttgtggggaaggtgttggggtggggcgggagggcgggacttc

SEQ ID NO: 17859 - DNA, 2300 bp, Homo sapien
cgtcagccaggaactgccgcgctactgattttcccttcgctcttgggtcccaacccccgggctctccgggctagggaggcggtggggtggggtcgaggccgtcccgagccacccgcggcggcttcacacctgtatcggatttgctttctcgcctttaatcctctccaatcccgaaagcaccccagcagagcgcccccgcagcccgcctcgagcccggctcatacgcagacgctgactggggaagcgaggggtcgccggtgtgtgaggcagggtaagagaccaggggacctgcacggaggagcgctctaggggaggctgctgcctcgggagctagggcgcgcccggaccacaccgcacggcgcagaagcccagcgcgcacgcgcgccgcctgccgccccgcgcgtccccccgccccgcgtcgcgtccccccacctcgggagagggcggccaggcgcagggagcgtgcgcgcggcccgccccgggcgcgggcggagggaggaggaggcggcgcgcgcggcgcccagcccgcagaagccggtggccgcgcaggaggacggagccctaaccgcaacccgcgccgcgccgcgccgcgccggtaggggacccgcaggcccgggggtgggggttgtggggaaggtgttggggtggggcgggagggcgggacttcgcgcttcgggtccctgggcgcagggggacccagaggcccgcgcgaccccgcctctggaaactttgtgccggcgcccccacctgctccctggcggtccttgactcttcggggcggcccgcggaggagaggcccgagaccttccgcagcgcaccctcgccggccctgagcgtgcgccccctgccgctcccccgccgcgccgcgccgcccccgcgaccctgtccctgtgccccggggctccagcagcctcggccgcgcctcctccgtcgccttccgaccccgctgaggccgcctactctcgctggcatccacccgctctggagcgcgccgccgctttttgcatctccccgaggtttctggtgcatggatagaagcaacttgactttcagcgatgccaagtgtccaacttgagtctttctctgcggtggtagatgggtgtgcgcggtgctaacatctgtctttttatttctcctaagtacccttgctccggagcgaagttgagttgttgtttgtaaagagggggtgcgtgctgtggccgccttaagtggattgtataactgtattttatttaggtggatgttgccagtggtaccagccagtgttatggtaactgggcatcccagaggctagggaaggaggagcgacttacaaatgcagttttaccatgcagagattttttttttttaaaaccaccttgtactttctatccagcaggacctccggacatttagtgtgtgttaactcgttagctgttcattatcgttttataagagaggggggtggagagcgttaccatcccgttttacagatgtaaaaacggaggcgaagagcaaactccgggtatccttagtaaccttaaaagaatagggaccaagagatttaacccagagtctcctggaattcctagtccctaaggccactcagaagtatgatggaatgttggaccgtcctccctgacattctacagatcacttaagagtcagagaggccgaggccagccggcagctccatgcctgagactcagctctgccacaaagttaagtaacactggacaagtcacagtttctctccgctcatttccttcctgctctctaaaaccaggggaacaaaggtgctgtattctttgcagagttgtgcgtgtgtctggaagctccactcccttgagctgcgatttggttattgttagttgttgtggactcataaaggcccccagtcttggttcccttgagaaatgcagggaaggaggcacccccacagtgaacgcctcttcttcgccagagacgcctgagaattcacatcagggacacttcacatcagggacaggccggggcagagaccctgacctgagggagggacgagggttgccacgaggaggtaggaaggagccctgcacaggaggcttgacacatgggccctattcctgcctccagctctgactcatcttctgacgcttgggggaggagaggtagttgcttggtatttttggctttccaccataaaactggagacagtttccttcattccaagtcgttttaatgtcactgttgaacgtgtgtgtcctgagttctcatctgaaagctttcatatcggttgactgcaggtatgaattctgtaataataattaatagaatggcat

SEQ ID NO: 17860 - DNA, 2300 bp, Homo sapien
tacttggaaatttgattagcatcttccagattttccacaatgaggagcgtcatccccagcagcttgaaggcctaattttgtgtttattaccacagtgactttgctttttaaaccagtaggattctgccagggaagacttggaagtggcaggagaccctgctctgctgtaggaaaggatgttctcagagtttctgccctgttcatagtttacatccaatgcacacacacgcagtttccttatgtgactgcgtccttgttcctcctcatgctgtgatttcacctgtggactgctctgtgtactcccatagcattaaccagtcatgggatgtgggctcccaaagcgaggcctagcctcgagtgaggaggcagctcccttcagagaagggcagtgtccaggagggacttgtggtctgttagcaccagtacacctggtgcctcagtcttccagggggaatgcagacagagccacagcactcacctctgcagcagttctcagacgtgcccccgacccgcagcctcacctcagaaaggcaactcttccagccccactctggagggacggaatcagaagctggggaaaggtccagcagtctgtgcgcacagccctctgggggattctgaggcatgctcaggtttgagagcccctgcattataatgatagaaatagttgtaaatggagccaggcacagtggctcatgcctgtaatcccagcaccttgggaggccaaggtgggtggatcacttgaggtcaggagtttgagaccagcctggccaatgtggcaaaactccgtctctacttaaagtacaaaaaatagcaacgtgtggtggtgcacgcctgtaatcccagctactcaggaggctgaggcaggagaatctcttgaacctgggaggtggaggttgcagtgagctgagattgcgccactgcactccagcctgggtgacagagccagactccatctcaatatatatatatatatatgtatgtataaataaatatatatgtatatttataaactttttttttcaaaaaccattttaaaatgttaaacatacgtgtcataggacccagcccttcactcctgggtattgaactgagagaggaaggcatatgtacgcacaaagacctgtacgtggatgctcatagcagctgtactcacaatacctttaaactagagacaacccaggttcatcagtaggtgaatggataaacagagtgtggtgtatctacacagcagagtacttaagaagtgagctgttgataacccagcgtcatgggtgaatgtctaagttatgcagagtgaaagaagccagaccaaaaaaaaaaaaaacccatatatatatatatatatatatatatacacacacacacacacacacacacacacacacacacactctatatatatatgtactatgtatatgtgtactatatatgtatatatacactatatatacacactatatacacactatatatatatatatatatatatatatatatatatatatatatatatatagtgtgtgtgtgtgtgtgtgtgtgtgtgtttagtttttgagacagagtcttgctctgttgcccaggctggagtgcagtggtgcaatttcggctccactgcaacctccacctcctcctgggttctagtgattctcctgcctcagccacccaagtagctgggattacaggtgtgtgccatcatgcccggataattttggtatttttagtagagacctgggtttctccacattggcaaggctggtctcgaactcctggcctcaagtgatccacccgcctcggcctcccaaagtgttgggattacaggcgtgagccaccacgcttggcctatatatatttatatgctataaatatataaaagtccattgatagaaaagtctagagtgcaaaccatagtgataagaaagatcagtggttgcctgggaatggggtaaagagcaagaaagggttggattattaaaaaaaatgaggaaattttgagggggatgatggatgtgtttattattatgatgtactggtgtctccattgtgtacatatgtcagaactcatcaggtaatgtacctgatcaagttgtatagcagtttatatgtcaagaacacctcaacagagctgtaaaaaaaacacgacaggtctgacagttacctgggaaaggtgggggaacaggtggtagaagaacacattttttatgatgttcatggtacttacataacataaatgaataaaatagggccaacatggaaaagaaaacaaaatgaaggaaaatgtcaaattgccatcctgaaca

SEQ ID NO: 17861 - DNA, 2300 bp, Homo sapien
tgctgtcatggttctgttatgaaatttaggccaggcgcagtggctcacgcctgtaatcccggtactttgggaggctgaggcgggcggatcgcctgaggtccggagttcaagcctggccaacatggagaaaccttgcctctactaaaaatacaaaattagctgggcgtggtggtgcacgcctgtaatcccagctactcacgaggctgaggcaggagaatcgcttgaacccgggaggcggaggttgcactgagctgagattgtgccattgcactcaagcctgggcaacaagagtgaaactccatctcaaaaaaaaacaaagaatttttaaggccaattagcagcctgcttgcattccagctccatgtggaagtggtgctgtccaggatggaagcgccgaggcctcaggaaaagcctgccaaaagctgtcccacttgtgttgttagaaacaccccactagccttgtggtgggcaaaagctccaaaggtgcccattcagagtgagctgcctcagtcaggaatggccagagacggtatcatcgggagcgagtgagaaaagcctttctctcctcggtgcctctctgtgcattcgggcacgcagaaggtcaagcagaagcctcagcaacagctgtttaatgaaaatgttccacacctttcttggagaacatggaaaagctgtaagatggagcaagacagaatttgtcctgagaggggaaaataaattatgtaaaagcagcaattatatagacaagaccaactttttcagtttaaaaataaaagtctaggtcagagggtctaaaccacacaaagtaaagcacacgagattgaaaaatctcttcataaagcgcataatcaacaattcagagagacgtgtgccctagattggtagttcttcccaggaataacacagctcttagccacttgggtttttcccctaattttatgcattcacattaaatggcaaagacaattccctactccaggaagcatgagccttttctatctaaaattcagtactgtttctggacaattttcttctacttcttctaagtcatgtatctatcccataaatatacatcttgatactttacactaggccgagagctccacattttcaccctgaattaattttcaggtttttctcacagatactgcaaagtcaggcagtgttggtccctatgcagtcatctttggaaatttggagagaggccactgcaaagagatttcattccactgcctttccaaatcttgtctgagaaaactccatggtcacagtctttgcatgcggcagaacaggtttgcagcgaaggctcccggggggaaggatattatcctaatacacaggatttgggcctctgtcaaaatgagcattcttcacggctgcagagtgcccaggcatgttttgggaaaaagtcttgagagtggacagaagtgaagggaaggagtagagaactggttcagttgtgacaaccaagtgggtaaaatctgccctcacctgcctgctactgtccaggggagatgggcagaatcttctccataaaaagcagaacatcagtttaatcgcaatttcctctttttattcatttcagacattaacaaactaaatgcagataaatgtattctacttcacaggacagtaagtgtcctagataaaaacaagcactggctccaagcagtcgcccattctagtcccgcaacggtaatctatttttcttcaaatgtcagttcttcacagtttcaatactgcagcagcaagttcttccttagatcaagaaagccgtggtccgtatttcagaaaatcttaagtagagataagtgagcaagcttctggtgccacgtgcagtttgggtgggacaattttacctgaagtcctgcagactggccgtggggatgacgggggccccgtcccttgcggtgttcttcatatcgattcagggaagcgaactgtgcagtgctcgcattctatttattggtccctgtcaccccgtggggtgtcacagaaaaaaaaaagtcaatgcttcacagaggagttgttcagagcaggtcaggcaggacgaggccaggaggctttggttcgacacagttgatccagaagttggcacagctggcgtgatactggtgccctccataggccagcttgaaactgtctgtttctgagttgaatgcctgccagaaataaacagagatgtggggcaagtcaggctttttctgcatctcagagcttttcagcaaccaacatgtacatctatctctccaggtcacagaggctgaggccaaaatggcacacacataaaagctgagcgg

SEQ ID NO: 17862 - DNA, 2300 bp, Homo sapien
atatcccctttcccagggattttattgctttggggtttctaacctgaaaaacagtaatattctcaaggtttttttactgttaccatactctaaaatggagaaaatattttccatgtttggcctacgcttgttgccacatttcattggtccttctagaaaatgttttcttaaaaataagaatggttcaaaccttactttgttagacacaccccctaaagtaacatgttttaagaatttgctttatgtactatgagtgaaaaaaaaaggctgagggttgcttcatcatacagaacacatactgcaaacctaacatgctctgcaattagaggatggagtacccaatttttctttctttgagactaggtcttgctctgtcacccaggctggagtgcagtgatgtgatcacagctcactgcagcctctacctcccaggatcaactgatcctcacactttagcctcctgagtagctgggactacaggagcccaccaccgtgcccggctaatttttgtattttttggtaaagatggggttttgccatgttgcctaggctggtcatgaactactagcctcaagcaatccacccaccttggcctcccaaagtgctggtactacaggtgtgagccaccgtgcccggatgagtacccaatttcaaactcaaatcaaattccatcctcaagacttcctgctattaatacagaacactttccattatgcagattatcaatttaaatacagtttacatttactgtgctcagaagtccatttcaatattatttgatgatatatatctaataactagttattacataactagatagttatagttaactctttccacaacactcaactcttaggtctttttccccaccttccccttctcttctcttcaatgtaatgcctagtagagacagattctctacaataaaatatgatcagtttcttcaagagaagaaactgcaataaatgttctttctccctatcatgtaaagtagtgtaaggtttattcttatttaagtttaattttctatttcaatccaatgccatgttaaaaacttacattaatggaattataagaaacaaaggctaaaatgtaccaatactttctcaggagacaagtgtttgacgaaacaaaacaaaaggggaaaaccctctagtcttaggatactattgctttaaacttggtatcagccaggtatttctttggtctaaccctgaaaaagtacaaattacacacatccccacactttcaaaatatgccaaagaattatttattaacacaagacttacagatcacaaaagagagtgatacagaagagctggaaaagaagtcatcagaataagcatgcagatcagtatttgcagaggaatatactaaagtaaatttgaaggcacattcacacagaaaatgtctaaattgaaaaaaagacatcagaaaagcagccaaaaaaaaaaaaaggtgctaattaaaatacaaagattttcaatgtcaaagaagagctactttacagataggtaggtaggtagctacagaagtcttgctaaccctttgaaaatgtcacagatgagggtcagctcttgctgccaataaaaccatatgattttaatgactgcacgtcaagatgcttcagtgccgcagattaaatttagtcagggggaaaaaacagcctagttgaaattatatgcagcaaggcctcaaagggttaaatgtaataatacgcagagaaatcaggcaatgttatcagtattatctaccttccatacaaatgattatagcaagagttaaaagagacagtatccccttcagagttaagttagggcttctaaacaggattaaggtccgcagatagcaatctaccaggttttattctctcttcatcagctcacttcttatttctccaacaagaagtacctttaaccctcaaactaagagagcaagagatactgtggtgaacatgaggataaaataaaactacattactttgaataagtccttgccatttaccctctacaatacattgatgcagcaattttgcacaacagcaatatagcgcattggtcagacatcaaccccttttaacaaccgctctaaagggatactgctcctttctgacaggaggtttacagatcaatgggaggaaacaatctgcttttaagaatatcctccaactgaagagttagcttgaacattacaggctccaagctgaggatgttccaaacatacataaaagaacatgagcacagaagattattttaacaggtcagtaagaacaagcttggtcaaaaaaaccaacctccaaa

SEQ ID NO: 17863 - DNA, 2300 bp, Homo sapien
ttgagacagaatctctctctgtcccccaggctggagtgcagcggtgggatcttggctcactgcaagctccgcctcccaggttcaaacaattcttgtgcctcagcctcccgagtagctgggattacaggcatgtgcctccatgcccagctaatttttctgtattttaagtagagatgggatttctccatgttggccaggcttgtcttgaactcctcctggcctcaagtgatacaccctccttggtcttccaaagtgctgggattacaggtgtgagccactgtgttcggccttggcataactatatttacatttggtttatctctggtttttattacctggtatagcctagtggattttatggtagaccttcagatgctattagaaaactgagatcatctgtatcctgatgctgtacctgagtgatgataacattactatgataataaagaatatagaaaccttttaagaatcacaggccttgggccgggtgctgtagctcacgcctgtaatcccagcactttgggaggccgaggcaggtggatcagccgaggtcaggagttcaaaaccagcctacgtgacgtggtgaaaccccgtctctactaaaaatacaaaaattagccgggcgtggtggcaggtgcctgtaatcccagctacttgggaggctgaggcaggagaatcgcttgaacctgggaggtggaggttgcagtgaactgagatcacaccattgtactccagcctgggcgacaataatgaaactctgtctcaaaaaaaaaagaatcataggcctaaatttttatcaatgtcttaactgagtctgtttaattatttatgagaagtacataagtacccactctatttaaccagaatataaaaataaacaaatctgagacacatgtttctcaggatctcttgagagctgtgtcatgggcaaaagaaattttatttaaaaaataaataaataaataaacaattccgtcagttaccccatcctcagagtagcataatgtaaactaaagtctaagtcataccctctaaaactttatataatagagttggtatttattcaaatccttttgaattttaataaataaaaataagtgctcattgatacagtgagacagctgatttctagaaaagctcaagtgctcaaggactttttttctgtgagattcagcttattagagactatagggaggagctgctttacaatgtgccccacctagaatgctttgcaaataaatagataccttttcaaaaattttcatcaaagttcccttcaaattaatgccttcatttacttgagcaagaccacatagtatctaatgttattcttaaagtgcctggctaaaccaagtgttgtacatcctgaatattagatgtaggatttttcataatactttattggtacctctgatttttttaatgggtaacatgtttatctttaaagggccactgttttaatatgcctctcttcaagaacctctagccctatttcttattgtattgtctgcttggctggctagctgtgggaacaaaaagtcttgagaggagtacttttagccagttgtaggatctagagctaagagagatcccacactaaaagcatgagcaaatgaaaatggtaccgtcaggtactttcagttcgatttctatttatttcagtatcactagacttcagtgtggaaataaatgtgtagttcgatagggtttaaagtatgtaaacattattaagtaatgtcaagtcagtggagaaaagtcagtaaaattatgcttgcagtttaatatactgtgtattatatggttttcagttcagcattcccatttgtttggtggtattttttctttcaggagaaagctttgcagaattcagatctgcaggaactgatgatggtttcaccgattttaaaacagccgatagtgtatcaccactagagccaccaacaaaagacaaaacttttccaccatccttcccctcaggaactatacaacagaaacaacaaacacaagtgaaaaaccctctgaacttagcagacctagatatgttttcctcagttaattgcagcagcgagaaaccattgtctttttcagctgtgtttagcacatcaaaatcagtttctacaccacagtcaacaggttctgctgctactatgacagcattggcagcaacaaaaacttctagtttggctgatgattttggagaattcagcctttttggggaatattctggtctagcacctgttggggagcaggatgactttgcagattttatggctttcagtaatagctctatttcatctgag

SEQ ID NO: 17864 - DNA, 2300 bp, Homo sapien
gaccaagagatgatgatgatgttactggccagaggcctccctaggagttagtggaagtgttatcttatgtaggttgtcagatttcaaaggtagtgctccttccactacactcttccacctactgtctcatagaattctttagaatcacagtagataattatgtttacattctctaaaatctctgaagtctctcaagtcctatacaaatgtgcagtgattgaattatttcaacgtttacttttttttttttttgagacagagtcttgcactgtcatccaggctggagtgcagtggcgtgatttcagctcactgcaacctccgcctcctgggttcaagtgattctcctgcctcagcctcccaagtagctgaaattacaggtgcccgccaccacgcctggctaattttttgtatttttagtagagatggggtttcattatgtgggtcaggctggtcttgaactcctgacctcatggtctgcctgccttggcctcccaaagtgctgggattacaggcttgagccatggtgcctggccacaatgtttacattatacgtggcagggcctccctttagaatatgggggtgagctgggcaccgtggctcacttctgtaatcccagcactttgggaggctgaggtgggtagatcacctcaggtcaggagttcgagaccagcctgtctaacatggcgaaaccccgtctctactaaaaatacaaaaattagccaggcttggtggcgggcgcctataatctcagctactaaggaggctgaggcaggagaattgcttgaacctgggaggcagaggttgcagtgagctgagatcatgccagtacactacagcctgggtgacagagtgagattccatctcaaaaaaaaaaaaaaaaaaaagaatatgggggtggagatggatggttaaaaagattagacatatacagttatatacaaataatccttcatgctctttgtttaggcccttccttggaggagaagttcctagtatcttgtgatataagtacatctgggcaggaacaaattaaattaaatacttctgaagttggccacaaagccctaggcccaggttccagtaagaagtatcccagtttaatggccagtaacggggttgctgtagatggatgtgtaagtggtaccaccactgcagaggcagaaaatacttcagatcaaaacctgtcaattgaagagagtggtgagctcgtgaagcattcagcaaaaaacttgtttaaccaaatgttgctcaaatgctaacaccttaagcattaatcttcaaatgaatgctgcttgattttgctaatcgaaattttgcttgaaatatatttaatgcattcctttctccaattaacccctaagattttgctctgaattctttcaacacactgttactcctttttaaaaatgattttgataactggttttcttaattggaatcatttctgatttaaaattttctttccttttattttataaaaactctcttttttccccccttatactttctgttcttccataaaggttgaaaagttaaaatgtaactggaaaagtcaccaatgagaatatagttttggtttctctaaaataaatcatatgcaccactgcctaaaagatctaaattgtataaattcaaccctcagaaatgaattagaatgtgggcagccaaggaggcaaacttttgggaggatattttattggacagaaagcccccaaaagtcctatatatttaagacagcagtatcatatgtaggttaaaaaacaatgaaactttgcaaagaagcattagtaaaaactgcaagtaaagcttggacaattaaatatttttagatacataattttaaactatcatctatcatgtttttttccttaatttgtaatacatgttaaatggtgcaaggcttatatgatttagagtattgatttgatacattttagtttttgtataatttactctttagaacatagttaacgtacaagagttgcttaaaaaccaaatattttattctgaatcggaggcaggggggaccaagtattttaattgtattggtgactttttttagtgtctccagccagtgctctttataaaaaaccatgactcagtgtgatttcgccatcttctccatggaccactatatacattaatgtttcttaccttctaggtgtgggagtatttccctcacaggatcctgctcagcccagaatgcctccttggatttacaatgagagtttggttccaggtaaaaaagcttctttacccaggattcccatctggatattttggtttaaatattgtaaat

SEQ ID NO: 17865 - DNA, 2300 bp, Homo sapien
cacttccttttcaaagcagatcccttttgctactttgttttgttttgttttgttttgagacagagtctccttctgtcattctgtctgctcaggctggagtgcagtggggcaatctcagctcactgcaacctccgcctcctgggttcaagcaatgctcatgtctcagcctactggatagctgggattacaggcacatgccaccacgcctggctaatttttgtatttttagtaaagatggggttttgtcatgttgaccaggctggtcttgaactcctggcctcaagtgatccgcctgccttggcctcccaaagtgctgggattacaggcatgcaccacctcatctggcccccttttgctccttcgcgtgttaatcccatttccttaaaaaccttataaatcactaggtatgtattttgtctcttaaattttttctccctagggtctcttcccctttctttgttgaaactaactcacttaacaatcaccatttttgaaagcagtgatttattttttaatcttcattctcaccgctattctacagcattagacactggtaactacttccttgttgaaatgtggtccttcttcagttataactctcagttataagcactcccttggttttcaatgaccatttcctactcagttttcactgcaagaattctccaagtttgtccttagttgttttgttactggatatatgcccttggctatttcatctacaaccagagcttaatttttttttttttttgaaacggagtttcactcttgttgcccaggctgaagtgcaatggcgcgatcttggctcactgcaacctccgcctcctgggttcaagtgattctcctgcctcacagcctcctgagtagctggaattgcaggcatgcaccaccatgcccagctaattttgtatttttagtagagatggggtttctccatgttggtcaggctggtctggaactcccaacctcaggtgatccacctaccttggcctcccaaagtgctgggattacagacgtgagccactgcgcctggccagagcttaactttttaacctttatttatttatttatttgagacggaatctcactctgtcgcccaggcttaacctttattcaaaagagcctaggccaagtgccgtagctcatgtctgtaaccccagcactttgggaggccaaggcaggcagatcatgaggccaggagttcaagaccagcctggtcatcatggtgaaaccctgtctctactgaaaatacaataattagccaggtttggtagtgctcgcctgtagtcccagctacataggaggctgaggcagtagaatcacttgagcctggcaggcggaggttgcagtgagctgagatcatgccatcacactccaacctggacgacaagagcaaactccgtctcaaaaaaataaaataaaaataaagttgtcagcttaaaaaaaaccttagaagagagctttcttacgctctaaaatgaggacttattgtttaatgggtacagagtttctgtttgggatgatggaaaggttctggaaatggatagtggtaatggttgacaatattgtgaatgtccttaattatgccatggaattatacacttaaaaatggttaaaaatgatagaattttatgttatgtatatgttaccacaataacaataaaacctctgacaacttcatataatattcaaaataaaatgaaacattttaaaggcccttgaccaggtgcggtggctcacacctgtaatcccagcactttgggaggccgaggcgggtggatcacctgaggtcaggagtttgagaccagcctggccaacatggtgaaaccctgcctctactaaaaatacaaaaaattagccagtcgtggtggcgggtgcctgtaatcccagctactcaggaggctgaggcaggagaattgcttgaacacaggaggtggaggctgcagtgagccaagatcgcgccattgcactcaagcctgggcaacaagagcgaaactccatctcacaaaaataaataaataaataaaaataaaaataaaggccctgtacaatctgcttgcttttaaatcatatagttaacatttaacctacattcatttctccaaacatccctgcatctctgcctcagagcttttgctcaaaatatatagtgtgcttctattttccttcaagattcagctccagagctacttccataaaacttctcaagatatagcccattaaaattcatctttttcttctcatctctattaataatttggacctcgcttatagcagttagcacatttaccctgtggtat

SEQ ID NO: 17866 - DNA, 2300 bp, Homo sapien
gcctttataaacttttttgattcttgtcataacacttagcctaaaatgcaaatgtacagctgtagaaaaatactttatttctttatatccttattctagaagctttttttctattaatttttgtttgtttgttttgttttactatttacttctaaaacttttttgttaaaaaccatggcacaaacacacacattatgctaggcatacaaaaggtcaggatcatcagtctcactgtcttccacccccacttctcatcccaccattgtatctgctgtctgtggctgaccaaaacatcatcatgtagcacatgactagtgtggcaagtgctctgttagatgtaaggccatgatgctaaagcatcacaagagggcatctaacccagattggggatgtcatggaaggccgacatcctgagttgaatcctgcaaatgtaaaaaccaataggcaaagaagaggaacaaaaaggattccaggacaaactgaggtcacatctatgatccttgactttattgtgtctgtttaaagtatctacagtaacctgtatcaacttagtcagtgtattaatactaaatttagctccttcaaagcagttggaactatgtgctacataaatttcagcttcacacaaggaagggaaggagtgaaattagtgaacaggcagttacagcaaaagaaaaaacataaaaattgaatagctggctctggtgaaatgagcaaggactttagagtcaaactggcctggatttgaatcctgatcctcattgcttgtagctgtatgatctggacaaatgacagtagctgtttctaaccttgattttctcatctgtaagatgccaattgtaactcctaaggatactgaggattttttaaaatgcgtgtacagttcctgaccagtggtttgtgcctaataacttattacaaattattacccagtaaaaaccttgagacaagagtgaaaacgtaaagctaattaatccattacttgttagcaagcaaactacgtgcttgagaaaattactcaactttcatgttttacttccagacagtagtttgattaaaagaaaaaaaaaaatcacagcccaggcatgtggctcacaccctggcacttggaggccgaggtgggagcatagcttgagcctagcagtttgaaactagcctgggcaacatagatcctatctctacaaaaaaaaaaaaaaaaaaaaaaaaattggcccggtgtggtggtgcatgcctgcggtcccagctactcaggaggctgaggcgagaggatcgcttgagccagggaggctgaggctgctgtgagccatgatcatgccactgcactccagcctggacaacagagcaagaccctgtctcaaaaaaaaaaaaaaatcagtaaaaaatatgccgaaatagcttcagagtaattatgaattgccttccaaaaaccactgttttgcacttgcctgcaagaataggaaaaacaaaaggactgtaaggtggcaggatggcagaaccaaacaagagtagtacaccttggagttttttcgaaatatgggttgggtttttgggctcttggttgatttaaaataaaatttaaatgccttcagcgtctgtgataggtgccaacatgaagctaccgagttccagagaaagaggggagagctgatcactcatcagtgctgcgagactatcaaagggcccttcaggacctatctgttctttgtgtgtaaagagtaacaataaaagaacaccagtgtacccaccgtatagtttaaaaatcaggactcagcctactctttccactaaccgcgatcatggttttcaaacggaggaccaacggcgctttgccactgggccgccagctgggccctgcagagggcctaccagacaatgaatcagctcccttggagaggcgcccgcgaccgccccaccagcccgagagctagaattgaatctgggggacccctgcggcgccgggtcacgtgccgtgggcgcgccacgcctccccgagggccgggggagtcacgtgggcgcgaggccccgccccatcgcccggtccgcggcgaggtggggcctggtgtttgacccggaagtggctgtgttcagctgacagctgctgataaggtggcggcggcgaaggcagcggcaggtcgggagcaagatggcgctgcggccaggagctggttctggtggcggcggggccgcgggagctggcgcggggtccgccgggggaggcgggtaggtgtgaagagccgggcgggagcccgctggcctccgcgggggcggcgaggggcgcttggcagttatggcagttttct

SEQ ID NO: 17867 - DNA, 2300 bp, Homo sapien
tgactacataatttttaaggaaaattagttaaacagtaatatgtaaggtgaattgtaatgggaaagatggaaagtaaggaaaccaatcaggcttttaaactggggtaggcagagatgaggaagaaataagggcagcagccttagtggtgagacattaagtatagttggaggctagaagggaaaagtttgcaagtacctggtgactatagaatggtttgctttagtggttaagaccatggactcaggagccaggctacttgggtagttctagctccaccactatagctttacacaacttaacctctcttccacattttccttgtctgtaaaatgggataataatatctacctcatagagctgttttactattaattcattagtacaagcatagtacttattatataatagtgcttggcacatagtaaatgctaaatgtattttattaatattcttaagagaatcatttggtactaggaaatttaaggttttccaggatattccttggagattatacaccagaggttttcagccatgtttgagctttgggaggtctgcaaaccctctaaaattatacgtaagatttttgtgtgaatgagtagttacttattagaaagtttcttagctttcattagattccaaaagagatgtttaagccatcataaaaaggctaagaaactcggccaggcgtggtggctcaccggtgtaatcccagcactttgggaggccgaagcgggcggatcatcaggtcagcagttcgagaccagcctgaccaacatggtgaaaccccatctctactaaaaatacaaaaaagttagccaggcgtggtggtgcacacctgtaatcccagctactcaggaggctgaggcaggagaatcgcttgaacctgggaggcagaggttgcagtgagccaagattgcaccactgtattccagcctgggcaacatagcaagactctgtctcaaaaaaaaaagaaaaaaaaaggctaagaaactctaatatgaacagttaaaaagatagctggtttgagagagagtaagggtttgatagtgtaaatgtaaaaataatttgtttagattcacagacatcagatgtagtaaaaaaaaaaatgtttacttagagatagtagtagagattcaactcagtaaaataaagattatattgaaagaactgagaaccaaggactaagcttggggagagcaccagagttaggataaataatgagttaatgagggatgaagtaccacctgtggggttcagtgtacaccattggggtgatgggtacactaaaagcccagatttccccagtatgcaatatatctgtgtaacacaaatgcacctgtacccctaaatccataagaataaaaaaattaatttcaccccaaaaaacccaatgaattaaaaagataattatttcattttaagcagaataaaaaaaggttttgaggcacagaagtcaagagatgattatttcaaagttgaggcatctgttaccatagtggggtgtagggggattgattagacaacattattggaattagcaagatggagaatatatttcaagttgagtggaaataaccaattggagagaatggtgacgaagatggaggcagaattagaccactagcccaagaaatttggccaagaaagtacactaaattgaattgggttcttaaaagctacaatcaaattatgaaataatgaccaattgtattcttgattgagttatgtatgccaatttttgtcttcttttagggtttcaatccacctgttcttgtttttgttcagtccattgaaagggctaaagaactttttcatgagctcatatatgaaggtattaatgtggatgttattcatgcagagagaacacaacaacaggtaaagtcaaatatatactttgaaactcagaagaactacttgattttaaactattgacattaaatttatgaagtacctgttttcattctaaaacaatttaatatatattctgttaaccagagagataacacagtccacagtttcagagcaggaaaaatctgggttctgatttgtacagccttgctagcaagagggattgattttaaaggtgtgaacttggtgatcaactatgactttccaactagctcagtggaatatatccacaggataggtgagttgtcttttttttccttcccctctgtcacccactgatctgtcttaggacccctgctattccctgcacatatgctcacttcttagtgctgtgaaaatccagtgacttttataaatgaattttgagagcctccttccccccaaaatgtgt

SEQ ID NO: 17868 - DNA, 2300 bp, Homo sapien
tgagccaccgcacctggccgttcattgctattttaagtgagatctttcattatatttattttttagttgttggttgtttacatatagagaacgtggctgccttattgaaatttctcatttggctgggcacggtggctcacgcctgtaatcccagcactgtgagaggccgaggcgggcggatcacttgaggtcaggtgtttgagaccagcctggccaagatggtgaaacctcgtctctactaaaaatacaaaacaaaattagccgggcatggtggcggattcctgtaatcccagctacttgggaggctgaggcagagaatttcttgaaccagggaggcagcagttgcagtgagccgagatcgcaccactgcacttcagcctgggcgacagagcaagactctgtctcaaacaaaaaaaaaaaaaaaaaaaggaaagaaatttatcattgtttaagttgcttttcaattaatcccctgttgttttcaagtatactaagtacactgctgaaacagccaacaaagggaagatagtaagcttcagaactctgatcataccaacacagaacttgccttttcatttccatttttatacatcctattactttctcttatctagttggatcagctgtactttttccttttttagtgtgaaggtatggctttcttgctacacatacatccaagattaaaaccttttttctttttttttttttttgagacaaggtttttctctgttacccaggctggaatgcagtggcatgatcacagctgtctgcagcctcaacctcccaggctcaaatgatcctccccactcagcctcctaagtagctgggactacaggcttgcaccaccacccacccttgactaatttttaatttttttttgaagagacgggtcctcactatgttgcctagactgttaaaatcttttactttttaaaaatatattttagaaattgcttcccaagaagaaggtgctactatacagtggatgtcatctgtagaagcaaagattgaagacaaaaaagttcagagagaaagtaaactaacttccggaaagttggagaatctcagaaaagaaaaggttagaaaaatattttggggccaaaagtatatatattttctgacctagtgacttattcgctggatttgggttattctgttgttaatgtgaatatagttttgttaagatagaaggttaattacattcatttagattttactttaatgaaaacttaaagcaaagtaggcatttgtgctgtgggtgaacattttaaagtttaaattgctgatacatatataaaattcttgacctgctcaagtttcaagattgatagtatgtttagaattaaatttttaaaatttcgtaactgctttcgataaacaaacaaaatttggctccctttcttctctgttgagctcaccggtttagaaggatttcctctgacacagattagagggttagaattcttaagaaaggtattttatgacttgggaataagaggagtaggatatggaagaaacaacaaatataccttttttgtgtctgctgtacacctgccgtattcctgatggagaggtgtattcagctcacttcagggattactatggcaatgcttcagtaacccagaaaccagaatttggctgtctctggtccagagaatggggaaacaaaccaaatcaacactactagactccactttttggcactcagttttaataatcagagttttagggtaaatcatcaaaaagcaatgatacttgtatgttaaccaccatattaaaatagtagatgggttcaatgcctgccttctaagaagtttatttaaggttagaagttatgactatgacaataacacattaatatgaagaaagcatagacattttatgaaggttttctatgaaagggcatgaaatgtacctaatatctgtgatgttttgattcttggatttaaccaaaaagtttcatatgctgctaaaggttatcccagaaactgttaatgttgctttataacatctgagaatgtatttatttggccatatccatggtggcctctttacttcacttttcagataaacttcttgcggaataaacacaaaattcacgtccaaggaaccgatcttcctgacccaattgctacatttcagcaacttgaccaggaatataaaatcaattctcgactacttcagaacattctagatgcaggtttccaaatgcctacgccaatccaaatgcaagccatcccagttatgctgcatgtgagtatgaagatctagaatgcctgtaacattccttcctctgt

SEQ ID NO: 17869 - DNA, 2300 bp, Homo sapien
aaattaatttctctagccctaatttttgttcctgagcttcagattcagaaccaactacctacttggatgtctccacttaaagtcaactaggtaggcatcttaacacgtccaaaacataacaattgattccatcctccgtatctcacttgtaccagaaagcccttcttctctcaggctttcttagctcagtaaatggcatgccatctactcagccaaaaaactaggagtgatctttgattcctccctttctctcacctctgcataaaatccgtcaggtacgtttagctctacctccaaaatacatgccagatctaatccatttatctctctcagcacagataccaacctagacaagccatgatcatcattctactttgactaacctgtttccactcttagcttttctatggtccattctccaaatagccagtgtaatcctttatgaaacatccacgcattcattcaccaaagtgcacagaaactggggatacataacgaagcaaagtatatccctgtgctcagggacttacattccagaagagggagaggcaataagcagtaaataatttcgtacagatgtaataaatataaaaaattaaatgtgataaactaaatcatgttcttctctccataaaaattttcaaatagtttcccaaggtggaagtccaaattccttactatgaccttgttacaagattctgtgagatctggcttctgtttgtccctccaaccttatctgtactactctatcagactgcaacttggctctagtcgcaccggcattctttctattccctcaaggttccaatttttttcccttcagccacgtgtttcccctatctggaatgctgttcccagatcttggacaggttgcttcctcttagctcaagttttcacttcaacagagtgaatttcactaagtcagctccctcatcattttctctatcaattacacctttttgttttatagcacttattactttacagagattttgcttatttatttgttaacaatatctgttgtccctactaaaatgtaagcttcgtaagaagaggaatcttaagatgttgtttactatagtatccctcaaagtctagaacagtgcccaacataagaggatactgataaatattttttaaaagaatttacacacgcctgtagtcccagcagtttgggagaccgagatgggaggatcacttgagcccaggagttcgaggctgcgattgcgccactgcgctccagcctgggcgacagagagagaccttgtttcaaaaaaaaaaaaaaaagataaataatgacggagtacacgataataaaatagcctcgtttctcacccagccaggctccgcctacaggagccaattatgctcacgccctcttccgacgctgcccggggcctgggaagtagtctgcgcaggcgccgtagaactgtggcgctttctgggtaaagatggacgtccacgatctctttcgccggctcggcgcgggggccaaattcgacacgagacgcttctcggcagacgcagctcgattccaggtattgtgcccaagggaccgagggccgagtaactgagaaggagcaggagcccgggaatgaacccgctgctgggggaggccggcgcacatggacacccgtggcctggctctcgccacccttggggtattttgcttccttttgtgttcggcttgcctgcacggctgctcggttcaagccttttgaataagctctttaactatcctgttgtagacctagttgggcctggcacggaaaccctctttcctccctcttattcaaagcaaagttggaatcctcctttcaaaaggaactttttctccgaacctagaggaaaggaatttcgaaaacagaaacaaccaaagatggagaaaacagattctcttactatagtctccccaagtttggcttggcatgcgtatagttgtactgggcgtgattctttttattgcttcaaccccatggcttaagtaaccaatgagaagagcgattaagaaatgggggctcttacctagagaagtagtgagtgatacatcgggggaggtcaattggggcccaattctggaaaatcttgaatgtctactttgttgtttggatgtgtatatgcgtgtgacatgtgtttcttctttctctaactggtgagtatgaactctggagccagattatctgggtctaaatgctaagtctgccagttactcatttttagacctacctcaagttacttaatttccgaatgccttggttttctcattcgtaatactgctatttaccttatagagttgtaaa

SEQ ID NO: 17870 - DNA, 2300 bp, Homo sapien
atttatgtgccaaactgaagatcaacacactaatattgagtttttcctcttatgttgaaatagattaattttatttatttttgagacaaggtctcactctgtcacccaggttggagtgcagtggtgccgttacaagtcactgcagcttcaacctcccaagctcaagcaatcttcctgcctcagcctcccaagtggctgggactataggtgtgtgccactacacccagctaatgttttaattttttgtagagatggagttccgccatgttgccccggctggtttcaaacttctgagctgaagtaatctgcccaccttggcctcccaaagtgctaggattacaggtataagccactgcgcctggctgaagataaattatttttattgaacaacagatgaagtacttgggaagttcctatttttaaagagtagacacacttgggacaggaagaccacccccccacccactgtaatagggagtaaggggctgaattcatctgagaaaccgcagattcacctcccccatcacatgctcacctcacacctgctttccttgattgtaaaggactcacccatacaatttcaagtatgtttcattctctttggtcaaatacatataactgaatttttataagttaaatgcttatatggtacaactcctttgtatcatttatatgttgatgacttccaaattaatttctctagccctaatttttgttcctgagcttcagattcagaaccaactacctacttggatgtctccacttaaagtcaactaggtaggcatcttaacacgtccaaaacataacaattgattccatcctccgtatctcacttgtaccagaaagcccttcttctctcaggctttcttagctcagtaaatggcatgccatctactcagccaaaaaactaggagtgatctttgattcctccctttctctcacctctgcataaaatccgtcaggtacgtttagctctacctccaaaatacatgccagatctaatccatttatctctctcagcacagataccaacctagacaagccatgatcatcattctactttgactaacctgtttccactcttagcttttctatggtccattctccaaatagccagtgtaatcctttatgaaacatccacgcattcattcaccaaagtgcacagaaactggggatacataacgaagcaaagtatatccctgtgctcagggacttacattccagaagagggagaggcaataagcagtaaataatttcgtacagatgtaataaatataaaaaattaaatgtgataaactaaatcatgttcttctctccataaaaattttcaaatagtttcccaaggtggaagtccaaattccttactatgaccttgttacaagattctgtgagatctggcttctgtttgtccctccaaccttatctgtactactctatcagactgcaacttggctctagtcgcaccggcattctttctattccctcaaggttccaatttttttcccttcagccacgtgtttcccctatctggaatgctgttcccagatcttggacaggttgcttcctcttagctcaagttttcacttcaacagagtgaatttcactaagtcagctccctcatcattttctctatcaattacacctttttgttttatagcacttattactttacagagattttgcttatttatttgttaacaatatctgttgtccctactaaaatgtaagcttcgtaagaagaggaatcttaagatgttgtttactatagtatccctcaaagtctagaacagtgcccaacataagaggatactgataaatattttttaaaagaatttacacacgcctgtagtcccagcagtttgggagaccgagatgggaggatcacttgagcccaggagttcgaggctgcgattgcgccactgcgctccagcctgggcgacagagagagaccttgtttcaaaaaaaaaaaaaaaagataaataatgacggagtacacgataataaaatagcctcgtttctcacccagccaggctccgcctacaggagccaattatgctcacgccctcttccgacgctgcccggggcctgggaagtagtctgcgcaggcgccgtagaactgtggcgctttctgggtaaagatggacgtccacgatctctttcgccggctcggcgcgggggccaaattcgacacgagacgcttctcggcagacgcagctcgattccaggtattgtgcccaagggaccgagggccgagtaactgagaaggagcaggagcccgggaatgaacccgctgctggggg

SEQ ID NO: 17871 - DNA, 2300 bp, Homo sapien
aagatttgcacctattacaacaaactagagggaaagaaggtgaaatgaaaagccaacattttcatgaagttatgactccctgtggcaccctgaggagtaatgggtgtctggaggctgaaggatggagaggttcctgaatttgggatttgcttgtctccgggaaagagggactgagatcagtgtaaactttcctcaggctacacgcacacaaccatcccgcttccttctggctctcagcacaagtggcccaggcacctgtagcagaccctgtatttaagaggcatcctagctccttaacagcctgacttgataaattacaccatcagcccttgcacacctaggagattagatcctgcccctaggcagatgagagctgctagactcttcctcctcctgctgaaattcctctctatccctaacctaaccttacttcctcctagatatctttcaagggtgggagaggaaggaaaatgtgcttagaaactcctttgcaatttttctgctgattctgaaaccctagtcccccaatccctccaaccccagcactgtatcaccaattctgaataccctaagtttccagagtaactcagttttactactgggaactggcttcccgtcttctcagaccagaaagtgttgaactttattattagaccaagcggttgcacaagtggcctcagtcaatatacacaacccccaaaaaaaggttatcagtggtatcctctttttgcagatgaggaaactgaggctcccagaagggaagcgttatgctcctccccagaagctttaggtctgtgtgtggtggaagcaaagaagcccctttccctgttcttctacaggtcaggtcctagcttgcaggtttgggcgcgcttccgccgccctcccctcctgcccgtcaccaggggggaagcaggtgaaactccaatagtgctgcaaggcctatggcttcctacctggcccaggccagagtgggaaaaaaaacatctttccctcagtagctctgtcgacaccttctgtactaggagtgcaagacttctgccactgctgcagtgacctcgtctacagagctcgtccccggcccagggaaccacagatgttctggaactacgaataaaccagaaatgagtgggccggggggaccctcggctgcaagtgtccacccagctgcaggtcaagctttgctttcactgcctcaccatcctagtgcctcaccatcctagtgcctcaccatcctagtgcctcaccattctgcctcaccatcctcccccaaggtggaggcgccttgacatccgggtttaaacaggagagtgaggagccccaggggtccagctccccagtggcgtggccaggctgggcgccggtgcagcccagctgctgggggagcttcactttggctactccctctacccataaagtagtctctttccaagagttctcccggactccttcaccctcgcctacgctctctggcgggcagttctgcaaacccaaaccgccagaccaggccagggaggttctggggcctggaggtagtaaccgaggtagaaataaatggagtccctccagggcatgctcaccacacctaacgctgcctcacctcccccgtggcctcggcgccccttcctaagtggtcagtttctcttccgccctgcgggctctcctggcccaccacctgcgtcggccgggacgcatccagggtctctactcttcgcttcctcctgcgtccccttcttccacgagcaccccagcttcctctggctctcacctgaaccccgaagcgtagtgtcttctctctggactaaagcggaactgagaaccggtggaaaagccccgcgcctaggctgcaaggcactggcttaacaagtccaaaggttaggtgaagtttggctgataagcagaaccagtaaaagaaggtctctagccccccagcgtgagtacaatggaccctggcaaagccccgctcccggcccaggtcttctgctctccaggtctgcccctccggctctccctctctccgggtttccccctccccaccatcatttgcatccagccgaaagctgggcccttcccactaatttgcatatcttatatggcctaatggtggcgatcatggcaagttagaagttttctgactcctttcggaggagcctccgggaccccggggagtaacaggtgtctggaggctgaagggtggaggggttcctggatttggggtttgcttgtgaaactcccctccaccctcctctctcgcacccacccaccccctcacccccttctttttccgtccttggaaaatggtg

SEQ ID NO: 17872 - DNA, 2300 bp, Homo sapien
atcccggctaacacagtgaaaccccgtctcaactaaaaacacaataaattagctgggcatggtggtgggtgcctgtaggcccagctactcagaggctgaggcaggagaatgtcctgaacccaggaggtggagcttgcagtgagccgagatcacaccactgcactcaaacctgggcgacagaataagactctgtctcaaaaaaaaaaaaaagagagatgacatcttaggccagaaccctgaggaacttcaccatttaaaggtttgatagggtgatcagaaaggtgccaccaaagagggaaaatcaggagagtgaaatactgaaaggcaagaaatacagcagtattagtctgttttgtgttgctataaaggaatacctgaaactgggtagattattaatataaagaaaagaggtttatttggttcacagttctgtaggcagtacaagcatactaccaccatctttgggctgaggaagcttttacttatgggggagtgggcatagggaccaggagtgtcacatggtgaggggagggagctagatggcaggctctttttaccaatcagatctcacgtgaactaacaacagcaagaaactcactcattaccacaaggaaaacaccaagacattcatgagggttctgcccccattacccaaacaccttttgctgggctccaccttcaacatcgggattatacttttacatgagatttggaggcacaaatatccaaactttatcaatagcctctgtaatttttttttttttttttttgagacacagtttcgctcttgttgcccaggctggagtgcagtggcgtgatctcgactcactgcaacctctgccttccggtttcaagtgattctcctgcctcagcctcccaagtagctgggactacaggcacgtgccaccatgcccagctaattttttgtatttttaatagagatggggtttcaccatgttggccagggtggtctcgatctcttgacctcgtgatccgcccacctcggcttcccaaagtgctgggattacaggcgtgagccaccgcacctggcaaataggctctatttttttttttaattatttttgtagagatgaggtctcactttgttgcttaggctggtctcgaactcctcacctcaagtggtccttccattttggcctcccaaagtgctgcgattatatgtgtgaggcactgcacccagcctcagtaggcttttatggcttatgccttctgtacttttaaaactatttcaacttaattttctactctaatttttgttgtaatttatatatgtatgtaagtgtatatatatttatatgtagggtgtgtatatatggtgtgtgtatatatagtgtgtgtgtatatataaaatgtgtgtgtgtatatatacatatataatcaacacacacacacacacatatatgtatacacacacatttttttgtttgtttgtttttgttttttcgaggtagggtccactctgtcacccaggctggaatgcagtggtgcaatcatggctcactgcagccttgaccttctgggctcaattgatcagcccgcctcagcctgccgagtagctgggactacaggtgcaccaccaccacacccaactatttttttttttttttttttttgtagaggtggaattttgccatgttgcccgggctgccctggaacccctgggctcaagcgatctgcctacctcagcctcccaaagtgctgggattacaggtgtgatccactgtgcccggcctatattacgatactgtatgctggaaaacttcttttggaaacaaagtgggatataaataatactcaagtgcgactttcaggaacatattcttcatagtaagacaatgccattgaaacttactgtgtttcataagaagtagtagtactggctctacatttatttctgcttttaaattctgaggatgggagggagaggaatccacaataaattttgagtaccactgtgtttgaataataatagctgattagcctaattcctttcagaagggaaatcagcatgcatgagatcatttcttgccacttaaattcaaattctaaattcttgagtttggctctttaagagaaaccagacctacttgactgcggtcatcctagctgaccataaaacaggaagtaaacaggtaacaggcagatgttaaaaaccttgccccattcctgtgttgagaggacttttttgtttttttctcccgctccccaggtaaataatcccagcatctttgtgtttttattaatgtaagatttaaaaacttgtggcaggatttgttttg

SEQ ID NO: 17873 - DNA, 2300 bp, Homo sapien
cagccaccatccccaggaagagcagatgggggcacacaggcagagtccccacgtgctgtagagcagggccagcagaactgtactcagccccagccccaggggagctgcaagatagactgagaccctcacaggttgggctctgtgtccccacccaaatctcatctggaattgtaatcctcctgtgtcaagggaggaacctggtgggaggggatgggatctggggacaggttcccccctgctgctcccctgatagtgcgggagttctcaggagagctgatggtttgaaagtgtggcacttcctgcttctccgctcactccctcctgccgccttgtggagaaggtgcctgcttccccttcgccttctgccatgactgtaagttccctgaactgggagtcgattaaacctctttcctttataaattacctaggctcaagtatttctttatagcagtgtgaaaacaaactaataccccttccctgaggcgccttctccttaggcaacccgctgcccccatgctcctcctctgccccctgttctttcttttcccctcatgaggcccaagtgataaacggggccagccccagtcccagccccagccccagccccatcctactgcaggcctgtgtggctgctggagaggccgtgttcctttcctctccccgagcctgcctgatatgctttctggatcctggaggaaactgaccccctattctcatactggtgcaacatcttccaagacctcaaagctgtaccatttgagccagtcttttttcttatctccacttgctagggctgtcattgggacagtcctagagggtggtgccaatggatgaatggatggatggacagtagtccagggatgatgtccctgtctgtcctgaaccgggcctttcctccaatgagaagccttcctgagtgagtatatacagtcatcccttggtatccatggaggattagttctagggtccccgggaatgccaaaatccatggatgctcaagtctctgatataacgtggcctagtatttacgtataagctatgcacatcctcccgtatacgttagaccgttactagattatttatgatgtgtaatacaatgcagatgctacataaatggtcgtgatactgtattctttagggaatgatgacaagaacaaagtctgcacatgttcaatagaaacataaccgtccaatttattttctgaatattttccatctgctgttgctgaatctacagatgcagagctcctggatacgagagccaagtgtgctttgagagtagggtgggtgaggttgctaatgagtacaggggagcaggtgttgatcaggaggaccctgcactggggcatctggacgtcctgcctcaggacttgagactccagttggatggcacaggtagactcagcccaggtcaaagccgtccccttgaagtttctttttatcccaagctctttctggaccctggaattcggcatcccctaggccctgcgtggaaggacagatgaaccaggttttagataacatgtctagaagagtgagcccctactgtgtgcccggcactttccccacaggatcctctagctagaatatccaagggtcatggagagaaatacccagttaaaatatcagaaaagaaaaagtgataccattagagacactaaaaagaccattaggtaatagtattagcttttgtattctgagatccaatagcagcagtcacttccctccaccgctatgtgtatcccaggaccaccctgggcggggagggctgcggttagggagcagccatggatgctctgatgctggccctgggcctcgggggtgacagtgatgaggaactgggtgcacacatgagtggggcagccgggcctggccagagaagcagcacacacgtgcacagacgtgtttacccacatacacatgtgcacgcacgtgcacaaacacattgcaggcaggcatgttgacgcctcaggcagcggaggaccctgactctgggcgctgctgacccgggcaaggccccactgtgattcgtgccatgacctcagaatgtcactggtgcttagcacctgtctgctctctggcctgcctcagtggtctacagcagttacacacaggcagtggtatctgtgagcagctctgtggactcaaaggttttctccctgagaggcatgacccaggccagctgattcatcagaatcaggtgagcgtgacctgctctcttccctccaggcggacttggggacagtggctacggtgcgggcggtgttggcctctgtggggcagctaccgaggagggtcat

SEQ ID NO: 17874 - DNA, 2300 bp, Homo sapien
tatctccacttgctagggctgtcattgggacagtcctagagggtggtgccaatggatgaatggatggatggacagtagtccagggatgatgtccctgtctgtcctgaaccgggcctttcctccaatgagaagccttcctgagtgagtatatacagtcatcccttggtatccatggaggattagttctagggtccccgggaatgccaaaatccatggatgctcaagtctctgatataacgtggcctagtatttacgtataagctatgcacatcctcccgtatacgttagaccgttactagattatttatgatgtgtaatacaatgcagatgctacataaatggtcgtgatactgtattctttagggaatgatgacaagaacaaagtctgcacatgttcaatagaaacataaccgtccaatttattttctgaatattttccatctgctgttgctgaatctacagatgcagagctcctggatacgagagccaagtgtgctttgagagtagggtgggtgaggttgctaatgagtacaggggagcaggtgttgatcaggaggaccctgcactggggcatctggacgtcctgcctcaggacttgagactccagttggatggcacaggtagactcagcccaggtcaaagccgtccccttgaagtttctttttatcccaagctctttctggaccctggaattcggcatcccctaggccctgcgtggaaggacagatgaaccaggttttagataacatgtctagaagagtgagcccctactgtgtgcccggcactttccccacaggatcctctagctagaatatccaagggtcatggagagaaatacccagttaaaatatcagaaaagaaaaagtgataccattagagacactaaaaagaccattaggtaatagtattagcttttgtattctgagatccaatagcagcagtcacttccctccaccgctatgtgtatcccaggaccaccctgggcggggagggctgcggttagggagcagccatggatgctctgatgctggccctgggcctcgggggtgacagtgatgaggaactgggtgcacacatgagtggggcagccgggcctggccagagaagcagcacacacgtgcacagacgtgtttacccacatacacatgtgcacgcacgtgcacaaacacattgcaggcaggcatgttgacgcctcaggcagcggaggaccctgactctgggcgctgctgacccgggcaaggccccactgtgattcgtgccatgacctcagaatgtcactggtgcttagcacctgtctgctctctggcctgcctcagtggtctacagcagttacacacaggcagtggtatctgtgagcagctctgtggactcaaaggttttctccctgagaggcatgacccaggccagctgattcatcagaatcaggtgagcgtgacctgctctcttccctccaggcggacttggggacagtggctacggtgcgggcggtgttggcctctgtggggcagctaccgaggagggtcatccctgagcactcaccaggcgcccgttctacactgcccgtgtagacgattggctctttcgtctccatggtggcttcgtagagtgggtgctgttcccaaatgtccccattcgacagatgagacgtctggggtcagagaggcagtaaccggcctgggaatccggacatgaccctgagttttgctctcagccctgccgtgtgctgtgctggaattcaggcctgaaccctgtgacctccctgccctagatcccaaatctgcccaggtttcccatcccgatggggcagagcctggtcctggcagagccactggtatagagccactggtacagatccactgacggtcctcagaacacctctgtgccctaagctgggtcctgatggtcgctgtgggccccactgaacacacatggtcccttgtccaggggagcctgctgcccttgggcagctgtggaaaatgaaggagccctggagggctggctgaggggagactatcttcccttgtgttcaaaggggtccgggcactagggttctccccaggtatttcttgctctgcgtggtcctcttgaggcctcgccctccttttgcctcgagtattcccaggagggacggtccatccagctgttctccaggaccaaggacccactgttcttcctcagtgacccaggaaaatgaagcctcctcctgttgggacggctcagaatggtggactccacagtccctccgcgagagacgtggtttccatgcgtacaatagatctttctcatcccccaaacccaac

SEQ ID NO: 17875 - DNA, 2300 bp, Homo sapien
gaaaaggcactatagtatcctcctataccttccatccagctgcccctaataatgatgttttgcagtcccatggcacataagaaatttaggccgggtgtggtggctcacacctgtaatcccagcaatttgagaggtcgaggcgggaggttcaggttcacttgagtctagaagtctgagaccagcctgggaaacctaggtggacccggtctctagagaaaagtcaaagaaattagccaggcatggtggcgtgtgcctatagtcccacctagtcaggaggctgaggcaggaggattgctggagcccacgagttccaggaagcagtgagccatgattgcaccactgcactccagcctgggtgacagagtgagactttatctcttaaaaaaatttaagaaatttaatgtgggtacagttctattaactaaataataatgtgaactattatctaaggttatgaaggctagaattatcccatttttgcctaacttctcgtacctgtcccaagatcccaccttggactcaccctctgccttcagctcacgtctcttcagcttcctccacatggtccagcaaacacacacctgggctgaatggtagagctgatcgctcatacacaaaggtagaccggtgggcagggattttcagacttacacagtcaatgagttttccttggtgttctggagagcaccgtttgagaaacactttgacagtgaatctaggcctcaagatccatcagctgctctagcttgaattttgctcaagctcagtgaacacctgctctgccgggtgcacgtgaaaggggcaaggatgagaaagctgtagataaagaagacaggacgcagggggtctgtctaagctctatcccctgccttcagcactgagggatgaaatccaactcttagggaacggtggccacgtgctgggccagccccaggctctcaggatctgacagtgggtgacgcagagccaggccttgcccctggggagctctccagcatacacctccctctcccctcccagcgtgccgcaaagcaggcgtcaacgccattgttaatgcacggaggaggaacctgactgttagacctgggttttccagggttgcacggcttctgggagacggatgtgaccctgaggacagggcacaggccagtgtaatgccaggatggaatgagctgtgatctgtgctgtatagaggcctaggccaaggtgggactgacggatgaccaggtcagccgggtcactgaaaacactcttgggtcctcacctgccggttcccaggagtccggaactgccaggagagtggtggcaggtcccccatcctcagctgggtgggcctggatagaacagcaaggcgagggcacatttccctggccattccctccaggcacagccgtgacctgttcattccaaatttgtggaagtatttccacacacacagaactgcaaatagcagtggacatggtgagaggcgtttgcacatgggataggcaggattttggaggcagagcctccagggcttgccgatgggttagctgcagggcttgagagggaacggagaatccaggatgatgtgttcaaatcggtccattcacctcttccgttccacgcctgtgctgggcactgggagagacagatgcacacaggagccccggccgaggggaggtgtggggggaagcccagagtgtctgggcagggtaggaaacccagagcgtctactgggagctgaaggcttaggtccacctgggtgccgtccaggttctctgcgtgtagaagtataggctgagcttcccggaggaggagcagctgctgttgctggtgaccagcacattcaggaacggagactactctgtcaacagacagggggatgacctgaggtctggatggtctagggggtggtagggcccaggaggacccaggaaagggtctcggggatgcagaacatcctatggagggcatttgggagtcagtgctcaggtcactccgggtcacgcaggtcatttgccggcccctgtcataattattgccatatgagagtgccacccgtcctatgacatattttatatatttctgtgaatggcctacttgtttgtatttatgaatttatgtttaaaggatgggcaggggtgctcgagaggtccccaggagtttccctctggggagagaggggcccaccccttcccagcagccctctgagccccccgatcgcttggccacagcctctgcctggagaaagcatccccctcggagatatatggacatcagaagaaacctttctctgtcaccaggacaaatcctgttct

SEQ ID NO: 17876 - DNA, 2300 bp, Homo sapien
ttgctagggctgtcactgggacagtccgagatgggggggtggggggagacaatggatgaatggatggatgaatggacagtagtccagggagatgtccctgtgtgtcctgaactgggaccttcctccaatgagaagccttcctgagtgagtttatacagtcatcccttggtatccatggattagttctagggtccccggggatgccaaaatccatggatcctcaagtctctgacataacatggcctagtatttacatatcagctatgcacatcctcccgtagacattagaccatctctggattattcatgatgtgtaatacaatgcagatgctacataaatggtcgtgatactggattctttagggaataatgacaagaacaaactctgcacatgttcaatagaaacataaccgtccaatttattttctgaatattttccatctgctgttgctgaatctacagatgcagagctcctggatacgagagccaagtgtgctttgagagtagggtgggtgaggttgctaatgagtacaggggagcaggtgttgatcaggaggaccctgcactggggcatctggacgtcctgcctcaggacttgagactccagttggatggcacaggcagactcagcccaggtcaaagccatccccttgaagtttctttttatcccaagctctttctggcccctggaatttggcatcccctaggccctgtgtggaaggacagatgaaccaggttttagataacatgtctagaagagtgagcccctactgtgtgcccggcactttccccacaggatcctctagctagaatatccaagggtcatggagagaaatacccagttaaaatatcagaaatgaaaaagcgataccattagagacactaaaaagaccattaggtaatagtactagcttttgtattctgagatccaacagcagcagtcacttccctccaccgctatgtgtatcccaggaccaccctgggcggggagggctgaggttagggagcagccatggatgctctgatgctggccctgggcctcgggggtgacagtgatgaggaactgggtgcacacatgagtggggcagccgggcctggccagagaagcagcacacacgtgcacagatgtgtttacccacatacacatgtgcacgcacgtgcacaaacacattgcaggcaggcatgttgacgcctcaggcagcggaggaccctgactctgggcgctgctgacccgggcaaggccccactgtgattcgtgccatgacctcagaatgtcactggtgcttagcacctatctgctctctggtctgcctcagtggtctacagcagttacacacaggcactggtatctgtgagcagctctgtggactcaaaggttttctccctgagaggcatgacccaggccagctgattcatcagaatcaggtgagcgtgacctgctctcttccctccaggcggacttgggggcagtggctacggtgcgggcggtgttggcctctgtggggcagctaccgaggagggtcatccctgagcactcaccaggcgcccgttctacactgcccgtgtagacgattggctctttcgtctccatggtggcttcgtagagtgggtgctgttcccaaatgtccccattcgacagatgagacgtctggggtcagagaggcagtaaccggcctgggaatccggacatgacactgagttttgctctcagccctgccgtgtgctgtgctggaattcaggcctgaaccctgtgacctccctgccctagatcccaaatctgcccaggtttcccatcccgatggggcagagcctggtcctggcagagccactggtatagagccactggtacagatccactgacggtcctcagaacacctctgtgccctaagctgggtcctgatggtcgctgtgggccccactgaacacacatggtcccttgtccgggggagcctgctgcccttgggcagctgtggaaaatgaaggagccctggagggctggctgaggggagactatcttcccttgtgttcaaaggggtccgggcactagggttctccccaggtatttcttgctctgcgtggtcctcttgaggcctcgccctccttttgcctcgagtattcccaggagggacggtccatccagctgttctccaggaccaaggacccactgttcttcctcagtgacccaggaaaatgaagcctcctcctgttgggacggctcagaatggtggactccacagtccctccgcgagagacgtggtttccatgcgtacaatagatctttctcatcccccaaacccaac

SEQ ID NO: 17877 - DNA, 2300 bp, Homo sapien
actccagcctggcctaggcaacagagtgagactctgtctcaaaaaaaaaaaaaaaaaaaaaagaacagatatggcttggcgcggtggctcacacttgtaatcccagcactttggcaggcggaggcaggcagatcacctgatgtcaggagttcaagaccagcctggccaacatggtgaaaccctgtctctactaaaaatacaaaattagccaggcgtggtggtgcatgcctgtaatcccagctactagggaggctgaggcaggagaactgcctgaacccgggaggcagaggttgcagtgagccgagattgtgccactgcacaatctccctcctgccatcttgtgaagaaggtgcctgcttccccttccccttctgccatgattgtaagtttccggaactgcaagtcaattaagcctgtttcctttataaattacccaatctcaggtatttctttacatcagtgtgaaaacaaatgaatacagtccccttccctgaggtgccttctccttaggcaaccagctgcccccatgctcctcttctgcccccctggtatttcctttcccctcatgaggcccaagtgatccacatggccagccacagccccatcctactgcaggcctgtgtggctgctagagaggccaggctcctttccgcaccccgaggctgcccgatatgctttctgcatcctgtagaaaactgacccactattctcatactggtgcaacttcttccattacctcaaaactggacaacgtgaacttgtttcttgtctcttcttgctagggctgtcactgggacagtccgagatgggggggtggggggagacaatggatgaatggatggatgaatggacagtagtccagggagatgtccctgtgtgtcctgaactgggaccttcctccaatgagaagccttcctgagtgagtttatacagtcatcccttggtatccatggattagttctagggtccccggggatgccaaaatccatggatcctcaagtctctgacataacatggcctagtatttacatatcagctatgcacatcctcccgtagacattagaccatctctggattattcatgatgtgtaatacaatgcagatgctacataaatggtcgtgatactggattctttagggaataatgacaagaacaaactctgcacatgttcaatagaaacataaccgtccaatttattttctgaatattttccatctgctgttgctgaatctacagatgcagagctcctggatacgagagccaagtgtgctttgagagtagggtgggtgaggttgctaatgagtacaggggagcaggtgttgatcaggaggaccctgcactggggcatctggacgtcctgcctcaggacttgagactccagttggatggcacaggcagactcagcccaggtcaaagccatccccttgaagtttctttttatcccaagctctttctggcccctggaatttggcatcccctaggccctgtgtggaaggacagatgaaccaggttttagataacatgtctagaagagtgagcccctactgtgtgcccggcactttccccacaggatcctctagctagaatatccaagggtcatggagagaaatacccagttaaaatatcagaaatgaaaaagcgataccattagagacactaaaaagaccattaggtaatagtactagcttttgtattctgagatccaacagcagcagtcacttccctccaccgctatgtgtatcccaggaccaccctgggcggggagggctgaggttagggagcagccatggatgctctgatgctggccctgggcctcgggggtgacagtgatgaggaactgggtgcacacatgagtggggcagccgggcctggccagagaagcagcacacacgtgcacagatgtgtttacccacatacacatgtgcacgcacgtgcacaaacacattgcaggcaggcatgttgacgcctcaggcagcggaggaccctgactctgggcgctgctgacccgggcaaggccccactgtgattcgtgccatgacctcagaatgtcactggtgcttagcacctatctgctctctggtctgcctcagtggtctacagcagttacacacaggcactggtatctgtgagcagctctgtggactcaaaggttttctccctgagaggcatgacccaggccagctgattcatcagaatcaggtgagcgtgacctgctctcttccctccaggcggacttgggggcagtggctacggtgcgggcggtgttggcctctgtggggcagctaccgaggagggtcat

SEQ ID NO: 17878 - DNA, 2300 bp, Homo sapien
gaaaaggcactatagtatcctcttataccttccatccagctgcccctaataatgatgttttgcagtcccatggcacataagaaatttaggccgggtgtggtggctcacacctgtaatcccagcaatttgagaggtcgaggcgggaggttcaggttcacttgagtctagaagtctgagaccagcctgggaaacctaggtggacccggtctctagagaaaagtcaaagaaattagccaggcatggtggcgtgtgcctatagtcccacctagtcaggaggctgaggcaggaggattgctggagcccacgagttccaggaagcagtgagccatgattgcaccactgcactccagcctgggtgacagagtgagactttatctcttaaaaaaatttaagaaatttaatgtgggtacagttctattaactaaataataatgtgaactattatctaaggttatgaaggctagaattatcccatttttgcctaacttctcgtacctgtcccaagatcccaccttggactcaccctctgccttcagctcacgtctcttcagcttcctccacatggtccagcaaacacacacctgggctgaatggtagagctgatcgctcatacacaaaggtagaccggtgggcagggattttcagacttacacagtcaatgagttttccttggtgttctggagagcaccgtttgagaaacactttgacagtgaatctaggcctcaagatccatcagctgctctagcttgaattttgctcaagctcagtgaacacctgctctgccgggtgcacgtgaaaggggcaaggatgagaaagctgtagataaagaagacaggacgcagggggtctgtctaagctctatcccctgccttcagcactgagggatgaaatccaactcttagggaacggtggccacgtgctgggccagccccaggctctcaggatctgacagtgggtgacgcagagccaggccttgcccctggggagctctccagcatacacctccctctcccctcccagcgtgccgcaaagcaggcgtcaacgccattgttaatgcacagaggaggaacctgactgttagacctgggttttccagggttgcacggcttctgggagacggatgtgaccctgaggacagggcacaggccagtgtaatgccaggatggaatgagctgtgatctgtgctgtatagaggcctaggccaaggtgggactgacggatgaccaggtcagccgggtcactgaaaacactcttgggtcctcacctgccggttcccaggagtccggaactgccaggagagtggtggcaggtcccccatcctcagctgggtgggcctggatagaacagcaaggcgagggcacatttccctggccattccctccaggcacagccgtgacctgttcattccaaatttgtggaagtatttccacacacacacaactgcaaatagcagtggacgtggtgagaggcgtttgcacatgggataggcaggattttggaggcagagcctccagggcttgccgatgggttagctgcagggcttgagagggaacggagaatccaggatgatgtgttcaaatcggtccattcacctcttccgttccacgcctgtgctgggcactgggagagacagatgcacacaggagccccggccgaggggaggtgtggggggaagcccagagtgtctgggcagggtaggaaacccagagcgtctactgggagctgaaggcttaggtccacctgggtgccgtccaggttctctgcgtgtagaagtataggctgagcttcccggaggaggagcagctgctgttgctggtgaccagcacattcaggaacggagactactctgtcaacagacagggggatgacctgaggtctggatggtctagggggtggtagggcccaggaggacccaggaaagggtctcggggatgcagaacatcctatggagggcatttgggagtcagtgctcaggccactccgggtcactcaggtcatttgccggcctctgtcataattattgccatatgagagtgccacccgtcctatgacatattttatatatttctgtgaatggcctacttgtttgtatttatgaatttatgtttaaaggatgggcaggggtgctcgagaggtccccaggagtttccctctggggagagaggggcccaccccttcccagcagccctctgagccccccgatcgcttggccacagcctctgcctggagaaagcatccccctcggagatatatggacatcagaagaaacctttctctgtcaccaggacaaatcctgttct

SEQ ID NO: 17879 - DNA, 2300 bp, Homo sapien
tatctccacttgctagggctgtcattgggacagtcctagagggtggtgccaatggatgaatggatggatggacagtagtccagggatgatgtccctgtctgtcctgaaccgggcccttcctccaatgagaagccttcctgagtgagtatatacagtcatcccttggtatccatggaggattagttctagggtccccgggaatgccaaaatccatggatgctcaagtctctgatataacgtggcctagtatttacgtataagctacgcgcatcctcccgtatacgttagaccgttactagattatttatgatgtgtaatacaatgcagatgctacataaatggtcgtgatactgtattctttagggaatgatgacaagaacaaagtctgcacatgttcaatagaaacataaccgtccaatttattttctgaatattttccatctgctgttgctgaatctacagatgcagagctcctggatacgagagccaagtgtgctttgagagtagggtgggtgaggttgctaatgagtacaggggagcaggtgttgatcaggaggaccctgcactggggcatctggacgtcctgcctcaggacttgagactccagttggatggcacaggtagactcagcccaggtcaaagccgtccccttgaagtttctttttatcccaagctctttctggcccctggaattcggcatcccctaggccctgcatggaaggacagatgaaccaggttttagataacatgtctagaagagtgagcccctactgtgtgcccggcactttccccacaggatcctctagctagaatatccaagggtcatggagagaaatacccagttaaaatatcagaaatgaaaaagtgataccattagagacactaaaaagaccattaggtaatagtattagcttttgtattctgagatccaatagcagcagtcacttccctccaccgctatgtgtatcccaggaccaccctgggcggggagggctggggttagggagcagccatggatgctctgatgctggccctgggcctcgggggtgacagtgatgaggaactgggtgcacacatgagtggggcagccgggcctggccagagaagcagcacacacgtgcacagatgtgtttacccacatacacatgtgcacgcacgtgcacaaacacattgcaggcaggcatgttgacgcctcaggcagcggaggaccctgactctgggcgctgctgacccgggcaaggccccactgtgattcgtgccatgacctcagaatgtcactggtgcttagcacctgtctgctctctggcctgcctcagtggtctacagcagttacacacaggcagtggtatctgtgagcagctctgtggactcaaaggttttctccctgagaggcatgacccaggccagctgattcatcagaatcaggtgagcgtgacctgctctcttccctccaggcggacttggggacagtggctacggtgcgggcggtgttggcctctgtggggcagctaccgaggagggtcatccctgagcactcaccaggcgcctgttctacactgcccgtgtagacgattggctctttcgtctccatggtggcttcgtagagtgggtgctgttcccaaatgtccccattcgacagatgagacgtctggggtcagagaggcagtaaccggcctgggaatccggacatgaccctgagttttgctctcagccctgccgtgtgctgtgctggaattcaggcctgaaccctgtgacctccctgccctagatcccaaatctgcccaggtttcccatcccgatggggcagagcctggtcctggcagagccactggtatagagccactggtacagatccactgacggtcctcagaacacctctgtgccctaagctgggtcctgatggtcgctgtgggccccactgaacacacatggtcccttgtccgggggagcctgctgcccttgggcagctgtggaaaatgaaggagccctggagggctggctgaggggagactatcttcccttgtgttcaaaggggtccgggcactagggttctccccaggtatttcttgctctgcgtggtcctcttgaagcctcgccctccttttgcctcgagtattcccaggagggacggtccatccagctgttcttcaggaccaaggacccactgttcttcctcagtgacccaggaaaatgaagcctcctcctgttgggacggctcagaatggtggactccacagtccctccgcgagagacgtggtttccatgcgtacaatagatctttctcatcccccaaacccaac

SEQ ID NO: 17880 - DNA, 2300 bp, Homo sapien
cagccaccatccccaggaagagcagatgggggcacacaggcagagtccccacgtgctgtagagcagggccagcagaactgtactcagccccagccccaggggagctgcaagatagactgagaccctcacaggttgggctctgtgtccccacccaaatctcatctggaattgtaatcctcctgtgtcaagggaggaacctggtgggaggggatgggatctggggacaggttcccccctgctgctcccctgatagtgcgggagttctcaggagagctgatggtttgaaagtgtggcacttcctgcttctccgctcactccctcctgccgccttgtggagaaggtgcctgcttccccttcgccttctgccatgactgtaagttccctgaactgggagtcgattaaacctctttcctttataaattacctaggctcaagtatttctttatagcagtgtgaaaacaaactaataccccttccctgaggcgccttctccttaggcaacccgctgcccccatgctcctcctctgccccctgttctttcttttcccctcatgaggcccaagtgataaacggggccagccccagtcccagccccagccccagccccatcctactgcaggcctgtgtggctgctggagaggccgtgttcctttcctctccccgagcctgcctgatatgctttctggatcctggaggaaactgaccccctattctcatactggtgcaacatcttccaagacctcaaaactgtaccatttgagccagtcttttttcttatctccacttgctagggctgtcattgggacagtcctagagggtggtgccaatggatgaatggatggatggacagtagtccagggatgatgtccctgtctgtcctgaaccgggcccttcctccaatgagaagccttcctgagtgagtatatacagtcatcccttggtatccatggaggattagttctagggtccccgggaatgccaaaatccatggatgctcaagtctctgatataacgtggcctagtatttacgtataagctacgcgcatcctcccgtatacgttagaccgttactagattatttatgatgtgtaatacaatgcagatgctacataaatggtcgtgatactgtattctttagggaatgatgacaagaacaaagtctgcacatgttcaatagaaacataaccgtccaatttattttctgaatattttccatctgctgttgctgaatctacagatgcagagctcctggatacgagagccaagtgtgctttgagagtagggtgggtgaggttgctaatgagtacaggggagcaggtgttgatcaggaggaccctgcactggggcatctggacgtcctgcctcaggacttgagactccagttggatggcacaggtagactcagcccaggtcaaagccgtccccttgaagtttctttttatcccaagctctttctggcccctggaattcggcatcccctaggccctgcatggaaggacagatgaaccaggttttagataacatgtctagaagagtgagcccctactgtgtgcccggcactttccccacaggatcctctagctagaatatccaagggtcatggagagaaatacccagttaaaatatcagaaatgaaaaagtgataccattagagacactaaaaagaccattaggtaatagtattagcttttgtattctgagatccaatagcagcagtcacttccctccaccgctatgtgtatcccaggaccaccctgggcggggagggctggggttagggagcagccatggatgctctgatgctggccctgggcctcgggggtgacagtgatgaggaactgggtgcacacatgagtggggcagccgggcctggccagagaagcagcacacacgtgcacagatgtgtttacccacatacacatgtgcacgcacgtgcacaaacacattgcaggcaggcatgttgacgcctcaggcagcggaggaccctgactctgggcgctgctgacccgggcaaggccccactgtgattcgtgccatgacctcagaatgtcactggtgcttagcacctgtctgctctctggcctgcctcagtggtctacagcagttacacacaggcagtggtatctgtgagcagctctgtggactcaaaggttttctccctgagaggcatgacccaggccagctgattcatcagaatcaggtgagcgtgacctgctctcttccctccaggcggacttggggacagtggctacggtgcgggcggtgttggcctctgtggggcagctaccgaggagggtcat

SEQ ID NO: 17881 - DNA, 2300 bp, Homo sapien
gaaaaggcactatagtatcctcctataccttccatccagctgcccctaataatgatgttttgcagtcccatggcacataagaaatttaggccgggtgtggtggctcacacctgtaatcccagcaatttgagaggtcgaggcgggaggttcaggttcacttgagtctagaagtctgagaccagcctgggaaacctaggtggacccggtctctagagaaaagtcaaagaaattagccaggcatggtggcgtgtgcctatagtcccacctagtcaggaggctgaggcaggaggattgctggagcccacgagttccaggaagcagtgagccatgattgcaccactgcactccagcctgggtgacagagtgagactttatctcttaaaaaaatttaagaaatttaatgtgggtacagttctattaactaaataataatgtgaactattatctaaggttatgaaggctagaattatcccatttttgcctaacttctcgtacctgtcccaagatcccaccttggactcaccctctgccttcagctcacgtctcttcagcttcctccacatggtccagcaaacacacacctgggctgaatggtagagctgattgctcatacacaaaggtagaccggtgggcagggattttcagacttacacagtcaatgagttttccttggtgttctggagagcaccgtttgagaaacactttgacagtgaatctaggcctcaagatccatcagctgctctagcttgaattttgctcaagctcagtgaacacctgctctgccgggtgcacgtgaaaggggcaaggatgagaaagctgtagataaagaagacaggacgcagggggtctgtctaagctctatcccctgccttcagcactgagggatgaaatccaactcttagggaacggtggccacgtgctgggccagccccaggctctcaggatctgacagtgggtgacgcagagccaggccttgcccctggggagctctccagcatacacctccctctcccctcccagcgtgccgcaaagcaggcgtcaacgccattgttaatgcacggaggaggaacctgactgttagacctgggttttccagggttgcacggcttctgggagacggatgtgaccctgaggacagggcacaggccagtgtaatgccaggatggaatgagctgtgatctgtgctgtatagaggcctaggccaaggtgggactgacggatgaccaggtcagccgggtcactgaaaacactcttgggtcctcacctgccggttcccaggagtccggaactgccaggagagtggtggcaggtcccccatcctcagctgggtgggcctggatagaacagcaaggcgagggcacatttccctggccattccctccaggcacagctgtgacctgttcattccaaatttgtggaagtatttccacacacacagaactgcaaatagcagtggacatggtgagaggcgtttgcacatgggataggcaggattttggaggcagagcctccagggcttgccgatgggttagctgcagggcttgagagggaacggagaatccaggatgatgtgttcaaatcggtccattcacctcttccgttccacgcctgtgctgggcactgggagagacagatgcacacaggagccccggccgaggggaggtgtggggggaagcccagagtgtctgggcagggtaggaaacccagagcgtctactgggagctgaaggcttaggtccacctgggtgccgtccaggttctctgcatgtagaagtataggctgagcttcccggaggaggagcagctgctgttgctggtgaccagcacattcaggaacggagactactctgtcaacagacagggggatgacctgaggtctggatggtctagggggtggtagggcccaggaggacccaggaaagggtctcggggatgcagaacatcctatggagggcatttgggagtcagtgctcaggccactccgggtcactcaggtcatttgccggcccctgtcataattattgccatatgagagtgccacccgtcctatgacatattttatatatttctgtgaatggcctacttgtttgtatttatgaatttatgtttaaaggatgggcaggggtgctcgagaggtccccaggagtttccctctggggagagaggggcccaccccttcccagcagccctctgagccccccgatcgcttggccacagcctctgcctggagaaagcatccccctcggagatatatggacatcagaagaaacctttctctgtcaccaggacaaatcctgttct

SEQ ID NO: 17882 - DNA, 2300 bp, Homo sapien
cttgtttcttgtctcttcttgctagggctgtcactgggacagtccgagatgggggggtggggggagacaatggatgaatggatggatgaatggacagtagtccagggagatgtccctgtgtgtcctgaactgggaccttcctccaatgagaagccttcctgagtgagtttatacagtcatcccttggtatccatggattagttctagggtccccggggatgccaaaatccatggatcctcaagtctctgacataacatggcctagtatttacatatcagctatgcacatcctcccgtagacattagaccatctctggattattcatgatgtgtaatacaatgcagatgctacataaatggtcgtgatactggattctttagggaataatgacaagaacaaactctgcacatgttcaatagaaacataaccgtccaatttattttctgaatattttccatctgctgttgctgaatctacagatgcagagctcctggatacgagagccaagtgtgctttgagagtagggtgggtgaggttgctaatgagtacaggggagcaggtgttgatcaggaggaccctgcactggggcatctggacgtcctgcctcaggacttgagactccagttggatggcacaggcagactcagcccaggtcaaagccgtccccttgaagtttctttttatcccaagctctttctggcccctggaatttggcatcccctaggccctgtgtggaaggacagatgaaccaggttttagataacatgtctagaagagtgagcccctactgtgtgcccggcactttccccacaggatcctctagctagaatatccaagggtcatggagagaaatacccagttaaaatatcagaaatgaaaaagcgataccattagagacactaaaaagaccattaggtaatagtactagcttttgtattctgagatccaacagcagcagtcacttccctccaccgctatgtgtatcccaggaccaccctgggcggggagggctgaggttagggagcagccatggatgctctgatgctggccctgggcctcgggggtgacagtgatgaggaactgggtgcacacatgagtggggcagccgggcctggccagagaagcagcacacacgtgcacagatgtgtttacccacatacacatgtgcacgcacgtgcacaaacacattgcaggcaggcatgttgacgcctcaggcagcggaggaccctgactctgggcgctgctgacccgggcaaggccccactgtgattcgtgccatgacctcagaatgtcactggtgcttagcacctatctgctctctggtctgcctcagtggtctacagcagttacacacaggcagtggtatctgtgagcagctctgtggactcaaaggttttctccctgagaggcatgacccaggccagctgattcatcagaatcaggtgagcgtgacctgctctcttccctccaggcggacttgggggcagtggctacggtgcgggcggtgttggcctctgtggggcagctaccgaggagggtcatccctgagcactcaccaggcgcccgttctacactgcccgtgtagacgattggctctttcgtctccatggtggcttcgtagagtgggtgctgttcccaaatgtccccattcgacagatgagacgtctggggtcagagaggcagtaaccggcctgggaatccggacatgaccctgagttttgctctcagccctgccgtgtgctgtgctggaattcaggcctgaaccctgtgacctccctgccctagatcccaaatctgcccaggtttcccatcccgatggggcagagcctggtcctggcagagccactggtatagagccactggtacagatccactgacggtcctcagaacacctctgtgccctaagctgggtcctgatggtcgctgtgggccccactgaacacacatggtcccttgtccggggcagctgtggaaaatgaaggagccctggagggctggctgaggggagactatcttcccttgtgttcaaaggggtccgggcactagggttctccccaggtatttcttgctctgcgtggtcctcttgaggcctcgccctccttttgcctcgagtattcccaggagggacggtccatccagctgttctccaggaccaaggacccactgttcttcctcagtgacccaggaaaatgaagcctcctcctgttgggacggctcagaatggtggactccacagtccctccgcgagagacgtggtttccatgcgtacaatagatctttctcatcccccaaacccaac

SEQ ID NO: 17883 - DNA, 2300 bp, Homo sapien
ccataggcaattataacacaatagtatttgtatgcctgaacatttctcaatatagaaaagttacagtaaaaatatgatattaaagatgctccatcagctggctgatatgcctataatccgagcactttgggaggctggggcaggtggactgcttgagtccaggagtttgataccagcctgggcaccatgccaatacctcgtctctataaaaagtacaaaaattagctgggtgtggtggcatgtgcctgtagtcccagctacttgggaggctgaggtaggaggatcatagtttcaaagtgtggcacttactggttctccactcactccctcctgccgtcttgtgaagaaggtgcctgcttccccttccccttctgccatgattgtaagtttccggaactgcaagtcaattaagcctgtttcctttataaattacccaatctcaggtatttctttacatcagtgtgaaaacaaatgaatacagtccccttccctgaggtgccttctccttaggcaaccagctgcccccatgctcctcttctgcccccctggtatttcctttcccctcatgaggcccaagtgatccacatggccagccacagccccatcctactgcaggcctgtgtggctgctagagaggccaggctcctttccgcaccccgaggctgcccgatatgctttctgcatcctgtagaaaactgacccactattctcatactggtgcaacttcttccattacctcaaaactggacaacgtgaacttgtttcttgtctcttcttgctagggctgtcactgggacagtccgagatgggggggtggggggagacaatggatgaatggatggatgaatggacagtagtccagggagatgtccctgtgtgtcctgaactgggaccttcctccaatgagaagccttcctgagtgagtttatacagtcatcccttggtatccatggattagttctagggtccccggggatgccaaaatccatggatcctcaagtctctgacataacatggcctagtatttacatatcagctatgcacatcctcccgtagacattagaccatctctggattattcatgatgtgtaatacaatgcagatgctacataaatggtcgtgatactggattctttagggaataatgacaagaacaaactctgcacatgttcaatagaaacataaccgtccaatttattttctgaatattttccatctgctgttgctgaatctacagatgcagagctcctggatacgagagccaagtgtgctttgagagtagggtgggtgaggttgctaatgagtacaggggagcaggtgttgatcaggaggaccctgcactggggcatctggacgtcctgcctcaggacttgagactccagttggatggcacaggcagactcagcccaggtcaaagccgtccccttgaagtttctttttatcccaagctctttctggcccctggaatttggcatcccctaggccctgtgtggaaggacagatgaaccaggttttagataacatgtctagaagagtgagcccctactgtgtgcccggcactttccccacaggatcctctagctagaatatccaagggtcatggagagaaatacccagttaaaatatcagaaatgaaaaagcgataccattagagacactaaaaagaccattaggtaatagtactagcttttgtattctgagatccaacagcagcagtcacttccctccaccgctatgtgtatcccaggaccaccctgggcggggagggctgaggttagggagcagccatggatgctctgatgctggccctgggcctcgggggtgacagtgatgaggaactgggtgcacacatgagtggggcagccgggcctggccagagaagcagcacacacgtgcacagatgtgtttacccacatacacatgtgcacgcacgtgcacaaacacattgcaggcaggcatgttgacgcctcaggcagcggaggaccctgactctgggcgctgctgacccgggcaaggccccactgtgattcgtgccatgacctcagaatgtcactggtgcttagcacctatctgctctctggtctgcctcagtggtctacagcagttacacacaggcagtggtatctgtgagcagctctgtggactcaaaggttttctccctgagaggcatgacccaggccagctgattcatcagaatcaggtgagcgtgacctgctctcttccctccaggcggacttgggggcagtggctacggtgcgggcggtgttggcctctgtggggcagctaccgaggagggtcat

SEQ ID NO: 17884 - DNA, 2300 bp, Homo sapien
ccccacttccatgcacatttcaagaatgcagatggacacctctccctttggtgctactgtctgagggtgtaagattttaaagtgagcatctggcggtagtagcatttttagatatattcttggctaagtttctcattgcagtgcctttctttcctgccagtagtttcacagctatttatccagcttggagaaccttccctaatttcatatcttctagccaggtttttacatgtctgtcaccacaacataaacatgtgagttgaataacttttaaaagcagagtctgtctgtaaacaagtttttgccttctactttcaattgccttcttagatgagctaagtgttgaacggccggctcagtgctgtttttgggactatggaatgcatcttcctccaccactcccctcatttaatgaaaggactttcttctctctccatctagcacagtaatcgctaatcccttagacaatgttttcccaaaatttcaggcagctattctatcaacaaactgataattaaacttgtgtcacatctttgatattctgttgtattaattctgttggggtagtctttaatcttcgtgaaactttttctttccatattaggaaatattttcctaatatctctaaagcctaacttgtccatctgacttactgtctgaatcttcccaacttatgcatgcccacttttattgtttaaatttgtttcttttttttttttttttaaacatagggagactgcattgcttattgatccaaaaaattcctgttcttcatcccgccagtgggttgctctggttgtgggacatgaacttgcccatcaatggtttggaaatcttgttactatggtatttaatatttttaagtgctcaaatatatttatcttcatcctactccacattattttggctacatagtatttcaagtttggctgcaacactgtgccaaaaaataattgagtgatagaaaagtattattttaaaaggtccactttgaaagggcttatcagaatctctgcattgaacaagggcatatggacagtctttattcaacagacacttcctaaactgttctaaaatttgtctgcaaatgggaaaagtcaagatactaatttgggtgagaggaaaagattcctcttaggtgtagatgaatgaatcatgcagtgagattccaggctaactgtagtttcttgaatcttatttgttaatctgactcacagctgaaaagtaacctgatgaataacagactgatctttaattagagagaaatgtttttaggagtcagttttttcattgcctaaaatgttaagttgaaatttaatgaaataaaagtaaacaaactgcagagtgactgcagaataaagctgtattaaaattccagctgttctgttgaaatccttataatgtttgcagtaatgatctctgtccttcagtcctgatttttcactcttactctaagtaaatactatttatgaatgccaactgtgttagagcttgggagcacaggatttaataagtgaactagatgtacctctgcaattaaataactggatattctggagccagctagattccctgacattttaggctgccaaagagcagaacctgatttgaatgtagattgagtccatacgttatataaataagaatgtaagacatttatcaactgttacgtgtctcagagagtttctacagaaagtcaacccttgaaaataaatcttttccttttattttggatgtttaaaattttacaggtgaaaaaaattctttgaaatataatttcaggccgggcacggtagctcacgccagtaatcccagcactttgggaggccgaggcgggtggatcacttgaggtcacgtgtttgagaccaccctgaccaatgttgcgaaactccatctccactaaaaaaaaaatagaaaattagctgggcgtggtggtatgcacctgtaatcctagctactctggaggttgaggcagaagaatcgcttgaacctgggaggcagaggttgcagtgagccgagatcacgccactgcactccagcctgggcaacaagagcgaaactccatctcaaaaaaaaaaaaaaaaagaaatataatttcatgtggaactatgtgttggtgcctgtattcaaatatgtgaagaaatggccttttcttctaatgcagcgagtttgctactttgtaccaaataatttttttgcttggctttgagataactttatgattttattttgaaactacaagcaataaattttagtaggggaaatgtgtacattcttattaaacaactttttactggttt

SEQ ID NO: 17885 - DNA, 2300 bp, Homo sapien
tggggaacttggaaaaacctgctgcacctgaaaataactcttttatgtatttactgggggagagcatcccataaatagaatgtcattctcttcacacatattcttagaagaggaggctaatacattaagcagaaatattcattcacactttagtatgagtgaatttatcagtgtgttcttgaataagtcttccttggaaggaagaatagagagagcttgaggaaatggagcctgaataggaaaaagagggagaacaccaaaggaaattagggactccaaaggtaaagttgaaatttcttcacaaataagcttagagccaactttggtagagaatgccctcgatctagaagtttgtatcctttgaaatgggagattctacaattatattatattttttttatttatttttgagaaggagtctcgctgtgtcgcccaggctggagtgcagtggtgtgatcccagctctctgcaagctccgcctccctggttcacgccattctcctgcctcagcctcccaagtagctgggattacaggcaccccccaccatgcctggctaatgttttgtatttttagtagagacggggtttcaccatgttagccaggatggtcttgatctcctgaccttgtgattcgcccgcctaagcctcccaaagtgctgggattacaggcgtgagccaccgcgcctggcccctattttatttttattaatagtcattttctcctaaacttatgtcagttgaaaagtatgaagcccttacttaaatcatcccaatgcctggcttataataagtattcgagaaaagtccattcctcttttctctcacaggtccttggtagttttaacacttcagcctccagcttcttagtatgagtgttttatcagaccactttccttcttaaagacagcataaaagcactggatgaattggggtagagaaataagccatgctagaatagaaagggggaaagagatgcaataaagcctacagtttttggctggtatttgctctatggtattaatgtaaacctatttaaatttttcttttttttctttcttaaagaatgtaattgaccggaaaccataccctgatgatgaaaatttagtggaagtgaagtttgcccgcacacctgttacatctacatatctggtggcatttgttgtgggtgaatatgactttgtagaaacaaggtcaaaagatggtgtgtgtgtctgtgtttacactcctgttggcaaagcagaacaaggaaaatttgcattagaggtaaatgtacttgaagaggattgttccagcagtccataactccaggttggggaatttacatttctggtcaattattagtacagttatttataatttaatctgaaagttgtgctacttggtttatttttaatagaatttaggaaatgccaaccttggtgtttcgttattttacaaaataataattaagagaatataagagtggaatttctctagggaatgggttggaaaatatgtagttatatttttcatatcaagttataaatggattaaagtttggccattgtattcaaagtttggagctaaggcagtcttcggaggtagggctccctgggattcatttctagtaatttaagatacattggcttgcaacaggattcctttgtgggtttcaatatgaattataataacatatttattagatggttattttgtttatacttttataggttgctgctaaaaccttgcctttttataaggactacttcaatgttccttatcctctacctaaaattgatctcattgctattgcagactttgcagctggtaaagtaaatttcattttattgctgaattgtaataactttttaaaattttgtgacttttgatgcaagagtatatatatatatatatatatatatatatatatatctcaataaatgtttatatttattttgtgaaggtgccatggagaactgggaccttgttacttataggtatgttaatgatgtattaccctgccttatcttttcaaatcactgatttcaaaagggcttccctcctaatcacagttgagtagcttctgctttacgatatggtgtaaatttttctaccttcccccacttccatgcacatttcaagaatgcagatggacacctctccctttggtgctactgtctgagggtgtaagattttaaagtgagcatctggcggtagtagcatttttagatatattcttggctaagtttctcattgcagtgcctttctttcctgccagtagtttcacagctatttatccagcttggagaaccttccctaat

SEQ ID NO: 17886 - DNA, 2300 bp, Homo sapien
taaagaaatatgaagattatggataaatctccttgcctttgacactttaaataacattttttaaattgttatttcatttttatttttttagagacagggcctcactctgtcatctggagtgcagtggcaccattacagctcactgcagcctccatccacctcctgggctcaagtgatcctcccgtctcagcctcccgagtagctgggatcataggcacacgtcaccacacctgggcccactgttttttttttttttgagacagagtctcgttgtagcccaggctggagtgtagtggcgtgatcttggctcgctgcaacctccgcctcccgggttcaagctattctcctgcctcagcctccctagtagctgggactacaggcacatgacactatgccaggctaatttttgtatttttagtagagatagggtttcaccatattggccaggctggtctcgaactcctgacctcgtgatccacctgcctcagcctcccaaagtgctgggattacaggtgtgagccaccgtacctggccctggcccccctttttaaagataatttcagttacattatatatatatatatatatatatgcatttatatatatacctcctcaatttgcaaggtatctacagaactgagagagccacagatagttcaccattaaagaggccatgattgctgaaggatcttttagtttaaaaagaaacaaagatgaaaatggggaaaaggtgaaacatcccattttattttattatttatttatttatttttttttgagacagagtctcactctgtcgcccaggctggagtgcagtggcgcaatctcggctcactgcaacctccacctcccgggttcaagcgattctcctacctcagcctcccgaatagctgggacaacaggcgcccgccaccaagcccggctattttttttttttgtatttttagtagagacggggtttcaccatattggccaggctggtgttgaactcctaaccttgtgatccgcccgcctcggcctcccaaagtgctgggattacaggcgtgagccaccgcgaccgcccgaaacatcccattttaaacattaaatcatggaaacaaaaatatagtttttgaaatcactccctcaaaagtccagatctcattggttgaagtaacctagattattaaaggtttttttttttttttttttttttgagacggagtcttgctctgtcgcccagactggagtgcagtggcgcgatttcggctcactgcaagctccgcctcccgggttcacgccattctcctgcctcagcctcctgagtagctgggactacaggcgcccgccaccacgcccggctaattttttgtacttttagtagcgacggggtttcaccatgttagccaggatggtctcgatctcctgacctcgtgatccgcccgcctcggcctcccgaagtgctgggattacaggcgtgagacaccgcgcccggctattaaaggttttataacaaaactttcaaatcatcctttgaatttgctactaacaggaactgaggccagagagcctcaagtcagggcttttcgctgacctggaggcagaatccagtttggggttttgcttgtaactggtattttatgcatgcgaccctggctgaactgaccaactgcgtaggcttcagtttcccgagggccccttatgcctttccttcctctgatcaagcccttcccggctccttccagttggaaggccgcccccagtcctgagcggcgccgacaggtgcagcgcccgcctcccgccctgcgctcgcgcgggcaaccctacgccctcccgccccgccggccgcgccctcgtcctcgccgctccgccctctgccccggcgtgcgcgcgcactccacgggggcgcgcccggccggcggggccgcgcacgcagccgccgccaccacttccccctctccatccctccttgctggccctcctccccttccctcccctccgcccccttccccgtaggcagctcgcccgccagtccgcccgcaccgcctccttcccagcccctagcgctccggctgggtctctcccccgccccccaggctcccccggtcgctctcctccggcggtcgcccgcgctcggtggatgtggctggcagctgccgccccctccctcgctcgccgcctgctcttcctcggccctccgcctcctcccctcctccttctcgtcttcagccgctcctctcgccgccgcctccacagcctgggcctcgccgcgatgccggagaagaggcccttcgagcggctgcctgccgatgtctccccca

SEQ ID NO: 17887 - DNA, 2300 bp, Homo sapien
gtaatctcagctacttgggaggctgaggcaggagaatcgcttgaacccaggaggcagagtttgcagtgagccgagattgcaccattgcactccagcctgggcaacaagagtgaagctctgagttttgttctttttcttttgtgacctgccctaattcctgatgtcaggtccctagggtatttgtgctatgcctcattcttagtgactttatattttatacagtgtgattgcactttgaactaaaatagaccatatccagaaacctgccggtgcaggcttcccagggctaaagagtatgagcagtttgaattgctttttgtctctttgcctttttcttgaatcaatttaccaaaatagagatgttaccatcagattttttttcaaggcactagatcccaaaggctagtctccatgccaagacaatttttctaaagcatgtatatctgaaaatgaaaggatcttagatgcttaccttatggtttctctttagctctagcattatttgtttactggggacactatgacttttggttcagtcctatgaataagcaggtcacaagccaatttttagctccccttacactttttaagtatttattaatcttgactcctatgcaaactgtagggaggctggcagcagaagattcttatccttagttatttatgtggctaagactccaaggcaaattgctctctcaaactgtagggaggctggcagcagaatattcttatccttagttatttatgtgtctaagactccaaggcaaattgctctcataaaatcacaccccatgagatgtgattctgccagattagtaggccttaatgtcttgggtctcttctcttcacccaactcttaacctgggttaagcttattctctttgctaggccttggatagcacattgggtgaggactattctgatgtcaattcttcttgtcaaggatttaagaagcaaacagaaatagagccaagggtggagaaactgaggccccctgacttgccaagctgcgacttctaatcctcttggctaccccactggtctggttcaacctgagctcgcactgatttttttggatttgacgtcaaggcaaacatcattgcaaactcaattccagcatgccagctccagagcaccgtaacctttaaaaacttgggatttcgccgggcgcggtggctcacacttgtaatcccagcacttcgggaggccgaggcgggtggatcacctgaggtcaggaatttgagatcagcctgcacaacatggtgaaaccccgtctctactaataataaaaaaaaagccaggcatggtggcatgcgcctgtagtcccagcaactcgggaggctgtggcaggagaattgctggaacccgggaggtggaggttgcagcgagccaagatcgcaccactgcgacagagagagactccgtctcaaaaaagaaaaaaaaagacttgggatttcaggagaaatgttatagtagcattccagaggcccacgcatcagacacagacatatgcactctttgcagcagagggtattggcttcaccctatcatataagttggctccctaacttatattctgcaaagccctggtggctaatcctttacaaccaaacaggtcacagccaaacaggtcatctcagtttgaagatcatcaacaaaggggttaggtttgctcttgtagttgtcactcccttgggattggtaaacagacctgcagaagtagttgtgaaaagggaagcagaagtactgaaaaaaaaaaaaaaaaaaaggagggctagaaaggaagtgagaaaggtggaaatgtatgactttttcaacttcctgatggaaagataccaagagaaataaaactatgaccagataggaccttcctttggccacatttttatgtgcataatgtcatattgctatccccacataaataaaactatgtatctatccatcaatctatccaatctatagctcacatattattatgacaaattaagttatccatcagtatagcaaacattttaaagcatgtgaaattaatctactttcctttcatgaagaacacaggatgggtaggcagcattccatctactcacatttccaactgtcatttcaacatccattttaagttacggaagagtcaaggctgggacctcatggcatcattttccatggattgctctccaagtttttgtgttcctggcctttggaaccccttcatcatattccgcaggtaagacacatattagtggaattcgagttataatttgtatgcttgaaattgacattgaaggccataatttgtaagt

SEQ ID NO: 17888 - DNA, 2300 bp, Homo sapien
accatgcccagctattttttttttttttttttttgagacggagtcttgctctgtcgctcaggctggagttcagtggcacaatctcggctcactgcaagctccgcctcccaggttcactccattctcctgtctcagcctctggagtagctgggactacaggcgtctgccaccatgcccggctaattttttttgtatttttagtagagacggggtttcaccatgttagccaggatggtctcaatctcctgacctcgtgattcgcctgcctcggcctcccaaagtgcagggattacaggtgtgagccaccgcacccggcctaattttttaatttttttgtagagatagggttttgccatattgggcaggctggtcttgaactcctggactcaagggatctaacccacttccgcctctcaaagtgctgggattacaagtgtgagccaccccacacgaccccacatactcttcaacacatacatacagcactaatttcatgtcactattaatgtgtcgtgctataggttcaatactgtggctggaacttgtagggaaatacttaccacataagaatgtacgatatagctgcgaagtcaagctttaaaaaacgcctgtaatccttgcactttgggaggccgaggtgggcggattgccggagctcaggagttggagaccagcctgggcaacacggtgaaaccttgtctctactaaactagaaaaaattagccgggcatggcagcgtgcacctgtaatcccagttactctggcggctgaggcaggagaatcgcttgaacctgggaggcagagattgcagtgagccgagattgtgccaccgcactccagcctgggtgacagagtgagactccgtctccaaaaacaacaacaacacgtgatctccaaacccaaaagtaatctttcagttcttctgatagtccccagcactttgcttcgacctttgtagcaattctacttcagcctgaaatttcttgtatgtacagcctgtagctcctaacttattgcaaaatattgtagatgagaactctgtaagctgtaattggcagaataaccaccaacggctaagtgtggaaagtgtctgcctttcagcaacgtttacactactgaatttaccagggtgatcccaacatcacgaatcctttaacaacttaacatgaagcagcacgtagcagttacctgcatgggttctggaattagactgcttagattcaaatctcggttctgccagttatcatctatctaaccttaagtaaattacgtaattgctctgtgactcttttccgaaatgacaaatcacaaatgtttttgtcaattcaagtgtcttctgctttagtaaacatagtagaagacagtagtcaatctctttttttttttttttttttgagacaaagtctttctctgtcaccgaggctggagtgcagtggcgggatctcggatcactgcagcctccgcctcctgtgttcgagggattctcctgccttagcctcccaagtagctcagactacagccgcctgccaccaagcccggcgctctcttgctggcgcatgacaaccgtgcgttccaccctacgactaattttttttttttttttttagacggagtctagctctggctggagtcagtggcgcgatctcggctcactgcaacctctgcctcctgggttcaagcgattctcctgcctcagccttacaagcagctgggactacaggcgtgtgccaccacgcccggctaatttttgtatttttagtagagacggggtttcgtcattttggccaggctggtctcgaactcctgacttcaggtgatccaccggtctcggcctcccaaagtgctgggattacaggcgtgagccaccgcgcccggcctccttttccttttttaactaatggaataaacggcaatgtgccaagcatacagcaatgcccattccccggccttcagaaagcctcgggcgcaggcgcagctcgcgttcaagcgctctctcgctggcgggggacaacagttcgttccaccctacgcccaacgttgtctccctgcgcacgcgcggccgtactccgccctccttactccaccctcccccactcccgcgagcacgtgcgcgtcctcgctgctcacatttcggcggagggcgcgctccctggaaaattccactcctgtgctagctccaccctatgcggcttttctcctacccgacgctcttcactctcagctcccttcccggcggcctttgcgggaacaagatggcagcccccatacctcaagggttctcttgtttatcgagggttttg

SEQ ID NO: 17889 - DNA, 2300 bp, Homo sapien
tccccgcactttgagaggtcaaggcaggcagatcacctgaggtcagggtttcaagatcagcctagccaacatggtgaaacaccatctctaccaaaaatacaaaaattagccaggcgtggtggcacacgcctgtactcccagctacttgggaggctgaggcaggagaatcacttgaacccgggaggcagaggtttcagtgagccgagattgtgccactgcactccagcctgggcaacagaacaagactctgtctaaaaaaaaagaattattgtttgcagaggtcaactggaaagcaagggacatgtttggcaaccaccacccatccctacctacatacactcaatgatcttggacatcaaaggttccagacattgggggtttggagggggtttgaagggaagaagccaagagacagcctgcgcctgcggggccagattgcctggtgaagcaggaagcccatcatcaagggaaaagtgatgggtgggcaggcaggagctttgttctgtggcttccccaagaatccatgcccttccggatccaaggaggccggctcagacagcactgactcagggccccccagttactgtgcctagcagcaggaaggaggtgaggggtaagaaaaatggggaaaagcgagagagagtagccacagttttcatgaagaaaaggagaaggggccaggtgcagtggctcacacctgtaatcccagcactttgggaggctgaggcaggtagactacttgtcaggagttcgagaccagcctggccaacatggtgaaacccccgtctctactaaaaaatttaaaaaaaaaaataaaataaaatttgccgagcatggtggcacatgcctgtagtcccagctactcaggaagctgaagcaggagaatcgcttaaacccaggaggcagaggttgcagtgagccgagatcacgctggtgcaactccagctgggtggacaaagaatctatctcaaaaaaaaaaaaaaaagaagaaggtagaacttaggatgacaaaatgaaggtgtaagaaatggaggcaaaactgtgttcactgtcttctccttgcccacctctctcccgccaccattgccactgtgcttgtcgactttggttcagaaggaggcctgggttgtagggacggacacctgggtggaggctgcggctctgtcataaacaacactgtggttctagggaagtcccttgacgcctctgctaggaggctttgttatagtccctgaggctgagtaacggtgatggtggtggtttggatgggcaatgtaggggagtcagagctctggatgtaagtctctgagtgagctgctttgtgaccttgggtgagtctcagtgtctgcatctgtgaaatggggataagaacattcaccatacatggctgtggggaagactcattcagataaggcacatgaaaagcaccttataagctgcctcagtctgtacaaagaccaattacggtactattaggctgtctttcctgccctcaacatccccattctcaaatcccagctcagcagcacagggtcaggggggtgcaggcagccagcgcagactgccaggagatgcagcttggccccttagtgtgcctgttgcaattgctgccaggagcctgagtggagcagaggggtggagagaggggcacaagctcatctgcggttgctatggtgccccatcctggatttgcccatctctcctaatggagcaaagggcaggcagagggagggagggagaaagagcacaactggtgccttcgtctccccttccctcccatctctctccctcgggagcagatgtggatgggggatggagggagcctgaatactggataggaggggaggaaagagtggggtgctgggattaagaggtttgagatagggggccgcactgagacagtagggggcagggccctcatacctacatccagaagccagctggtgacgttagagagaagaaaaaagcaggcgagctggcaccagcgtgagagggagacggagagaggaagaaggaacgccagcataggaggcgtggaggccgacagcccccagactgcagccagcctctgcctgggctctcctgagcctggaccccagggtcctgagagctgccccaaggatgggcaccaggggagcggtcatgccccctcctatgtgggggctgctgggctgctgttttgtctgtgcctgggctctggggggtccacggcccatccgctctctgccccctctgtcttcccaagtcaagccaggatctgtacccatgcaggtgcccctagagggggccgaggccgccct

SEQ ID NO: 17890 - DNA, 2300 bp, Homo sapien
cactggagagtccccaaggggcaaaaagcaaacatggcttctgccctcatagaatttacagttttgtagggaggacagcttttaatcaactgaccccacagacagattgcaaattacacctgcgcaagtaagtgcaacaaaggaatgatctcagagcctggggaggaggaagggcccaggcagggagatttccctaaggtagtgaggagtgagttcaatctgaaggatgagtaggagtttactaagcaaaaagagaaaagtcttgcaagaaaagggaatagcttttcttgcccacatgtatgggagcctgccgcaaggttgatgggaatgcagggaacagagaacaaggtggagcttagcaggggatgtggctagagaggcaggggttagatcacacaggggtcagatcacaagatcacacattagcctaagaacaatgggaagccatgaacaattttaatcacaggctatgaacacatttccattctgaaaaggtccctctggttgcaggactcaaccctccaccctcttcccctcaatgcaccctcaggtattagaagtcactgagttctgcagctgatccttcctccttttcccttgcatctctcaatatctcccactgggactatttcaatgggctccctgcctccagtctcacctcctccacacaaaaagcttgatcttatttgatcctcacaacatgcctgcaagcaagcaaaattgcaatccttatccctgtgtaaagataagaaggccgggcgtgggcgcggtggctcacgcctgtaatcccagcattttgggaggccaaggcgggtggatcacctgaggtcaggagttcaaaactggcctggccaacatggtgaaaccctgtctctactaagaatacaaaaaattacctggagcgaggcaggagaattgcttgaacccgggaggcagaggttgcagtgagccaagatagcgccattgcactccagcctgggcaatagagaaagattccatctcaacaacagcaaaaacttaatgtgttgtctgtagccgttacattatgaatagcacaaaaattgagtaaatattcttccagtatttgaaaccgttttctgactcagcaaagaagttgctcccatcattgacaatccaattaagttttgtctttttcagttttatcaaccaacattcacctttacaattacactcctaggtcaactgcaatcacagtttggctacccatataagagtttggcaaaaatcaatgaaagcattctgtgagaaagagttatatggaatttgccaatttactattaattgtaaattgtgaactacacatcctttatgtcagtaaaacttaacgacaaatttttgtacctatatatgtgcatacattcccgttctccccccagagagctggttgttacacatttatcagtacagcactgggtctagaacacgattcatgtactgattccacaaacattcactgggtgccaggcggacggagatacagattaatgatgaaatgactcagccaaggtcacacatcgcaagcggcgtagatggcagaaccatatgtgctcccaaggccagcggcgcgctcccaggaccagaccatggtttccaaggcctctccactctaccgaatgggatggcctgggcctgggcgcccaggaagtgaaaagcaaggaccgggaaaagagaccaacgccagccaacagacagctcaccgccaataggggccgggggcgcgcgcggcgtcactcgccgtggaggccagcgcgagcacgccctggggaaagtggcgtggctaagcccttccggaagtgacgtcggcttgggggcggtgctcggcggtggcggagcgcggcctgggctcgcgctgggctccgcgcgccccccgcccccctctatgaggcagaggccgcggcggccgttagcgctgtcgctccgggggccgcggcgggcggggctccggcggggcccggcctagtccccaccccagcccggctcccagccgcccgccctccctccctctccccgatgcaggaggccgagctccgggatggcgaggcggcggcggcggccgcttcgtaccgcgtcctgagccgcctccttggctatggagaggcggcccccgagccaggccctccgccaccgcccccgggccatggccccccgccgccacccttcctcgcgcggcccggcccgcggggctcccggccgccgcagctgatggtgttccgcaacgtgggtcggccgccggaggaggaggacgtggaggcggccccggagccgggaccctcggaact

SEQ ID NO: 17891 - DNA, 2300 bp, Homo sapien
cgaggctggaagggtgcctggtcctcacaggaggtggaaggaggccagggtggccagagcacagaggaagagggtgtggtgagtgtgggggccaaggcgcgtcccacagggcctggtggtcataatattaaaataatcaatctggactgtcagatgccagagaggtgactgccgcttggagcagggcaatggtgtaatgaagtgagcagactccagagacatctaggaagcagagtctactccgatggggggatggagcgctggggccataatacctgattcttggttctcagcaactttttcaggctgctatctctgtctttattttatagctgaagaaataaggaaacttgagtgaccttgagtgatgatcttgaggtcacacagccagaaaagggccagggccagtaccaatggcaagtgtggccttttctctgtgttagccttcttgatgccaggacagtggtcactttctcaccatcctccctgtccccaagcctcggtgcccctgcaggtcacccagcattccctgcctagcacccaacccggtggagagccaggagttgcaggtggtgggtgctgggtgctaccttcatttccagaggttggttaaatgagttagcgcatctaacagcagctgcctggggcatagtaagcactcagcaagtattcttgactgtgtggctgttatcctgtccccaaatgtggggccaggcaaactggcagggggaggcgggaggaggatctggagtgaggatgatgccatctgtcttcttctgaccagagagcccagcccagggggctccctcatggtagtgacccaggggaggctgtttgtccctgcagagccactgtccctgccacctgtccagctgcctctgggcatcacagactggattagggagtggttcagttcataggcagggccacatgtgtgaaggggaaggcaggggtaaccgggagggatgggcagggctggggtgagggggtgggtggtttcaggggtggggctgacagcctctccctgaagggagccccatgtgcccccgggagactttcggaatctgctgagacctgccctgggaggggacatggtcttagcttgactgggacccagctcttgcctgaaggaaaccagtgtgtgcacctgttacctctgcccaggctgtcagacaacaggaagcactcctggggggcggggggcaggcggagtcacacctagagctttcccctagtctcctctgaaatgcactgtccagcgtgagaccaggggatggatctgctgaccttagagaagagtcattgcaggcattcccctgcctctaggaatgactgctccagtctagtctgaaaaggggctctggcctctctccttgaccaaagggagaccccgagattccacagttgctctgtccttctgcaggagattcttctcctttgtaggagatggggaggggaagatcccagggcaggttggagctgaggggcctggggagcgaggttgagggaatgaggacccttctgctcgctctgggttgtcaaggagacgaggcatgccagcgctgggccagcagggggctctgctggccacgggacctgcctgccaggcagccgagatgtgcacccttcattgtgcgggctcatttccaggagtgcctgagaggacgcggcggtgtctctgtgggcacacccttgtgtgtatgttacaggtgggtgtgagcgtgtggcgcgttggaatgggcatgtgtgtgcttggtgggtttgagggcccccacactgagccaggtttctgccaagaaaactcttccaagttcctgccggcagccttggaagagtttgtgcatgactggggatggcagcctctgtggatggcaggcccccatcaacgccaaggacctgatgcgtgccaggttcaggctgggcgatccccctgtgcggggacctctagggctccaaagatgacagtagagactctgaggaggtgcagtggagaagggacggcagggaaaggtcttccaggcaggaggtgcccagctcctgggcaacctctgtgggcagagacttctcctgggcaccaaggagagacctgttcatttgtttcatctttcaacattttttttttttttgagacagagttttgctcttgccgtccaggctggagtgcaatggcgtgatctcggctcactgcaacctccacctcctgggttcaagcaattctcctacctcagcctccagagtagctgggattacaggcacctgacatcacgcccagctaatttttgtatttttagtagagatgg

SEQ ID NO: 17892 - DNA, 2300 bp, Homo sapien
ggggcctccactggcccccgcatctctgccagccggagggtggggcccaggcattcctgtggttggaagccaaggctggaggccaatcgggcctcggcagctgctgacgccaccaccgacgcggcgaggcccctccacacccatcctctcctccctcctcctcccgccagccagccgagagagagtcgggtgggggtgagggggagccgcagggagggcagacggagggggaccggaggccctggccagggcaacacagtggtcagtgggggggttagccggagctgggggtgggcggaggcgggctgggatgctgccgccgccgtgatgatgccgggagcctggggagacggcgggatggcaggagggagaggtatgtgtgtgccggccctgtgccagctggagggggctgagtgtgcgggggtgtggtttagcttgtcctcatcacatgatgtttgtgcctgggactggaggtgtagttatttgtgtgtgtttcattgtgttttactgtgtgtgtgtgtgtctctgggtgtgtatcttccagtgtctcctcgtagtgtggtgtgtgtgtgtgtttggtttcaccctcccaccctttggttctttgccttgagttaggctcctgggcagctcagcaggggccaggctgggcccaggccacaaggccgctgtccctgggagctgactccttttttggctgggcctgggcgctggccctgtcactccttagcaatgcagcgtcagcctcagctcccagtgccaaattccaggcccaggggtggcagaaggtggctcaagtcccctccttcaagcctggcaggaggtgggcaaactccttctcacccctgtggctcaggagccagctccccattcccggggatggagggacagctgggctctgccagcctctgccccacccagacacacccctagccggctttcttctctcatctgccaccttgactggtctcggtggggttttccggctccacccgaggagctttgggcattggtggacataagggggcaggcaggcggtggaggccaggactgggggaggaccccaggaaacagatgctggaatgtttgtggctagggcagtccttgtcacagtcttagcgaaatcccacttttgctggagtttgcctgcgtctcaaaggcttcttgcttcttctttgttctctccctggacctgcccttccacccccacccacttatgcctctccctcgttccccccaccgcttggtcctctcccttcatttccctcctgggctccttgacctcctcgggctgccgttcccctaccctgtgggacttgtctggccctgcttacctgtctctgtgtctctggccaggcctactcccaggatgcctacctgaaagggaacgagccgtattctggagaggcccgcagcatcccagagccaccgccgatctgctacccccgcaagacctacgcccctcctgcccgggcctccaccagggccactatggtgcctgagcccacctcagcactgcccagtgacccccggagtcctgctgcctggagtgacccggggctccgtgtgccacctgctgcccgtgcccacctggacaactcttccttggggatgagccagccccgccccagccctggtgccttcccccacctctcctcggagccccggacgccccgtgccttcccagagcctggcagccgggtgccccccagcagactggagtgccagcaggccttgtcacactggctgtcaaaccaggtaccccgccgggcgggggagagacggtgcccagccatggccccccgggcccgcagcgcctcccaggaccggttggaggaggtggctgccccccgcccgtggccctgctccacctcccaggatgctttgagccagctgggccaggagggctggcaccgagctcgctcagatgactacttgagccgggccacccgttctgccgaggcactggggccaggggcactggtgtcaccccgctttgagcggtgtggctgggcttcccagcgttcgtctgcccgcacccccgcctgcccaactcgggacctgccagggccccaggccccacccccgtctggcctgcagggcctggatgacctcgggtacatcggctaccggagctacagcccatcattccagcgccggaccggcctcctccatgcgctctccttccgggactcaccctttggggggctgcctaccttcaacctggcccagtcccctgcgtcattcccaccagaggcctccgagccacccagggttgtacggccggaacccagcacccg

SEQ ID NO: 17893 - DNA, 2300 bp, Homo sapien
ccctggagcctcctgcggaggatcgcggcgatgaggtggtcctgaggcagaagcccccgacgggccgcaaggttcagctgacccccgcaagacagatgaaccttggatttggtgacgagtccccagagccagaggccagtgggcgaggggaacgcctgggcaggaaggtggcccctttggccaccaccgaagactctctggcttccatcccctttattggtgagtgatggtacatgtggctgtcctggaggacttagctgtcggctgtctgtgtcctgctgtaccccatctgcctgtctgccatgggcagaattcggctgggtgctggtgggatcatcttgtttctctgtcaattcattcatctgttcatccatccatccatctgttcttccatctttctttctgttctctgtcatcctttcttccatcctacctctcattcatttatcctttcagcatctttccatgcactctttcttttttccctctccccatccatccatccatccatcatctgttcttccttccttctttccttcctctctccctcctttgttcattcatttgttccatccattcatccatctatccatccatctattcttccttctttccttcctctctccctccttcttttgttcattcatttgttccatcctttcttccacccattcatccatctttctttcctttgactcttccttccattctcccattcttccttccatcttccctttgtatctttccctctttgtcctttccatccaccctccatccctccatcgactcaacagatatttgtgtcaggccctgtgcatggctccatgctctcctggactggatggcccagcagagggtgttggacatgcagggacaatccattgggatgggcgtgtcgtgggacagggagcttgaggagaagggctcagagaagggctatggtgagaatcttggagaaagaacatttgggctaagacttgaaggatgagaaggagtttatcaggggaagaatattcaaggagagggaatagaatatgcaaagaccctgaagggagagaggcaggacccccttccaggttgtgaggaccctttcaggcccaagggtctcattagtcactggggttggcttttgagagcagagggaaccctctaaggcttgccttgccttcgactggatgcaggagagggagaggcaagagagtagagtggctgggtgatgcccaggtttctggccgggcttgggggtggtgcctcacccccgtgttgggagtgagagggggacaaagttcaggactgttgaatatgaggtgtccaagagggagcaggatagacggggctggggagaaagagcaagatgcagggtaatggagagggatggtggtagatgggagatgagctcaccctaccagacagtgagagggaggaggcctggggcagggggaagacacagccctggctcccccagccagccttcggtggagcagagacacagccccttctgctagtaaggaaggctctaggctgtggccgggagaggcagtctcttcttccacagcgcagtctgtttgagggggagatgtcatctctgcccttgaggagccccagctgatgggggagcttttgcccttaggaagctctcagtctgatggggaagacactgcccctgccctcaggaggctcttggtctgagaggggagacataattcattctctctgagtgccctcagtctgatgagggagacaccgtccctgccctcagcaggctcccagtctgatgggggaatattggctctgtcctctggagcccggtctaaggagggtggctcagccccactcctgagggtaaggattccatggccacagtctggacagtgggccagtcatgcttgacagtgggcatgttgccagcaggaccctttgggatgtgtctgagcctggaggcgagtggcacgggggctggcaaggctagggtggaggcaggcaggctccgctgtctgctgccttcacacctttctccttccacatgcatagatgagcccaccagccccagcattgacctccaagccaagcacgtccctgcctctgctgtggtctccagtgccatgaactcagcccctgtcctgggcaccagcccatcttccccgaccttcactttcaccctcggacgccattactcgcaggactgcagtgagcactccccacacccccagccccaccctctccctcgctgcccagtcccaggggtctctgttgggcctgctgcttgatgtctggcctcttcctctggtttccgcttctcc

SEQ ID NO: 17894 - DNA, 2300 bp, Homo sapien
gatttggcgttgcagattttacttgagtatgtggcctgatggctggcttttatgtttgtatgcttttgagacaaggtctccctctgtcactcaggctagagtgcagtggcacaatcacggctcactgcagcctcaacctcctgggctcaagtgattccccctgccttagcctcccgagtagctgggactacaggcacctgccactacatccagctaattattttatttttttgtagtgatgaggtctccctatgttgcccaggatggtcttgaactcctgggctcaagtgatccgcctgcctcagcctcccaaagtactgagattacgggcgtgagccacggtgcccagcctcctgcttttactttcgatccaactggtggcctgatttctttccagttgcccaatttcagggggctgggctggcatctcaggccaaaagggctgaaagggtctctctgtggctgcagtgacctggagaaatcggtggagaagatccagagagacgtgtcccacaaccaccggctggtgcccggccctgagctggaggagaaggcactggtgctgaagcagctcggggagacgctgacagagctcaagggtgggtctggggcctgcgaatgcagcacgttgttcagggtggggaagtctgccatactccagccaccatcctctcctcccagtctgtggtgctccctctggccccagctcatgccttcctgtctcctcagctcacttcccgggcctgcagagcaagatgcgggtggtgctgcgcgtggaggtggaggcggtgaagttcctgaaggaggagccccagcgcctggatgggctcctcaagcgctgccgcggggtcacggacacgctggcccagatccgaaggtcattctgtccctgacctctgatttcccatgggttcacacaccgggcccagacccataggtcatactgaacccttaccccaactcccccaaaggtcactggcgtgccgactggactggcacctcagctctgccctgtgacccctgcatgctgtagacctggcttcctcttataccaggggcagtcactcctccccaggccctcccacagcatcccagagcctgcctcccaccccacctccctcagagcagccttcctgcagaagggtcaccacctgctggcctcacagctgctcccaactctcccaaccccaggcaagtggatgagggtgtgtggccaccccccaacaatctcctgagtcagtcccccaagaaggtgacggcagagactgacttcaacaagagcgtggacttcgaaatgccaccccccagccccccgctgaacctgcatgagctgagcgggccagctgaaggagcctctcttacccccaaggggggcaaccccaccaaaggcctggacactcctggcaagagaagcgtggacaaagctgtgtctgttgaggtgctggggccagggattgtgggtggggccatgagccaggttcacacattcttacgaccatccttcctagagtggggagtgccaatcctgtgggtctttttccttgggggaggagggccagtgccctaatggaagcctaagaagcataatgagggtgacattagccctcctagacagaaagcgtattataaagctacaataatcaaagcagtatgatgtttgcccaagaatagactatgtagtcagtgaaacaatagaatgcccagaaatagatctaagtttatcacgaatgtagtatataatgagggtggcattcctacccatggggatgccatgtgatacccacgagaagtcaaagtgtcttcctggaggtgggatcaaatatgaggcttcgttttctattccttgcctacgtggcttgggggaggaggctgaggccccagaggtcctggagcaggagagctacctcaatcctgactcctggctccctgttaaggctgcagagcgagactgggaggagaagcgggcagccctgacccagtacagtgccaaggacatcaaccggctgctggaagagacacaggcagagctgctcaaggccatccctgacctggactgtgccagcaaggcccatccaggcccggcccccactccagatcacaagccccccaaggccccccacggccagaaggcagccccccgaacggagcccagtgggaggaggggctcaggtatggggagtagtagggctggtaaggagcccagcgtgggggagtgccctcctcaggagcccaggctgatgggggaggcactgggatctcaagatcattgtggttgggctgccacacaagggaggccctgg

SEQ ID NO: 17895 - DNA, 2300 bp, Homo sapien
ggggagcgcctcgacggccggagctcccccttcggagctcttccctgggcctggggaacgctcgctggttgggttcgggccgccagtgccagccaaggacacggagaccaggtgagggacgttaaccaggcctcagggactgggggtggggggtgcgctgcggagagggttcacagcagagtccgtggcaggtgtgtgtcctggactgagatcctggagtcctttggagaccttgagtagtcttgaagggtcgccagagagcatcttggatgtggcagagagggcattggagagaccagcttgccattttcctcccatccgcaagactggagggggtggttgagaggtccccagacgaggactctggagacttgggtttgcatccattttctaagcctcggtttccccaactgtaaaattgaggggctgaaccacttttagtggctttccagcttaagagtttgcagcagtgagagctgtccagcaccgggacagctgaagtccactggggaggagggtgctgttgaaaaatggtgacgaggaaaggagcacattcgggtacctagcctccaggctgaggagcccctgcccatcgctcagtcccctcctaagggtgcagggctggaggaggtaaccagggcagtaggtaatctgcaccctcaggcagcgctgctgagcagtgaagagaagccattggccttcacacagctcttacgtggcctgtgtggcaggcgctgcacagggtactgtcaatgccaagctgagcaaacccagttcctgtcctggtctagtggggagacactcagcatacctccacttcccttgggtggtatggaaggaggcgttcctcggggcccctggggtctgtggaatggtttgggggaggggtcaggagaaaggcagagcaggcaggggaaagcattgccaggcatggagagatcagcgtgcagcctttagggagggaatgaaaggtgagatgggaggctgtgggcttgatccttaggcattggggccctttgcgttgtctgtgttttggcagccagggatgggacggtgtttcttctggttaccaatcttaggaatggggggctgggcaggagagaccctatgctcagaggcgaggttgcccagacccccttcctccccagggagcgcatggaggccatggagaagcagattgccagcctcacaggcctggtgcagagcgccttactgcgaggctctgagcctgagacccccaggtgaggcccctctcccaacaccactgccagggcctaggggtggagcaggaggaaggggaaatgggcatcggctctgccagtgtctcactgggtgaccctgggtgaatcccttcccttctctgggactccatcctgagatcggagagctggaggagatgacatccaaggttccacccagctctgaaggtctggggctggcctggaccccctgatggcttttttccctgtgccacagcgagaagattgaaggctccaatggagcagccaccccctcagcacgtgagtgaacctccccctcccccatccttgttctctccgagcctgttttctaatctataaagtggggattaagcaatagctacatcactggccttagcccaagaggtctttttcctggcactttggtccccaccgttagggctgaccacttggggcaggtagagccacgggcttctctggctactgtgtggggtcggagagtagggaggactttgtcccagcccagtccttcccaggctcacagtttgttcactttctcccatcctcgtggtcctctgcagcctgtgggtcaggcggccggagcagcggggccaccccggtgtccggcccgcccccgccctcggccagcagcacccccgcaggtcagcctaccgccgttagccggctgcagatgcagcttcacctgcgaggcctgcagaacagcgccagtgacttgcgcggccagctccagcagttgcgcaagctccaggtaccgccccgtcctgggccccgccccaccaacgcccacctactggtagaagtcccttgccgcaagtcccgccccatcccctactacctcatccttttcccagagcttccacgcccgagtccttcgccgctcactggcctctctccgaaccctttctccccttcccctttcttgagcttccgctccctcgctgaacctccacttcctcaccaaggccttatccctcgcccgtgaccccctcattgagccctccttctccttccctgagtccccatcgccctcctggagccccagtcacccactgagcccct

SEQ ID NO: 17896 - DNA, 2300 bp, Homo sapien
gttttgtagagaaatctataaagtgaaaaaagaaaactgtcaaccctgagataaccagtgttaatggttttgagtgatttgttgttaaaaatagacaatttgttttacaaaaaaatataattgggcaacatgattatttcttgacagtatatgtatatgtaatacatatatgtatataatgcacataacatggaatgatgtagatcggattcattatctcactccttgtaccagcttctgtacaacaaccagatttcttgcccagggactaaggcagaatgtcaggggctgtggccctgagtgacatccccaggtttcagccaaaagtaggctcttaaagtacggttgaaatcatcctgactccccctcccccacggagagagccatcaagctgtcctgtgacatcctcccccacccccagccagatatcagcctcagctacagcttcagagaagtggctgccgtcactcagaggctcctgggggaggctggctggctgtgtggcagcatgtgccttgcaaggaggggctgaggcctggcacatgtgtgtcacatcagacttaacatgtgtgttgtgggcactgggcaggtcgtctcaaatccgggtccagctggctttgaggagttcgggatagttttctcaatcaccctaaatcaggcacattccctgtgtccagctctgtcagggtccgcatcccctcaaagctgggatcctggggtgccagctctctttgctttctccctgggccctgcttcccgcccccacccccacccccaccctctgaactccatgaagaataaattctccgctcacaaacctgccacttaattaatgtctggaactaatgccccaatttgctcaacgattctgctgctcacctcggtgacaaatttgtgttgttcttcggaagcctgaaatagcagccgtgcccatggctcccactcacatggcctcttgtctggcttcccagggtgcctgggtcctttgcccattccttacctgccgggtgtcccagggaggccaaggccagcagagactggggaactctcttgtggccatgccaggagtctgtaatctgtgtgggagtctgtaatctgtgtgggtgtcgctggctggcaggaccttcccaggcctggatatgggcagtgacaagcaaaggggggggggggtgctcatccttggttcctctcaccctgcccggcccctgcagacccgcagctcacgccacactcagggagcccagcccgggctggcagaccaggcggcaaagctgtcctacgcctccgccgagtcgctggagaccatgtcggaggccgagctgcccctgggcttcagcaggatgaaccgcttccgacagagcctgcctctctcccgctcggccagccagaccaagctgcgctccccaggtactgcccgcccagtccaccctccctccccacacaggctcctccctctgctcttcactccctggagccccctcctcccctacagcacgccagctcgcctcaagctctgctctctttcccacagccccttctccccaagcaaccccagctctctccatctctctctcgccctcagcatccccacccgacccctttccctccaagcctcctctctccctcttgcttccttttctgtccctttctttcatccctcccttctctcccatctcccttctctaactctctccaacctctctctccctcagctcacttcccctcagtttccgccccacctgctctgcccccacttccatttccttgtccaagttccttcaactgcctggagtccagtgggtgccttgagaggctggagagccggcctggcgcccccgccggcagcatgagaggtgcctgggtgcatctgcactcgggggcggcgtctagcctcagaccctgccgctgcggggctggcgcagctccgaaaagctccccgcgctctcctggagggcggcgtggagacggcagcagtgacagcgagggcggcgtctccttcgcaggggtgctgttcctgcagttcggggaggagactcggcgcgtgcacatcacgcacgaggtcagcagcctggacacgctgcacgcactcatcgcgcacatgttcccgcagaagctcaccatgggcatgcttaagtcgcccaataccgccatcctcatcaaagacgaggctcgcaacgtcttctacgagctggaggacgtccggtgggcgtggaccgggggggatttgggtgggcttccccacgctcctcctctgcagggtgctggaccccgccggcccttccccagctccttcctgaccc

SEQ ID NO: 17897 - DNA, 2300 bp, Homo sapien
tcatccgcactagcctggcaaccactgaccttttagttgccaggcaaccccatgaccaccagaccagacctggttccccacactgccacagagctccccgcccttcagctgggatgaaggtgagacagaggggtgtgggctggcactggtggtcagcctagagctgagccatagcctctcggtcacaagcacaagcggcccctccctactgcccctggcccatttctatgctgccttcctcctgccaagacccacacccacccagtggtcaaggcattatgcttgagaggggaagctccctgatgtccccacgtctgatctattatggtccccaaaccctcaaggccaccttggggacagctgggcatactgcccatcagaagaagatgctctccctttaagagtgctaatccaattggaacattaaattgagttaatatgaagatggagattaattaggggtaaatcaggaattggggagagagggagctgaagaggagaataaatgattcctttttagagatattttattgttgtctttttttaaattataaaaggaatctattcacaccgttttgtagagaaatctataaagtgaaaaaagaaaactgtcaaccctgagataaccagtgttaatggttttgagtgatttgttgttaaaaatagacaatttgttttacaaaaaaatataattgggcaacatgattatttcttgacagtatatgtatatgtaatacatatatgtatataatgcacataacatggaatgatgtagatcggattcattatctcactccttgtaccagcttctgtacaacaaccagatttcttgcccagggactaaggcagaatgtcaggggctgtggccctgagtgacatccccaggtttcagccaaaagtaggctcttaaagtacggttgaaatcatcctgactccccctcccccacggagagagccatcaagctgtcctgtgacatcctcccccacccccagccagatatcagcctcagctacagcttcagagaagtggctgccgtcactcagaggctcctgggggaggctggctggctgtgtggcagcatgtgccttgcaaggaggggctgaggcctggcacatgtgtgtcacatcagacttaacatgtgtgttgtgggcactgggcaggtcgtctcaaatccgggtccagctggctttgaggagttcgggatagttttctcaatcaccctaaatcaggcacattccctgtgtccagctctgtcagggtccgcatcccctcaaagctgggatcctggggtgccagctctctttgctttctccctgggccctgcttcccgcccccacccccacccccaccctctgaactccatgaagaataaattctccgctcacaaacctgccacttaattaatgtctggaactaatgccccaatttgctcaacgattctgctgctcacctcggtgacaaatttgtgttgttcttcggaagcctgaaatagcagccgtgcccatggctcccactcacatggcctcttgtctggcttcccagggtgcctgggtcctttgcccattccttacctgccgggtgtcccagggaggccaaggccagcagagactggggaactctcttgtggccatgccaggagtctgtaatctgtgtgggagtctgtaatctgtgtgggtgtcgctggctggcaggaccttcccaggcctggatatgggcagtgacaagcaaaggggggggggggtgctcatccttggttcctctcaccctgcccggcccctgcagacccgcagctcacgccacactcagggagcccagcccgggctggcagaccaggcggcaaagctgtcctacgcctccgccgagtcgctggagaccatgtcggaggccgagctgcccctgggcttcagcaggatgaaccgcttccgacagagcctgcctctctcccgctcggccagccagaccaagctgcgctccccaggtactgcccgcccagtccaccctccctccccacacaggctcctccctctgctcttcactccctggagccccctcctcccctacagcacgccagctcgcctcaagctctgctctctttcccacagccccttctccccaagcaaccccagctctctccatctctctctcgccctcagcatccccacccgacccctttccctccaagcctcctctctccctcttgcttccttttctgtccctttctttcatccctcccttctctcccatctcccttctctaactctctccaacctctctctccctcagctcacttcccctcagt

SEQ ID NO: 17898 - DNA, 2300 bp, Homo sapien
agccgagctagtgctctgcgggctgaagtagaggcggcagtgacgccgccaagcgaggcgtgagcagggaccgtcgctggagcgtcctacggtggggtctcactggccggaggggcgcggacctgcctgcagttcccgcgcacgcctgcaggaggggctgcaacccggagcgggggcgaggcggcggcccagcagggggcgccggggagcccagaccctccgaccgagccgcgtctaggcgcgctggggtgaggggtcgcgaggcagaagcagaggaggatccgggcgctcccagcatggggcggctgttggtttccgcggtcaccttggctgaagggagcccccagtctcgccgccccgcctccccacccagccccgagagcctttccatccctaggcgcgcccgggcttggagacccaggagtcctccaccctccaagtgtccccgcttccccgggtgcctcctccgagccggtcctcggtcaatgtatttgtctctatcgtggcgcgaagactacttggggtgggacgaagcaggtggcgcgggaaggagagagtgagcgcgccccgcgcccggccccggccgcgcgctgcgggatcacgcggtgaagctggagggcgcgagaaggcgcagtgccccctcccctcccccgcccccgccgccccgggcggccctttgtaagttccggccacacgcgcgcgcccgcgccgcgcgcgcgcccgcccgcagtgacacacccgcgccggcccgcgcgcgcgcagacacacactcaaacacacacacactcgctctcgcacactcggtgacacgcccgcgcgcgcgctcacccacacgcccggccgccggcgccctcccagctggtccaccccggcggggcccgcgcccccggcccgcccgcctggcaccgcgccccggggctggggccgagcgaggagcccgcgaggcggcgagagggcgagcgccaggcaggccggcccggggcccccgccccccgcgcccccgcccgatggggaacgctccgtcccaaggcatgtccctgtctctctcctccctaatgtgcctccatgcttaagtggaaggtatttctgttttctttgtgtgttttccccctcggccgggggcgggggcggcggccgggccggggaggcggtggccggcggggcgagggatgctggggcgcaggtgtgtgggggcaggggaccgctgtgcgccgggcttgggagaaggacccgggcgagaggagtgctgggaccagagaagggggcagggtggcgaggcaggagactgggtggggagggcctcactacgccccggggtgggggccagaggggttcaactgtaaaggggcttgtgtggaagggggaggggtgaggagaagaagggggatggatggtgaggagggtggggggagaagggcgtccctccgaggtgggggaagtggaggatgcaggggaggggaaggggatggagaagtgaggggtgcatcaaaggcctccctcccccagctcccagaatggggtgcacgggctaggatggtggtggtgggccctttgcgccagcctccagggagggaaggggatgagtgcgttctggggttggccgcgttgccaggatacaagcctgtattccacacaccccccctccccgcacctcgaggccctagccctggagacctctgagcctcagcagcagttgcagaaactggggaccagctccccgctctaccagcgggtagggagggccacgagagggaggggtttagggaggggctatttgatcttaacccctccccctgcagaggccagggggcaggggagggcgcccccagctggggagggcatctagggtgagtgagaagatagggaaggcaggcggctgaggggtggagggtggggctgggaaggggacgcaccgtggccccccctcccctcccacgcacccccctgctacgtcagaagctcccgggccagctccgagtcctgtcggtgggggcagcaggatgctggtggaagcagaggggacaggccgggtgcctccgcagctcagctgtcagggcccggcggggcgtgtgcggctgctggtgctcgtcccccagccccacgcgtccccatgcagccctggcagtgcctccggcgctttgccctggcctggtgggagaggacggcggagggcagagcccgctctcccagggaggaggctggaccgagggaccctgggggccgaggggagccaggtgagcaggcgcggggaagtatgcaaggagggggatcttcccagcccccctcctcaaatgttgtgg

SEQ ID NO: 17899 - DNA, 2300 bp, Homo sapien
atacatcttaactctcagccacattcctgatctcagttctcttctaacgactatatggttatgagactttgtgtcccaggggttgtccctgctgtggcgacccacagggttatgagatgatggtgatagaagaaaggcagggagctttgacataaggcagatgtgggtttgaatttcaactttgctgctcttacattgggcaattggctatatctctctgatagggggttgaaaatgctcacttccatcaggctgtcgaaagggtaaaattagagattatggtagagcacctgctaattttcttccccttaggcacaaagtgggggagggaagaaatcttgtcccttggggggaatctgagttgggggcaggtgaagggcaggagtcctgtgcagtcagtgggtgaggaatctgaacggaggagcgacctgtgccagagctctgggctcccagccgcttgggaggtggtgtccgtgtgctgaggggaagctacccttgcctcccctgagcctcccccacacagagcctgctgcctcccatgcccatcctgggcaggcagccaggcagggcactggatggatgcccactgtgcgctcagaggccaaaagatgggcaccatccagttggcagagggagaggcagttggcccaggagggaagaagtcagggtgcctgccgctggggtcgtgtgcccagactgtgtgtccaggacacagctcttggctgtcctcctgatctgtcccactggagctgggaagggcctctcctctggtcctggccctggcatctgagttactgcaattggttatttatctctaaggggaatctgggaccttgtccctagctgggcatgtggttggctcaggggcaggcctgggggtggataggaaattgggagagcccagattaaggttgcaactgggtagaccaggaagtggggaaaccggtttgtcatttgggccacttggggtggggtctcctctcctgggctctctgcctgcctgccactctgcctgatggcccacagtgaatagaagtactgtgtccactctcttgctcacctaaactgcttttggaaactccagaagtaaataaaagggacaggggactcagcccaccttctcctccgcaagaaagcttgagagagaagggactggccagagcatcggagcgagggagggagggggccgctggaatcacgaggtgtcggcgcgggcctgggtctgggtctgggtccgggtcagcgctggagaagtctgcggagccaacaggtaggccaacgaaggtgggacgcggaggggcgggggacggcagggtggagccgagctagtgctctgcgggctgaagtagaggcggcagtgacgccgccaagcgaggcgtgagcagggaccgtcgctggagcgtcctacggtggggtctcactggccggaggggcgcggacctgcctgcagttcccgcgcacgcctgcaggaggggctgcaacccggagcgggggcgaggcggcggcccagcagggggcgccggggagcccagaccctccgaccgagccgcgtctaggcgcgctggggtgaggggtcgcgaggcagaagcagaggaggatccgggcgctcccagcatggggcggctgttggtttccgcggtcaccttggctgaagggagcccccagtctcgccgccccgcctccccacccagccccgagagcctttccatccctaggcgcgcccgggcttggagacccaggagtcctccaccctccaagtgtccccgcttccccgggtgcctcctccgagccggtcctcggtcaatgtatttgtctctatcgtggcgcgaagactacttggggtgggacgaagcaggtggcgcgggaaggagagagtgagcgcgccccgcgcccggccccggccgcgcgctgcgggatcacgcggtgaagctggagggcgcgagaaggcgcagtgccccctcccctcccccgcccccgccgccccgggcggccctttgtaagttccggccacacgcgcgcgcccgcgccgcgcgcgcgcccgcccgcagtgacacacccgcgccggcccgcgcgcgcgcagacacacactcaaacacacacacactcgctctcgcacactcggtgacacgcccgcgcgcgcgctcacccacacgcccggccgccggcgccctcccagctggtccaccccggcggggcccgcgcccccggcccgcccgcctggcaccgcgccccggggctggggccgagcgaggagcccgcgaggcggcgagagggcgagcgccaggcaggccggcccgggg

SEQ ID NO: 17900 - DNA, 2300 bp, Homo sapien
ctgaaactcgtgcatgatttaggactgacatttttacgtttaattttcttgcagttttattcttgctagtaaaggtaattcgttagaaacccttaagtgcagtttctcctctgtgtcttgtttaacttttcgtgttagcgaaattcacaaatttgaccaaggaaccggagcgcggccgtcctcgccgggattccggtcatcgcaataatctggctctcggcccctactcccaggcacggaggtcgaagagacgggcttcccctacaccgccctgtgtagatgtagcctcttcgtcccggcagccctccgagattccctgtgtccaccggagcgaggagaggtgtggggctgcagcccagaactcagcttcctggacctccccaaactcccgcctctccgggattaagggagtaaatccctgacgccaaagaccaggtcaaggacaagttctcccccgccctactcccccctcctgggcggggattcatctcccttccggatgaaaggtactaaagagccgacggggggccgcggcgggccccaggcccttgatgttccggttgaacaggtgctggtgaaaaggaggcggacccggcggaagagtctgccagggggcagtgcgccgaaggggaggcggcctcctccacccccagtcccccggcccgtcttcccttctcctctctgtttgcccctcccccgcaggaagcgttcccggccgcgaggtctttgaagtgtcgttgaagcccccagggctgccttctcccctacgccacccgaactcccgctgtggggggcgggtgacctttagtccccacgagtcgtccccctttaggaagtttttgggggtcagatctcacccccccttgcccacacaggttgggaagaagactttgggccgacgcccctcacttctcccccagacccaattgcagggactttagtcctctggagtgctgcgtgtgagttaccttgtgtgtctgtgtgcgtgcctagaggtcaagtgtaactggtgttcgtgagcacctcgtggttgcgggtctctaactctcgtgggtctctaagcgcacccgcggggctggagcggaggttcgtgtctctgggagggtcagtggtgtgactgaagctgggagttagctcgtgtctgtgggtgcctcggtgtgtgtctctggggctctgagtccctgtgcgtgcgtgtgtgtctgtgaacccgacaggaagctccccgagggcaggaatatgttttgctctctactcgatcccagcgactggcaacgagcgtttaataaatatctgttgaatgaataaatgtctgcgtgtgagagcgtctaccctccagagtggcctcggaggaaagggcccgagggcggccatccaaaaagacccccagacacggggtggggcgggggcgaacggcccgcgtcgctcccattcctcctagcgccccttcccccggtctccactccaaagtttccctggggctgaagaatccacccagagacgaagacttggcggagggggctggagactcggggacccggggcccgagacgggagtgcgggcagagggagggctcgggagcgacgacccagagccgtgaaacgaaaaagaaagcaggcaaagcagcacggagcgaaagagcgaaaagctccctaccaagccaggctttgttccctgaacctaagactttacccggcggctggcggcgggcgggccgggagcgagcgagcggaggcgcgcggccatggctgccgcggccgggcaggggggccgggggggcggcgcgtgagcgggtggcgcggggcggcgcggggcgggcgggcgcccgcgatgtgccactcggcgcctcccccgccgggctcgggctacgcggcggcggggcggccctaggagccgggcgagcggcgcggagggggcgagcccggcgtgcgagtctcattgttgtggggggggcccgtcggggcatgagggcgagagcacggcggggggggcggccagacagagcgagcgaggaggaggaggaggaggacgcggaggaggaggaaggaggaggcaaagaaaagaagcggcggcggcggagggagaggaggagggggcgaggaggcgcgcggccccccgctccctccctcccccctgacccccgacccccgccggccggccccccgccccagccccggagggagctcatgggagtatgaaggagatggtaggaggctgctgcgtatgttcggacgagaggggctgggccgagaacccgctggtctactgcgatgggcacgcgtgcagcgtggtcgtccaccaag

SEQ ID NO: 17901 - DNA, 2300 bp, Homo sapien
cttagcaggaggttcaggtatcaggtttccagggtgatgttgctgtggcaactgccccagtaaacctctcccctgcttcccagggctcacctggagaccttgtcattcatgccctctgacctttccaggggcctgcaggcaggtggcaagaaatggccaggggtctgggagtttttccagtaactggatgtcccttggacatgccagagaactctgcccatcctcctccactcgccccagcacttcggctacccttccccccagcccctctcttcccttgctctcagaaccacatctggctcccttcagaactccagctgttgaaaagaacaaagaggaagacagagaccaggactccgcccgggaggggcagtgcagggtggctctcgtttctggtccagcctgcattcagcatttatctgttcagcacgattaactgaatacctggtcgctactaggaggaaaagggccttccctggcagcagcctgaagcacgaacgaactcacggcatgccaggctgtgttctagaaccaggagatggaggggcatatggagattagtccatttaatactcaaaataatccaattaggttggaaatttataaaccccatttaatatatgaagatgatggggcacagggaggttaagtaatttgcctaaaagcacacagctagtaaagtggtagacctgagattccaatgcagtctggcttgaaggcttgtgctcttcacctgcccacagcactgtctctgcagctgctgccactggacgtctcatcatttattgaccctataccatgtatctggcatcatgctgcttccaactcaccacatatgcatagtgctccctgtaaagacactgacacttatcgacgttgagactttgcacagtataacatggcagtgaggccaggcgtggtggctcacgcctgtagtcccagcactttgggagtccgaggcaggtggatcacctgaggtcaggggttcgagatcagcctggccaacatggtgaaaccctgcctctattaaaaatacacaaaattagccgggtgtggtggctggtgcctgtaatcccagctacttgggaggctgaggcaggagaatcacttgaacctgggaggtgattgaaggttgcagtgagccgagatcgcaccattgcactccagcctgtgcaacaagagtgaaactccatctcaaaaataaattaagaaaaaacaaaaacatggcggtgaagggcagaacccatcaggctcataccttgctctgcccgacttagagcccacgctccttcaaccaccaccctgccgctctctttggtttctggtgcctcagataggacagaacatttcagtgcagagtggcagctgttgacatgtggtcatgtgtgcacagttctctggaaataaggggacagaatgtcttgttccacctgaggtatttagggaggcttcagggaagagggacttccaagctggattttaaaggatgagagatttcccaggaagagtaaggataggctgtcctggcaaacgcttagtgtgtgcaatcaggttgtctaggaagagcatggggtggtcagagaatgggtggaaagccagggggccgaagtttggggtagtagctggagggctccaggatggcaccagagaagcccattctcctgtgggtcctcttctctgcctcgccacttccagcataggtcccgccttcttagacgccctaagtattcagtgaatgaatggaccaatgagtaaatctcttcagactctgggactgttttcatctccctcttggcttccatcttccctgcctaaggtgaaagacagacaccttcttgggttcagtgaattcccctctgccttacacccaggagtgccacagctgcctccccatatccctggtctaggagctcctggccactccctgcccggaagtccttcatgaaactagctgtgggctctcccagttgagctaggtcctgtgccctcctgcttcactcccacatcaggatcagcacaggcccaggcacctggtgttgaaccttcctctctcctctccttcaggtctcctcctcggcttcctcttcctcccaccacgaggccagcacgcaggagacctctgagagcagcagggagtcaaaggggaaaaagtcttccagccatagcctgagtcataaagggaagaaactgagcagtgggaaaggtgtgagcagttttacctccgcctcctcttcttcctcctcctcttcctcctcctctggggggcccttccagcctgcaggtgagtgtgggcatccggg

SEQ ID NO: 17902 - DNA, 2300 bp, Homo sapien
cttcctcctcctcttcctcctcctctggggggcccttccagcctgcaggtgagtgtgggcatccgggaggaagctgggagcagggaaagccttttgtcctgagcttttctggcaagggactttgcatattggttttgcatctcatttacttctccattggttcaggataaagatggggaatcccctcctctccaaacctgcccccaaacccttccttcttgaaccagaactctcctctccccttcaggggccaccccaccaacctcataacagtattccttatcccctacatttgtgctgcaaggtacaatttttcaagaacccccattaacattttctcctataatcgctacagtcatctggtgaggccagtagggtgcgagttactctcccccattttattacaggtgggaaagctggaggggtcgggggtactcatcccaggacacagacagtggcagagctgagacaggaaaccaggcatccccattcgtggaccagagctctctcccgccagtacacgcgggagtgggagggagtgcggggatctggggtccagctgtaactgtttcccctctgtgcacagtctcgtccctgcagagctcccctgacttctctgcattccccaagctggagcagccagaggaggacaagtactccaagcccacagcccccgccccttcagcccctccttctccctcagctcccgagccccccaaggctgacctttttgagcagaaggtggtcttctctggctttgggcccatcatgcgcttctccaccaccacctccagctcaggccgggcccgggcgccctcccctggggactataagtctccccacgtcacggggtctggggcctcggcaggcacccacaaacggatgcccgcactgagtgccacccctgtgcctgctgatgagacccctgagacaggcctgaaggagaagaagcacaaagccagcaagaggagccgccatgggccaggccgtcccaagggcagccggaacaaggagggcactgggggcccagctgccccatccttgcccagtgcccagctggctggctttaccgccactgctgcctcacccttctctggaggttccctggtcagctccggcctgggaggtctgtcctcccgaacctttgggccttctgggagcttgcccagcttgagcctggagtcccccttactaggggcaggttagtgacccctggggacagagggcatttcagggcccagccagtctagtgaggaacagagcttacacatgcacttagaaggaaatgggatggataccactccaaaagatagagcacggaggagacagtcaccttcaggacatccccctctgcatgcgtggagtagaaaggattggggacagattgtcagaaggttttaccaagttttgggagggagattagaaaagctaggaattctgtagccctcggcagggcagtttaacaagcaggcgcagcaagcagatgtcacccaggcaggaagtgacatctttgcagcaagagggttagactggggcatgtagccagatcccggggagcactcgagctggggaggggctgtcagccacctggctgagcaggagtctggggtggagagtaaccacgtgcttccctctgtccttgtgcctgcaggcatctacaccagtaataaggaccccatctcccacagtggcgggatgctgcgggctgtctgcagcacccctctctcctccagcctcctggggcccccagggacctcggccctgccccgcctcagccgctccccgttcaccagcaccctcccctcctcttctgcttctatctccaccactcaggtgagacctgactcctgggctcctccttccctgggcaggttggggacagactgacagaggaccccagccttccatgggaattggagcaactgggctgagttgccatcagaccaccctccgggctctggacccctctgctccccagcacacccggccccctgcaccccggtacacacagttgtgctctagatccaagaataaccgccaggggattctacctccctcccttaggtgttttctctggctggctctacctttagcctcccttctacccacatctttggaacccccatgggtgccgttaatcccctcctctcccaagctgagagcagccacacaggtatgtgaatatctgatcccctctcccctttcttcccaaaggtcggacacccatcacctgcatgtgaccccagaaagaatgggagagctttctggctgccccctccctctggccattgccctccctg

SEQ ID NO: 17903 - DNA, 2300 bp, Homo sapien
aggaggagcagaataccaacgcagggggatggctgtaacgatctcaccgtctcctaacctcagtcccttttttgagagtgaatggtggagggtgggaagggacccagatttgtagatctctttgtctgggggaggggaaggatgtggtttgcagagcggaagcagagtttggaaacgcatgagagcagagcttcgtgtgttcccaccctcagtgaggaggtgtgagtgggtgagcatgtggagttgggtgttcccaccctcagtgaggaggtgtgagtgggggtgcatatagaggcagtgcctgctgtggggtcacaactggtgcatgccagcgccaaagggacctgtctttaggggtcatttcagccagctcctcccatcacagatgacagctccaagcctagaaggggctcagtgacagggccaggacaagccctcaggactgtggcctcctggcccttggttcccctgccccacaacatggtctccacatggctggctggctggctgtccctgtgtgtgtgtgacacacggtgtgagtgcagggctgtgcccggggtgggagggtgtctatgtggcactgactgtcttagctcagagctggtggatcctctccatggacaatgacactttaaggattgtcttggtttgtttttcctatttgtggggtattttccccctcaggctcctgggtctgctgctgcctcaaggtgtcctgaccttgaggctgatgaggggacccctgcctgtttcccccatactgagttctagggaggtgctcaccccagactcttaggaagggtctagagaaatgagaggagcccaagccaggggccagctccgagaaagggtaacctccacgcttctctctcccaaattggaaatgaagacaggttttcaaaggcacaggctccccctgccagcttctaggatcttccttggtgtgcaatgggccagttaggggtaggcagcttgcacccagttctcctttatctcaacttattttcctggggagaggtgcctagagggattgaggtaacttcaactgggaattccaaggaaggtgggcaagtagccttggctctctcccaccatgtccatcaggattgagagtgtgtctagctcccgaccactttgtcttgacctactgaaaagttgggaactgaggggtgccttcattcccctttgttcactttctccagctcaacttgggacttgggtggtgggactggagacctcacccctgctcccgtcccgccccctttctatcccaacctgtttccatgtagcagacccttcctagggagcagggaggggaagccacagattgcaaacccaggggctcctttttcattctttctaaaaccttgatatcctcagcccaaaggcgatgcccccctgccacctccaagcctggaattgtgcataacccggatcttgtatctttgtataacggatgttatttgtacgaagggcagttcgtaaacagcacttgttcttttaataaaagaatgttttgcaaaaaaaaaaaaaaaaatccgaagagcccctgcgtagtctcgctttatggaaggggacaggaggtgggtgccaactgcgggggtgtaggagggcgtgggctgcggcccttctgtccgcactcagcggcagagagcgcacagacgctcagcacacccgggcccaccacgcagggtgcatcagtccgtgggccccggccgtcgggaccctgacccgtcccgaggtgacgcgacgcccgcgcgcttgctcccagaagcgcggcctaggctcggccagcaacagcgactcctgggagggtcctgcgccctcgggggtgccccaggcgccgaggctgcgcgcggggcgttccaccgccaggcccgcccggcagggggcgccgggaccgaccgctcacgcccggcgtgctgaggaggccgctgggcgggcgccgtggtcgggcttccgtaccccgcccgcccctggcctccgccctcgcagaacgccgcggcgtcttccggggcctggcgggccggggaccgagggggcggggaggtgacccggcgggggcggagccagcgggcgggcgcggcgcgggaggcgaccatgcgcggcgcgggggcgatcctgcggccggcggcgcgtggtgcccgggtgagcacccccgccctgcaccagcccccgtcccgaaccccagccgggcccctgccagcccccactccagccccggcccggccgagcatcccggagctcccggcccgtcccgccggtgtctggcttgcctcagctcacaggcttttcccgag

SEQ ID NO: 17904 - DNA, 2300 bp, Homo sapien
tcaacttattttcctggggagaggtgcctagagggattgaggtaacttcaactgggaattccaaggaaggtgggcaagtagccttggctctctcccaccatgtccatcaggattgagagtgtgtctagctcccgaccactttgtcttgacctactgaaaagttgggaactgaggggtgccttcattcccctttgttcactttctccagctcaacttgggacttgggtggtgggactggagacctcacccctgctcccgtcccgccccctttctatcccaacctgtttccatgtagcagacccttcctagggagcagggaggggaagccacagattgcaaacccaggggctcctttttcattctttctaaaaccttgatatcctcagcccaaaggcgatgcccccctgccacctccaagcctggaattgtgcataacccggatcttgtatctttgtataacggatgttatttgtacgaagggcagttcgtaaacagcacttgttcttttaataaaagaatgttttgcaaaaaaaaaaaaaaaaatccgaagagcccctgcgtagtctcgctttatggaaggggacaggaggtgggtgccaactgcgggggtgtaggagggcgtgggctgcggcccttctgtccgcactcagcggcagagagcgcacagacgctcagcacacccgggcccaccacgcagggtgcatcagtccgtgggccccggccgtcgggaccctgacccgtcccgaggtgacgcgacgcccgcgcgcttgctcccagaagcgcggcctaggctcggccagcaacagcgactcctgggagggtcctgcgccctcgggggtgccccaggcgccgaggctgcgcgcggggcgttccaccgccaggcccgcccggcagggggcgccgggaccgaccgctcacgcccggcgtgctgaggaggccgctgggcgggcgccgtggtcgggcttccgtaccccgcccgcccctggcctccgccctcgcagaacgccgcggcgtcttccggggcctggcgggccggggaccgagggggcggggaggtgacccggcgggggcggagccagcgggcgggcgcggcgcgggaggcgaccatgcgcggcgcgggggcgatcctgcggccggcggcgcgtggtgcccgggtgagcacccccgccctgcaccagcccccgtcccgaaccccagccgggcccctgccagcccccactccagccccggcccggccgagcatcccggagctcccggcccgtcccgccggtgtctggcttgcctcagctcacaggcttttcccgagcgccagtccctgccaggacctccgcagccagcaccttctcttgcgacctttttcttaccctctcattcctccctcgccccttcagccctgtcacctcctccttcctagatggcctcccgtgtccttccctttccactgattttatttttccgtttccaaaccaccgtcttgtgatgcctgccatgcttgcgtaccttgcaggacctgaacccgcggcgggacatctcctcctggctggtgagtccccccatcctcccctcctcctcgcacaagacccccaggcacggagatctcaaaggcagaaacaggaaatggagctaggaagagtacaggcctattccctggagttagcccgtggctctcagggaggtggggcggaccagagggcactgggcagggcgccagtcttctgtactgaggacagcagcacctaatgaaccaagccccagtgtgggtggccctgccgtaggctggaaggatcccagcccgccttccctagcacgcaggtgggagccagcgtttgagggaaggcagctggaccctgaaacctgagtgcctgcatggctttgaaatctccctgtccaaagctcacggtcctatggtgtcctggggaacggtcttgttgggtggcatcagatcagcctcttgtagaggaaacctgccacacacacaggccagtgggaaactaggaagggtcgcaggccggacggtgcttccagggcttgagctaaccctgagcccctcatcttccctggccacaggcccagtggttccctagaaccccagccaggtccgtggtggccctgaagacccccatcaaggtggagctggtggcagggaaaacctacaggtggtgtgtgtgtggccgcagcaagaagcaggtgagacccctgtctgccttcctactgatacctctggctaggaacagcctggtgtctccagtgagttcccacccaggatgatcttattcttcccacacatacctgagggacac

SEQ ID NO: 17905 - DNA, 2300 bp, Homo sapien
ttgtgcccctctgtctgccctgtaacctggtgtctctcccacatgtggcctttgtgtctctgcatctctttcggtctctggccaggttccctgagcctctgttggctgtctgggtcctggccagactcatcctggggtctctatagaaactgctgatcccggctgtgaatttcttgtcctagaaaactcagtgtggtggctttagaaatctttctggaaaggagagaagggtgtgagtatgttgtaaaggagctgttggggcttggccaccctcccaagccccacccctgggcttttactctgggaaagaggagggagggctgctgtcccttccaggtgcaggtttggtttgatttctttaccaagaaggaagcacggtggccaatccagagccggacttttcacctctctggaccctgcccgggcctggctggtgtcgagcaggcggtctggggacagagcactttctgcccagctttggcaggcatctgtgagagcctgtggtttgtcactggacagcctgtgaacaggtggcagaggcgtcaccagggcaggagacagtgggagagtaacagtgaccatgtgggggggattcctgcattgtgtatgaaaggggggttcctggaccctgtgtgcttgtggacagggagcactcatgcaggcggctgtccatcagggacactggcagggattcctgtggcaggggtatagcctttttgcctaaactctttgagtccagggctagggctggagctgcacgttcccaacttcaggcatgtaaggaccctctctgttccctgcctgagtctcaggcctggaagccaaatgattagcgtatggtggattttctgggagcagcctatatttggcagactttagaggagggaggtgctccaaagcttaggctggatgcagagccagaagcacaagtgatggctgcggccttctaacttagggtagcctgtgtccatggtgtttccagggaagacttcctggaggaggagtgaatggatggagtagataggaggctgggacgtagtggaaggatcaagtctgaggccctgcacctgggtggaggggttgagggagtaaggataacttatttttcccttcttctattccttgaagtttcaggccagtggctgctttatctaagtttcctcctagttcctaggatgctttaaatgtggaccatgtgagtgaatacggattgggattggagagttttgtttttgtttttcttttttagacagagtctcgctctgtcgcccaggcttgagtgcagtggcataatcacggctcactgtagcctcgaccacccagactcaagggatcacgtgaggcaggaggatcctcctgccacagcctcccaaaatgctgggattacagacatgagccactgtgcccgacttgggattggaaagagttttaaaaaccctcttcttttccattttcctgcctcctcacattctctggggagttgggcagtacatcctgtggcctaacttcagtctttcctcctgcttctcagaggaagcctaaccttgttgctcaaggctgtgtgactctccagagcctgggcacccaatgaactctcagaggtggccagaaagaaccagccacatgtacacccccagcccaccctgaaggcagagaagggtcttgggctcagggagagatgtgctggtggggggaggtgtggagtgaagcgtaagaggggctgccgaggctctgggtttcttttttcttttcttttttgagacagactctcactctgtcgcccaggctggagtgcagtggcatgatctcggctcactgcaagctccgcctcccgggttcacgacattctcctgcctcagcctcccaagcagctgggactacaggtgcccaccaccatgcctggctgattttccgtatttttagtagagatggggtttcaccatgttagtcaagatggtctcaatctcctgacctcgtgatccgcccgccttggcctcccaaagtgctgggattacaggcgtgaaccaccgcgcccggccaactctgggtttctgattccacttccgtttcccagggcaacgctccccagtccccccacccccgaccccggaatcatgcatcggactacacggatcaaaatcacagagctgaacccccacctcatgtgtgccctctgcggggggtacttcatcgacgccaccactatcgtggagtgcctgcattcctgtgagttggggggaggggagctgctcagggtgggcagcctctgtgcccagattggggcgggcacggcctgagga

SEQ ID NO: 17906 - DNA, 2300 bp, Homo sapien
ccagtccccatttcaccattttccaggcgccccagttagggatgggcatcacagtgtcagtggggggaacccatattttgaagggaggggggctaactgcggaaggtaacataagagaatccatcctccggggtcggggcggccgcatgggaagggaggggtctcgtcctggctagggacccggcagccggtggcggggagcggccgcgccagcctccccctcctcttcccgtctctgccagcatcctgaaggaatgaggtcacgtgggtgagtggtgggcgggacctactcttgtctggaggaaaaaagccattttgtctcccccccacactccggtccctcccctcccccctcggtcccctcccctcccctctccctcccaccccaagccgctttcacaaactcctttcttaccgtaggtttctcccctcccgccgcccgggcgagcgacacggctgcggcccccctcccctcccttccctccctccctcccatccccccctccccgagacccaccggaccccgaacccaggtaagcggagcggactccccctgcctttccctctcctggcctgtaaccctctggggattgggatgggggccggccgttcttcgcaagccccgatgggagggggaggctctgagccgatcctgccttcgcaccccccgcgccccgtcagtccctagcccagcttgccccgtccgcctttctttctcccttttttctgtccctttttccctttcctctcttccaagatggccgaaacgggctccccgtcttaacgatttggcgtctccctcgaccaccacctctttgtgcagcagcccccgggcagaccctgttccgaggtagcgagggggaaggtccggggcagccgggagggcttgcgggatgcgcgctgggttgggtcgccgctccccacgagccaaagccgcctctcgctctgcccggtctacccccttttccatctgggcgggggtcgctctcccgtgggcacaggggcgccgtggacgcgcggggacttggggccggcagaaggggatgtgctttggggcggccgcgaggccgggggagggcgcccttccccgccggggtccgggtcctctcgggcacctccccccgccggtccccgctccccgtcccggcgccggcgccccgccccctccccgaaccacctcagcagagcctccctccggaacacccctcccggggccccgcagaaagtttggctctagggaaggtgggagcggccacccggtaactggggtccctgatccttggacatgggctcctggggaagcccgggcgctgggggtagaatggggatggagggaaatttatcgcaatatttcccatcgccagcggaagcagggggatctgctaaactggccccccttcccctgggacgcccagccaccccaccctgcgcacgccctcctactgctagctctgagggcgtgggacccccgggcaagcagacaccccctgcctgtctccacggtgggcccgggctgcccctcgccctcccccactgcccctgtctgcccataatcgctccggttggcttgaggtgggaggaggcggcatggaggcgggtggatttgccagtgaatattgtggaagtgttacccagcgcttcccgagatctttgtccctcagtgtcccccatgctgcctcagtctccccagaggtctgtctcgaggggagggctgtctcctggttgtcccctccccgctctgttctgatgcctcctcctctgggacctctggcagtttctgttcctgaaactctttaatttctctcctccctccccccttcactctggtccaaggtgttattactgggagcataaagccagctctgttgcagctttttggtgggaaggttttcccacgggctcccctggttgggggttgggggattgaggctttagaactgactttggaatgaagcaggaaaccaaccccaggatccagaccatgtgtagctaggtagggttcaagttgaagtcttgggggttgggcaggaagggggactctgctgcccctggccttgcctgagagatcttggttgatggagctgttgtcatgggaatggagagagcccgaacaggaagagggtacagctttgtgcaggtcacatgcccactgcagccctccagcctctggtccccagagcggactttggaagctgaactgcttttgttgctggaagacttatgttataatttaccctgggtggaccagggtcgtacaaaaggttagtgtgtgtttgcagggtctgtttccaggcagggat

SEQ ID NO: 17907 - DNA, 2300 bp, Homo sapien
gtcatccaggacgcaaaagatgaaaatggagttttagtgggtaatagggtcttagcacactcctctctagcggttctctcctgtctggcgcttaacaaccgaagaataagtggatggaccccggtggcccctcgggcagccctccaggattcatgggccgcagaggaacgtcaacccccttcccactggctgataatgccccgaggggcagccccccaggtgcccatgtggttggtgggtgggatccagatctccgcagagcccctgttacaggtttctcttgttcggggtcttgtagccagagaggggcggctgactgggagtccttcccgcgttcccctccctgcagagcgagtggatgcgcgtcttccccggcagagtgcaggatgccggcgacacatttgcctgggaacagtgggagggtcccctttcctccggggccggtgaactactcgcctctccgcctgcaggctccggagcaggtgaccggatcttcccttggcccttctcccgccggttctcggaccactccctctggaaggaagtctctccgcccttcctcttcctccccgcccccgtcccgctggtgtggctgcaggctcgagctggggtcactcggcggccagtgtgcgcaggtctcctggtcgccggccagagggcgaaagcattcacccgaggcccccagcttcgcggctgccttggctgcgagcaacgagggaagaggaggcaggcgctccaaaactgggcgaagattcctatcctaatttctaactcgagcctcccaccgtcagtgcgcttaatggcgctgctggccggatggataatcgagctctctggagggacagacgcggccgccatccctaataaatcgtgaataacgaatgagggaatcgaccatcctcatgaggcccacgggcgtccagtaacgcagtatcgattcgcttccccggcgtcggcctcaccgctactcccggcgtttccaagcctccctcctcgttctctccctcctgccggagccactgcggaccggagccccagcgccaggtggagccggggcgccagtgggagtcgggcccagccgtcttggcgctcgcccgactctcccgcccgcgcgcccagggaggcgcacaggcagcgcgcagcgcagggcgcgagcgaaaaatgcgggaatcagcgccaggcaggagaaaaggcgcgggcccaccttacagcccggcgcctcgtttcctagtccagtgtggccgctcgccttcggccggattattgtgtcccagacccggagcctgagttcccatcctcagcgggcctccgttcttctctgcccgagcacgccgggggcgcagcctccgccagagctacccgatccccccgcggcgaggccccccacccggcctcaccccgcacctccactcccctctcgcgattgctccctgccaggcgcccaggctggatcctggtgcgccgcttttcggggccagcgcccctgccgccgagggggcaaggggagtggggaggacacgctcgccctcccagatgcagttattaattttaagggagtgtcacttggagtgaatgaaaatcgctcggacgcctggctgaaggcgtcgcgtcccccgccggagccccgcgccctttggtctaggccggggcgtggaggaccacgagccacctttcagcccagtccccatttcaccattttccaggcgccccagttagggatgggcatcacagtgtcagtggggggaacccatattttgaagggaggggggctaactgcggaaggtaacataagagaatccatcctccggggtcggggcggccgcatgggaagggaggggtctcgtcctggctagggacccggcagccggtggcggggagcggccgcgccagcctccccctcctcttcccgtctctgccagcatcctgaaggaatgaggtcacgtgggtgagtggtgggcgggacctactcttgtctggaggaaaaaagccattttgtctcccccccacactccggtccctcccctcccccctcggtcccctcccctcccctctccctcccaccccaagccgctttcacaaactcctttcttaccgtaggtttctcccctcccgccgcccgggcgagcgacacggctgcggcccccctcccctcccttccctccctccctcccatccccccctccccgagacccaccggaccccgaacccaggtaagcggagcggactccccctgcctttccctctcctggcctgtaaccctctggggattgggatgggggccggccgttcttcgcaagccc

SEQ ID NO: 17908 - DNA, 2300 bp, Homo sapien
cgtctgcgccgtccaggctcgctcccattgactcggctcactactacgccggtagtcgactcggtctctgtggcgcaatcggttagcgcgttcggctgttaaccgaaaggttggtggttcgagcccacccagggacgctatgaccttttttttttttttttttgtcttttgggttttttttttctccccggaagataaaaacctaagccttttactcaaaagccaaattttgcattgaaatggcagcagcaatactttttctaggagaatcactgttcttgaaaattctttgctgctcagtcaataatgggataatttctccagcacttccctccacacccccccaacccgcctccaagctagatcgcaggaaacctaaagacacaggtttttgtctcactgtgcatgcaacacgtttcaggatgcattttttcataggattaagaatgaatttacagtggaggttcgacagttttctattgtctgcctcaatcgatattacagtctccaaatactacatttggaagggaagagaatgagagagacacagagagagaaacaagtatgaagagaaacaaaggtgagaaagggagaacattgttgtgatacagggaaagaagggacgtgacagaactaggcagggtgggtaggggaagacctcaagacaatggagagtgggaaaatagacgcatttaatattagaagcatcagaaaaaaaggaaaacaacacattttttccccctagaactacacagggaggtgggggaggaagatggggaaatagaaggagaaactgactaaggaccttgtttgggggagataaaaggtataaaggacacagaggtaaagacgttccggaaagctctagaggagccgccctctcctgtctcgtcaccatttttaaagggatctgatcctcgcaatagctcttggtatatgctggaggtaattgcctagatttcccgcgttcctgtcctctgcgagtctctggcttgtgacagccactgtgactcttctgatgcacttgtcagctagaggaccgcgtgagatgcaaacacaaaatcaaggggcgcctaatgtctgacgaggcgcattcctgggcgcagtgggagcctcgacctttgtggaggagaatgtgcaaagcactcttgagcagttctcatagacacttggtctctgcagattcggctcaaaggaggcctcttctggaagcccaccccagtactcacccacccttagcgggagctcacaccagaagcgatgggcgctaaagggacaggctgtgtgtccttcagggtttgcacccaccggcctgtgagcgccctgcgcaaaagccaggctcctgtgccttgagttcccagttcctagcgcagtatttgacactggcacatgacaggtgctttctatgtcggctagtagtagaacaaaagactaggaaactctttcgatgtgggaagagttgggtcagaaggttctcctgagaaaccagaaaggccaggaatgtggagactagtcatccaggacgcaaaagatgaaaatggagttttagtgggtaatagggtcttagcacactcctctctagcggttctctcctgtctggcgcttaacaaccgaagaataagtggatggaccccggtggcccctcgggcagccctccaggattcatgggccgcagaggaacgtcaacccccttcccactggctgataatgccccgaggggcagccccccaggtgcccatgtggttggtgggtgggatccagatctccgcagagcccctgttacaggtttctcttgttcggggtcttgtagccagagaggggcggctgactgggagtccttcccgcgttcccctccctgcagagcgagtggatgcgcgtcttccccggcagagtgcaggatgccggcgacacatttgcctgggaacagtgggagggtcccctttcctccggggccggtgaactactcgcctctccgcctgcaggctccggagcaggtgaccggatcttcccttggcccttctcccgccggttctcggaccactccctctggaaggaagtctctccgcccttcctcttcctccccgcccccgtcccgctggtgtggctgcaggctcgagctggggtcactcggcggccagtgtgcgcaggtctcctggtcgccggccagagggcgaaagcattcacccgaggcccccagcttcgcggctgccttggctgcgagcaacgagggaagaggaggcaggcgctccaaaactgggcgaagattcctatcctaatttctaactcgagcctcccaccgt

SEQ ID NO: 17909 - DNA, 2300 bp, Homo sapien
agcgcccatcgcttctggtgtgagctcccgctaagggtgggtgagtactggggtgggcttccagaagaggcctcctttgagccgaatctgcagagaccaagtgtctatgagaactgctcaagagtgctttgcacattctcctccacaaaggtcgaggctcccactgcgcccaggaatgcgcctcgtcagacattaggcgccccttgattttgtgtttgcatctcacgcggtcctctagctgacaagtgcatcagaagagtcacagtggctgtcacaagccagagactcgcagaggacaggaacgcgggaaatctaggcaattacctccagcatataccaagagctattgcgaggatcagatccctttaaaaatggtgacgagacaggagagggcggctcctctagagctttccggaacgtctttacctctgtgtcctttataccttttatctcccccaaacaaggtccttagtcagtttctccttctatttccccatcttcctcccccacctccctgtgtagttctagggggaaaaaatgtgttgttttcctttttttctgatgcttctaatattaaatgcgtctattttcccactctccattgtcttgaggtcttcccctacccaccctgcctagttctgtcacgtcccttctttccctgtatcacaacaatgttctccctttctcacctttgtttctcttcatacttgtttctctctctgtgtctctctcattctcttcccttccaaatgtagtatttggagactgtaatatcgattgaggcagacaatagaaaactgtcgaacctccactgtaaattcattcttaatcctatgaaaaaatgcatcctgaaacgtgttgcatgcacagtgagacaaaaacctgtgtctttaggtttcctgcgatctagcttggaggcgggttgggggggtgtggagggaagtgctggagaaattatcccattattgactgagcagcaaagaattttcaagaacagtgattctcctagaaaaagtattgctgctgccatttcaatgcaaaatttggcttttgagtaaaaggcttaggtttttatcttccggggagaaaaaaaaaacccaaaagacaaaaaaaaaaaaaaaaaaggtcatagcgtccctgggtgggctcgaaccaccaacctttcggttaacagccgaacgcgctaaccgattgcgccacagagaccgagtcgactaccggcgtagtagtgagccgagtcaatgggagcgagcctggacggcgcagacgccgtaagagatgccgccatcgggcgaaataagtggaacccgggggagaaagggaaggatcctgatgggggagggaggcgaaagagcttgggaggagaggacgcgggacgtgcacgcccttcctccattggaacggcgagaggtcgactctggctatcctcaggttctacctcaaacgtggagaggcgcggaacgtccctttttagggtgacctgagattgaggatacgtgaagtcgggccgcaggaagtcccccaaatcagaacaagcttcggcttccaaactccctttcacagctgaacccctgcagccgcaaaatacccgcgacgcctacacgcgacgccttccccttcccacctgcatcattaaatttccatttaatgggcgcctcctatatactaggcactgttgtgggccagtgaatattccgagcctaggcaagtgcctggtacacagtaaacgcaggatttctggagtgaataaataagctagcacgactaatacgacgaactcatacatcacgttgataagcgtcacggtgccccttcagctggggccgcagcttcctaaacccagtttcaccagcccacgtgcgcgcaggctccgcccccagtccctgaggtcccgagtccaggtccgccgagatcccactatgcaccgtgtcgcaagtctcttccgcagccacagtgacttttcacttccgcttttcccgcctccgttttgactttgcaaccaaactacctgtactggtgaccgacagggacgtgtgaccaatagaaagcccagatgtccaggaagagtccgcctatcagccaatgaagagacagcagtgagagcggttgcgcagtgaaggctagacccggtttactggaattgctctggcgatcgagggatcctagtacaccgcaatcatggtgagatggggagttaaagcaaaggggcatggggaaggattgagaagcggagggggtcaggagaggcttggggacgaaaagggcctagggtcgatggaaggaagcggtttcagttcgag

SEQ ID NO: 17910 - DNA, 2300 bp, Homo sapien
tctttcacagatgtcaaaccaccagtgttcaaagtgaccctgcttcattgagtcctgaaacagctcacttcctttgagagctagtgtgacttgctttgtgggacactcagtaactttgggttttgactctttaacgggtgggcactggaccatctcggtgggagtgcttgtgccactctggaaggctgttccctggggttgtgatgtttatcatgccacttccttcttacctgtgccaacagacctatttcactgcctcagcgtacaccagacccttcagaaacctctctggtgtcacccagatagattgtgcttactgagacaaatgaacgtttacttgatttagaagataatgtgacagaatgatgtcaggttaggtcaaagccaagggagtgacagaatctggaaaatcaaacaatacaaaaagccctaaatgaactgttaactatttgatctttggatgtaaaattgtaatgcgtatatgtacaaatgtacaatttttacatgcttttaaaaaaggttagctttgtgaaaataccttgtttggtcaatgactttactgggtaatagaaccacattgaaccttgatggcaagtaatacaataaggcaggccagctcgtttttctctctgaatctggctggtttaggaggagcctgggtttatcgacgagatctggagtatctattcttttccactgcttgcagtctccaatgtaggcagtgtaaaggtatagtaaaatgattttaggagtcagaaccaaattgccaatatgctccatggctcctaaaggaaaataaaatggaagtttttattttgcggcttcacttcttaccgtgtagtaaccttactacaattacagattttcaggagttgtttgctagtctctttcagtcaggtactaaaaaaaaaacaaaaaacaggctgggcgcggtggctcacacctgtaatctcagcactttgggaggctgaggtgggcggatcacgaggtcaggagatcgagaccatcctggcgaacacggtgaaaccccgtctctactaaaaaaatacaaaaaattagccgggcgtggtggcgggcgcctgtagtcccagctactcgggaggctgaggcaggagaatggcgtgaacccaggaggcggagcttgcagtgagccgagattgtgccaccgcactccagcctgggtgacagagcgagattccgtctcaaaaaacaacagcaacaaaacaaaaccctcgaggggccactctcctgtctttactccttttcccttctctattctttcaccagaagccctcatttgaccagtgaactcctaggccctcttgacccgcacattagctgggcgatttccttgttctgctaattcctaattctgcttaaaatgtatttggatttctgtttttgaacacttatgatgccaggcactgtaatgcttgaaacccgatctttccctagagaatgtaacatacgtttttattcatttaatcacttcattatgccggggttaattatgtttattttataattggtaataaaggccacatttatttttgtaactgtttaaagagcgaccacctgtggagtaccgtgtttacgaatttccatgcagaaagaacaacgttgacctgtaatttgtgtcgaatatatggagatccctcatctgagaattatgtaacaaagcgtggggcagtttactcaaagattttacgaaatgagccagagtaagacgattagtgggataggtgtctgaaggtgctggcggcctctgagctctgaccctttgcggggagaacaggcagcaggtgggtgggcgcggggcccattcataaaaaccagtgttcctggcctgcttctctcattggccctgggggcaaggggcgtgccccgcgggtggagcgcgcccggggcccagcagagtgggcagatccacgcttaggtggagcgagggggcgttccttggctttctaggctggactttctcttccccttgctgcgtccctcctctcccccggggtgggcatggtacgtcccgccctcctcgcattcccgtccctccttcccttccggagcggtggcatcgccgccatcttggcattcgggttgcgggaaagagccaaaccctggcgttggggggcccgggcggggagcccctcccgcggtccacagcgacgcctgcccagccctcctccccttccggctccggcacggggccccgaggcgttcggaggccaggcgggtttctgtcaggcccggggaggaggggcgggcggggcggccgctgcctccccgggacgggccgt

SEQ ID NO: 17911 - DNA, 2300 bp, Homo sapien
tctcctgcctcagcctccagagtagctgggattacaggcatgtgccaccacgcccggctaattttgtatttttagtagagacggggtttctctatgttggtcaggctggtctcaaactcccaacctcagatgatctgcccgcctcagcctcccaaaagtgctgggattacacgcgtgagccaccgagcccagcctgtttctttctttctttctgttttttttgagacaaagtctcactcttgtcgcccaggctatagtgcagtggtgccatcttggctcacagcaacctccacctcctagggtcaagtgattctcttgtgtcagcctcccaagtagctgggattacaggcacccgccaccacgcccggctaatttttgtatttttagtaggatggggtttttccatgttggccaggctggtctcaaactcccaacatcaggtgatccacccacctgcctcggcctcccaaagtgctgggattacaggagtgagccaccgcgcccgggcaataagtatttttaaaaagccataagaactaataagtgaatttagcaagcctgtaaaatagaaggttactatacaaaagcacgttcttatctattagtagcaaacaattggaaaattaaaatttttaaattttatttaaaatagcatcacaggccgggtgcctgtaatccttgcattttgggaggccaaggtaggcggatcacctgaggtcaggggttccagaccagcctggccaacacggtgaaatcccatctttactacaaacacaaaaatcagtaggtcgtggtggcgtatgcctgtaatcccagctactcgggaggctgaggcaggagaatcgcttgaacccaggaggcggaggttgcagtgagctggtattgcgccactgtactccagcctgggcaacagagtgagattccgtctcgaaataaataaataaataaataaataaataaataaataaataaataaataaataaataaaatagcatcacaaaaaatacaacatttagaataaatttaacaaaagatgtgcaaaacttctattctgaaaattacaaaacaggtcgggcgcagtggctcacacctgtaatcccagcactttaggaggccgaggtaggaggattgcttgagtccaggagtttgagacaagcctgggtaagatggcaaaaccctgttgctacaaaaataaaaatagccaggcgcggtggcttatgtctgtaatcccaacactttgggaggctgaggcggggagatcacttgaggtcgaaattcgagacaagcctgagcaacatggtgaaaccctgtctctacaaaaaatacaaaaattagccgggcgggtggcgggcgcctgtaatcccagcgacttgggaggctgaggcaggagaattgctgtccgggaggcggaggttgcagtcagcttcgaccgcagcctgggagagcaaaactccttctcaaaaaacaaaaacaaagggagaagaagaaaaagaaaaagaaaaaagaaaaacatgccaaaaacacatagtaactgaagggaaaggaatctgccagcttcccactatgggaaaatctgccactgtggaagctggcagattttaaaagtttggcaaacggaagctgatggaatttcgatttgatggtttctatttagcttcgtaaaataggcctggcataaggggatttgctgtgagtcaaggtctgaggaaagcgccagtttgcaaagccgttttggaaaactggagcgtgggggtgtgtgcagggtgaggggaggaggcctagtctggtccaccttaggtctagcagagactacgtggagctttgagccgaatgccctggtgagctgccatggcaacacagccgtgggcacaggcccacggcaacccatcactgaacagagttgtggcgtttcaacagagagtctgggacatcaggcaacgtggcgacccgaagcagccaaaatgagacctcgacagcaaaggcctcgacagcggagcccggacctttgcaaaatctgcaagtaacgccaacgtcacaaagcgcgaccgagccctgtacgtcatcgttccgcgacgccgacgcggtgagatgacgccctcccggaagtgacctctagagcggtggtgaaactggcagttgacggctcctgggactagatcccgcgaggtagcccccgaactatttctctacgttttctcttgatcctcccgaaatcttccagatccgcgtagtgaggaatcgtctccaccgtcatggggggcggagacctggtgagtggagggaggcctgggcgggggag

SEQ ID NO: 17912 - DNA, 2300 bp, Homo sapien
ctagacagggtactggttctcagtcttgggtataccttgacatctcctgggagcttcacaattctgatgtctgagtcctattctgcagtctgacttaattggtctagggtatggaccggaaacattttcaaaagctccaggttagaacaactcctctctaggtctggtacattccataactagtcatggaagacactaagggtagtcctttttgataccaagtggagcttgtattatacccaacttacaggtagaaacatttatggctgagtatttgcagatacagatacataaacacaaaccttaatctaaaaaccctgtttagtccacttccctccaaattattgttctaaacaaacacccatttttccaaaacgctgggtgtcacctaaataaactcttacacgtttagaaagaaatgctaacaacctcctaccttaaggccaagtcccttattatcagcgctttatgcctgttcagttggcaaaaatttaccacattcttccattctcaaactagagcttggaacataaattacacgatcatcctgtttgtcaaaacattttcatagcaaaatacctgtaggtaccatcaacttaatcatcttccactatgacagtaaacctacatggcaattactgttgttttataaatattcaatttactccaaatctgttaactgctaaaatgtacatacataaacaaactcacatcattcctcaaaatccatgtgtgtgtccaggatctaactatatagtctatcttaacttcaatgcctttttttggggcgggggcgggaacggaatcttgctccgttgcccaggctggatggagtacaatggtgcaatctcgactcgctgcaaactccacctcccaggttcaagcgattctctcagtagctgagattacaggcggtgcgccaccacgcccagctaatttttgtatttttagaaaagaggaggtttcaccacgttggtcagcctggtcttgaactcctgacctcatgatctgcctgccttggcctccgaaagtgttgggattacaggtgccagctaccgcgcccagccatttgaatgccttcctcactccaggagaagctaccatgtatagccagtcattgagcagtatctactattatttttgggactcaaaacccaaataatactttttgaggccaaaattgtaaatacagcaattggaagatgctgaaagtctgcaaactcacaaaaaagcaaggattgctttaaaaaaaaaatgcccagagtttccatttcagaaaagtgatggtcagggtatgtcaaaaacactgtagaggcctgggtgggcagatcacttgagatcaggagtttgagtcgtttggcaaacatggtgaaaccctgtctccaccaaaaatacaaaaactagccaggcatgacggcaggtgcctgtaatcccagctacttaggaggctgaggcaggagaatcgcttgaaccctggaagtgaacagggagacaagcactgcaaacaaatactttttaatgggtttagtttttttttttattttttacaaatatactggagaatcatgcaatgctgccagcattggatgcaatccggggccacaagtctgcacactcctttgctactggtcctgtaatggcagaacctgcattaaaaaaataaaataaaataaaataaaaacatgtgggggacagattaagacatcgtcaaacacagaagatccttggcctgtacttctagacaatccacccaacctcagagacctaaggaacaagctggactgatttcctacctttcatctcgcctttattgttcactatgactcctgcattatcttcaaaataaagaaacacgccatcttttctacggtatgactttcgttgtcgaatgaccactgctggatgtactgagagaagaaaaaaggacagcagtcattaacctgtcaagtcgcagtgccaccacaaaagcagtttccaactagacagaatgtacactcagcgtttgagacagtgacagtgtaaatatcaatcttcaaggtgatcctcccacctcagcctctctagtatcttggactacaggtgcacactaccatgcccagatttttttttttttttcatagagacagggttttgccatgttggcaagcctggcctcccaaagtgctgggagtatagggagtaaaggcatgaaccacgatcatctattcacatcttaaaatcaaagctgccagtattttctcacaagtgtaaaactctcaggacaactatccttgcctatgccttttccaacttcaccttac

SEQ ID NO: 17913 - DNA, 2300 bp, Homo sapien
ctcaaagagctatttatctatatacatttttgagacggagtctagctctgtcgcccaggctggagtgcagtagcgcgatctcggctcactgccgcctctgccttctgggttcaagcgattctcctgcctcagcctccggagtagctgggattacaggcgcccgccaccacgcccagctaatttttgtatttttagtagagacggagtttccctgtgttggccaggctagtctcgatctcctgacctcgtgatccacccgcctcggcctcccaaagtgctgggattacaagcgtgagccacaaggcccggccactatttatattttacacttgatcttggccaaaaggccgagaagcgatactatttatatttttataatacatatccccatctaacatactacatactgcaattacttattatatcttttgtttagtgtctaatatcctcctccacctgcaccccagcagaatgtaagctccataaggaaaagaatgttgatctattttgttctctgatgtaatccgctgtacgccctggacagaacctgctgtaaagtaggagctcaataagtatgtgaattaatgtatcgtgggaaggaaagaacccagagaataaggggcggctgaagctgtgaaaggagcaattaggcctggcgcgggggctcacgcctgtaatcccagcactttgagggaccaaggcgggcagatcacttgagatcagaagttcgagaccagcctggccaataacatggcgaaaccccgtctctactaaaaatacaaaaattagcccagcgttgtggcgggcgcctgtggtctcaggtactctgaggctgagacagagaattgcttgaacccggaagacggaggttgcagtgagctgagatctcgccactatactccagcctgggcgacagagtgagactcggtctcaaaaaaagaaaaaaagagtgtgtgttgggggggacgggtcaataaatagagcaatactgtatatgtaaaatacagaatggtatgataccaagaacacatagatggaatgatctgcagcacttctcaactgtattacattcaacgaaaccgtttagagcttgttctccctccctcccccactttctttgttccttggggaacccccacacggcacaaaccgtgttttaattcctattctctagtgtgcagataagtgcctggcactattaagtggtcaaaagaggtcgtgagcaagttaacaaatcactgtttccatgtccctaactactcttaagctcgtagagaagatacttcctatctcttgcgcttctacctcaactcccacttcgcagagagggctaaaagcgacgtcgtaaacttattacgtaataaggcagcgcccagaggcggaagaggccggtttttgctccggccacgtgaggagggtgggcggggcgttaaagttcatatcccagtgtcctttgaatcgacttccttttttcttttttccggcgttcaagatgtcgaagcgaggtgaggttttgtttctggaggatcctccaccatctgtcgtgcagtggctggcggattcgtcaggagcggtggccctaggcagctggggcgctttgctctccttcaggccggagagagagagccaggccaccgcgagagcactgccagggccctcgaaagtggcagtggggtgctggagagttgagatggcaggatcccgacgtgaatgtagtctggataccgcgagatcgctccgcgaatagggctatcgtaatggggttgaagttagactggattaggccctggtttgcgcgacctctgcggttttatgccttgcaggagtaattgcgttttgcgaaagttagagcaagggttgagtcgtctaggtttcttaatttcgatgtcagagtgttaatagtaagaaataggctactttccgtgagaatcgggtggcacatggggacggcataagtaaaatccgagcgagctaatctatagcgtacagtctatcaaagcatgtgcggtgaattacagcttgagtatgagggggaactccgaaccatgtctagattgtgatctctttatcctgtttcccttccctttatatccacaggacgtggtgggtcctctggtgcgaaattccggatttccttgggtcttccggtaggagctgtaatcaattgtgctgacaacacaggtgaggtctttgcacgttgctatactcccccttttaaaagcactcaatgggcctgtggctaatgacctattgagccgtcaagaaaggggagagtgaaaacatcgcttttgggtgaagtg

SEQ ID NO: 17914 - DNA, 2300 bp, Homo sapien
tagatatcggccgtggaggttgcggtgagccaagatcgcgccactgcactccagcctgggcaacaagagcgaaactccgtctcaaaaaaaaaaaagaaagaaagaaagaaaagaaagaaaagaaaaagaaaaaaaaactggtaatcaatttattaaaatagttgacttaagcatctgcaatggtgacttccacctcaactcctggctcaatactgatggaagtaatctgcttaacaatctcagaaggactgtgcaagtcaatgagtcacttgtggattctcatctggaaatgatcccatgtcttagaaccttcaccacaaagtttttcttgaagtgattctcaaagtcttggcaggcattcgaactggtcctttcactttgagattattttcctttgctcctctgatcaagtcagcacacaccttctccagggattttacgatgcggctcgttagagtgactcgaattcgtgaattgccacctccgcctccctgggtgtttttccggtatccttaaaagccatggctgctgcgcggcttcctgagcgactggttcctcggcgagggcgaacagcggtgagtcagtagcaggagcgtgcggatcagcgatccgcaacacctacgaccgcgtcttcctcaaagagctatttatctatatacatttttgagacggagtctagctctgtcgcccaggctggagtgcagtagcgcgatctcggctcactgccgcctctgccttctgggttcaagcgattctcctgcctcagcctccggagtagctgggattacaggcgcccgccaccacgcccagctaatttttgtatttttagtagagacggagtttccctgtgttggccaggctagtctcgatctcctgacctcgtgatccacccgcctcggcctcccaaagtgctgggattacaagcgtgagccacaaggcccggccactatttatattttacacttgatcttggccaaaaggccgagaagcgatactatttatatttttataatacatatccccatctaacatactacatactgcaattacttattatatcttttgtttagtgtctaatatcctcctccacctgcaccccagcagaatgtaagctccataaggaaaagaatgttgatctattttgttctctgatgtaatccgctgtacgccctggacagaacctgctgtaaagtaggagctcaataagtatgtgaattaatgtatcgtgggaaggaaagaacccagagaataaggggcggctgaagctgtgaaaggagcaattaggcctggcgcgggggctcacgcctgtaatcccagcactttgagggaccaaggcgggcagatcacttgagatcagaagttcgagaccagcctggccaataacatggcgaaaccccgtctctactaaaaatacaaaaattagcccagcgttgtggcgggcgcctgtggtctcaggtactctgaggctgagacagagaattgcttgaacccggaagacggaggttgcagtgagctgagatctcgccactatactccagcctgggcgacagagtgagactcggtctcaaaaaaagaaaaaaagagtgtgtgttgggggggacgggtcaataaatagagcaatactgtatatgtaaaatacagaatggtatgataccaagaacacatagatggaatgatctgcagcacttctcaactgtattacattcaacgaaaccgtttagagcttgttctccctccctcccccactttctttgttccttggggaacccccacacggcacaaaccgtgttttaattcctattctctagtgtgcagataagtgcctggcactattaagtggtcaaaagaggtcgtgagcaagttaacaaatcactgtttccatgtccctaactactcttaagctcgtagagaagatacttcctatctcttgcgcttctacctcaactcccacttcgcagagagggctaaaagcgacgtcgtaaacttattacgtaataaggcagcgcccagaggcggaagaggccggtttttgctccggccacgtgaggagggtgggcggggcgttaaagttcatatcccagtgtcctttgaatcgacttccttttttcttttttccggcgttcaagatgtcgaagcgaggtgaggttttgtttctggaggatcctccaccatctgtcgtgcagtggctggcggattcgtcaggagcggtggccctaggcagctggggcgctttgctctccttcaggccggagagagagagccaggccaccgcgagagcactgccagggccctcgaaagtg

SEQ ID NO: 17915 - DNA, 2300 bp, Homo sapien
ccatctccgatgcccattggtttaacgttaattataatttgttttggggtaaaaaatatgtcttggacggggcagtagttcgtacttgactatgaaaactaggagaagtaatccaaattcagaggttttcatatactcgcgaactcgaacaggacagggcacacagatagaaggtagacagcgagcaattttcccctcttccttcttgactcagctcataggcagggctttggcttgataagctatacatggaaagttcaaggcctaaaggagaggtaaaactggttcctcctgggttttgcacggaaccgcagctctgctgatctgtgatctctctgttcagcctagagatacagctcacagtaataggagccaggagaaaaaaatgcgcgtttccccggggtccgaggaatgacacaaccacattccgggtttaaaatatcgcagctgccctttgacccaggcagcacgcctcttcctttctcctttatttttcctttttttgggcaaaacctagtcgagggggacgcccttgtctcccgtcacacttaccattttcctccggcccaacagtgaccctgtcaggcacgcagccagcagatacttgtccccatctttaggttatgaaactccatggccttttattcttacttcagtggttcttaaaatgtggtccccacaccagcagcaccagaggcacctggaaacttggtagaaatgcaaattctcggggcccccttacagaatcagaaactagcagtgttttaacaagccctgcaggtaattctgatgcacgttcaaatttgagaaacactgtgttcgtttatctcagtttgcactgggttataactttacttttgtacattaatagtcaaggatgaacacagcacgtccatgtcaccattaatacagaaagttgaagttggagaagggctgtgtctatgggtttccctcgcctgacccaccctccacccccaaaaggaacgccaagttgaggcgttcccctgtctccctacccccattggaaacatcctgtccctcaaacccggcacctcgaactgtctgacccatctgaggctggcgcccgtggccgcagaaatccctacacctctggcgcgagtaatgcggtcgcgcagcttttatacccaccccctcctcccgctgagcacaaagtaaaaccgaaagatttctgctaaggttgaaaaatgaggaagatactttttcttttctttttttttttttttttagtcaggacccaatgttaaaatgtgagtcaagaatgaaaaacagatggttaacaaggggaaggaaaaaccaagccattgagggggcacccggatttgaaccagggacctcttgatctgcagtcaaatgctctaccactgagctatacccccgcgcctctacagcgcctggaggcggctccttgggtgctaagcattgttgcagctgctacactgtgagtagtggtgtaacagaaggagaaaggaatgctggagaaaaaggggtcaagctgaacgcagacggtgcccgcatccggggaaccccgggaaggtgcactgcaggggctcgagagggaagcactagcccgggcccggcagcgcgcagggtccaagagggagggacgggttccgccccacaaatgtgggaaagggtgtgggccggaagagagctaagaggggcagggtagggggtccccgttcggtccgcagattcatgccgggtagaaagtccccgaatgcggtgaatcagttccagcgttcaggaggatccaaccccaccctcgacgggcttgaggggttagcccgcctcccgcagcccgggcgccccagatgtgcagcctgctcgcctctgcgccgcctccggctggggaagggccctgggcaccgggcgcagtcagcctgagagcgctgaggcgccagcaccgcgggccccgccgtccccccaggaacccgcccccgcgcagccccacgtcgcccggagagcgcgcctcgctgcgcgtgcccttgcccgcgcccgaggcgcgtgcccgccccagtgcagcccctcctccccgctgtgtttattaggggaaggagggcggaggcggaggccagttccccagctccagccgccgtcgctgctgcctgtgtagttgcagccgcggccgcctcccgccagctcgcctcggggaacaggacgcgcgtgagctcaggcgtccccgccccagcttttctcggaaccatgaaccccaactgcgcccggtgcggcaagatcgtgtatcccacggagaaggtgaactgtctggataaggtgagccc

SEQ ID NO: 17916 - DNA, 2300 bp, Homo sapien
gtggtcaaggtgggggactctgtagccagtagagcactgtgggggcaagagactgacttgaaggcttggagcctcacatgcccgcctagtggggtggtcctgagggatatgacttctttgggcctctctgctcatttttggaacctgacccgagaaggagcccatccaagacaatgtcccgccctcagggagggtctggcagtttttatccctaaaggctgggattctcagcggagcatcctaggctgtagtacccacgacatcttgcacacaagaggtggaatcgcctgttgatgaagagcaaggctctggaatctgtgatcttgggccactcacttcacttatcaatcccttcgcttccttcttgcctgttacatggggtctgcaatctacccctcaggggcgctgacgagctcacatgagcctgtgacataaaacacctagcacggccctggcgcagtaagagctcaggaaacgggctgctgctgtggttactgtggacccaggcggaaacagagcagccccgcccctgccgcaggcatataaaagtgaccacttggccggtcacggtggctcacgcctgtaatcccagcactttgggaggccgaggcgggtggatcacctgaggtcaggagtttgagaccagcctggtcaacatgatgaaaccctgtctctattaaaatacaaaaaattagctgggcgtagtggcaggcgcctgtaatcccagccgcccaggaggctgaggcaggagaatcacttgaaccctggaggtggaggttgcggtgagctgagatcgtaccattgcactccagcctgggcgacagagccaaactccgtctcgaaaaaaaaaaaaaaagaaaagggaccactcactttggtctgattcttcagttctcatggtccttttacatcggtcatttcattgcattctccaacagtgtctgagggagactggtgtctcattttgcagaggtgaaaactgaggcttggcaagattaggtagcttgtccaaggacacacagctggtgcttccagagcgagacctggctttctgtacccaaagctcttgggtagtctctcccatcctgggatcttgagggtcacgggaaggaactgggtggtttgcagtgggacccttcacctagtgccttctgaccttgcagataaaataccatgaggagtttgagaagagccgcatgggccctagcgggggcgagggcatggagccagagcgtcgggattcacaggacggcagcagctaccggcggcccctggagcagcagcagcctcaccacatcccgaccagtgccccgggtgagtgcaggtcctgttggtgcagatgacctgaggcgaggccagtggggtggggaggaagccaggagaagacagacagacagatacaccttccggagccttgctcttaatcaacaggcgattatgcctcttgtgtgcaagaggggaccagaggacctgaggccgggccagctggggtggggaggaagtcggcgagagacagacacacacacacacacacacacacacacacacacacatgcacgcacgcatgcaggcgaggaaaagactgcttcccaagaccccaagttccattctcatccagaatgaggacgtgagcaccagggtcaggcctgtactgggccaagaggattgaaaggagaggcccccaggtcatggggctcagagcccctgcgtgggatacaacacacaggcaaatgtgcacacgtggacatcagcctttgagctgtggggcttgagccaggttgggggcggggtggaagtgcatggtatggacttctcgggagctctgggaggggctgggtttggcaggacagtttccaagccctgtctcctcccatcttccagtttaccagcagccccagcagcagccggtggcccagtcctatggtggctacaaggagcctgcagccccagtctccatacagcgcagcgccccaggtggtggcggggtgagtaaccctggccggaggggagaggccagaggcagggggtccttcgggaaggcttggacacagctcatggattctcctgacctttgcacccaccctctgttgtgtgtgatgataaggatctcagccttgtgagcagagaggaaattggttggcgtagtgggcagaggctggctgggactggggccctgcgttccagccctggtgtaccatgggcaggttgctcaccctgctttgggtggggtttccttaccccagctacctgggaacacacaaggcaactttctgcatggggccttccagcactgggcgctg

SEQ ID NO: 17917 - DNA, 2300 bp, Homo sapien
atactttcccaatagaagggaattagttggcaaagcttgcctcatgtcggcctgccccactccccgggaggcttcattcaccttcagatctatttgatggaacagtgctttgggggacattgctgccaagtctccactccctgctcacagaaagctctgcctcctggaaatgggccaatgggaggagtttctggatttccttctggcagtggcctaagttcctgaggtcttgcattatgagggggttaccaatatatcttaaccccaggcctttaaaaaaaatattatttggggtgggggccaaggagactaggcctcagagacgtcctagggaatgatttaatttaatagaaaataattgaggcttataaaaaggcacaaaaatcctggctaacacagtgaaaccccgtctatactaaaaatacaaaaaataagctgggcgcggtggcgggtgcctgtagtcccagctactcgggaggctgaggcaggagaatggcgtgaacccgggaggcagagcttgcactgagctgagatcgtgccactgcactccagcctgggtgacagagcaagactccgtctaagaataaataaataaataaataaataaataaataaataaataaataaaaagaataaaataattctcttttccccctcagaagaaaccacttgaattttttaaatttcagggatacccctggggaattcttcagtgtcctctctgtgtacaacactatgctgagcttttggaagaggataccaaagaaaacaaaactaggccgggtgcggtggttcacacctgcaatcccagcactttgggaggctgaggtgggaggatcgcttgagtccaggagtttgagaccagcctgggcaaaatggcaagaccccgtctctataaaaaaagaaagaaggaaaacaaaacagtgggtaatgactgcaaagagacgaaggagtgggtggaggaggggtctctggtgctcgtcctgtaggtggatcgatgtgaaagcagtccactgcaagctgagcagtgcacgtggggtgtaggggccttccggaccaacagggggagcagtgtggcgcaagaggaagaatatggactttggtgtcagcatgcctagttttgaatcctggtctctgacatttttaattaattaattaattattttgagacggagtttcactcttgttgcccaggctggagtgcaatggcacaatctcagctcactgcaacctccacctcccaggttcaagcgattctcctgcctcagcctcctgagtagctgggattacaggcatgtgccaccatgcccagctaattttgtatttttagtagagctggagtttctccatgttggtcaggctggtcttgaactcctgacctcaggtgattcacctacctcagcctcccaaagtgttgggattacaggcatgagccaccacacccagccttttactttttattttatttattaatttatttatttttgagacggagtctcgctctgtcacccaggctggagtgcaatggcacggtctcagctcactgcgacctctgcctgccgggttcaagcaattctttagcctcagcctcttgaatagctgggataacaggcacctgccaccacgcccggctaatttttatttttattttttttttgagacagaatcttgctctgtagcccaggctggggtgcagtggcgcgatctcagctctgcctcccgggttcaagcaattctctgcctcagcctcccaagtagctgggattacaggcatgcaccaccaagcctggctaacttttgtatttttagtagagacagggtttcaccatcttggccaggctggtcttgaactcctgaccttgtgatccacctgcctcggcctcccaaagtgctgggattataggcatgagccactgcgcccggctggtctctgacacatctaagctatgaaccattagggtaagtttctgaccatctctgagccccatctatgaaagactcatagggaggttgaaattgcaccacatgtacgatatctggcccagtgtaggaaatgtataaatgttagcttcatccctcagggaagcccactgagatccacacgaaacttttgtctgtgtctccccataatgtgacctttagaagttgccaatggcccacccaatacccaaccatgatttttctgagataatctgcccgaggtgtgtgagaggaaacgcgaagaaggcagtcaggaggattcactcttgggggagctgggtaggatcctatctcctcctacatccagagcatgcaggctc

SEQ ID NO: 17918 - DNA, 2300 bp, Homo sapien
gtgcgtctggcccactgccaacgggatgatacttggtcaaggacctctaatcaatgttggagacagggggaaaaaaaagaattgtctgcagctgggcacggtagcgcaagcctgtaatcccagcactttggcaggctgaggtgggtggatcacctgaggtcaggagttcaagaccagcctggccaacatggtgaaaccccatctctactaaaaaatacaaaaaaattagctgggcatggtggtgggtgcctgtaatcccagctacctgggaggctgaggcaggagaatcacttgaatctgggaggtggaggttgcagtgagccaagatcacaccactgcactccagcccgggaaacagaggcagacttcatctcaaaaaaaaaaaaaaaaaaaaaagaattggctgcaaaaggatacaaagccagggctgggcccggtggctcacacctttaatcccaacactttgggaggcaggcagatcgcttgagcctcggagtttaagaccagcctgggcaacatagcgaaaccccatctctgctaaaaatacaatggtggtgcccacctgtggtcccagctactgggtggctgaagcaagataatcaattcaacccaggaggcagaggctgcagtgagccgagatcgtgccactgaactccagcctgggcgactgagcaagactctgtctcaaaaaaaaaaaaaaaaaaaaaaaaggccaggagtggtggctcacacctgtaatcccagcactttgcagtgctgaggtacgcaggtcacctgaggtcaggaaaaaaaaagatacaaagccaaatggatgaatatatgtgactatataaaataacagcatgccaactaatcctaaatttccactcagtctttatgtagttccttatatattttgtgttgggtataatgtagaattgatctacaaaagtagaatctttcccccattccctcttccctcagcccttctcctgactggctccttctcctccatcagttctcaaatcgtcatatcaaagggaccttgagtatcagtctatctaaagtagctctccgccaacacacacacaccccatcattctgtcttatttcctctgtcacgctgctctcaccggaactgctctcaacatctgtagatgctctgtctgttcattctatcttccccattaggctaataaactccattaaagcaggaaacgtatctgtcttgttctctattccatccttagggcctactcctgtgcccggcccagagcaggcttcaataaatagttacagaatgaatgaagaaatgaatgaatgagaatttaatcttctagccaggaaggcctagctagaaagatttgtcttgatttcatcttgagaggatggagacacacatcttcctttgattccagacagatttattatttatgtgtttatttagagaccgggagcggggttatggctgggggtgggggtctccctatgttgcccaggctggtctcaaactcctggactcaagggagcctcccgcctcggcctcccaaagtgttgggattacaggcgtgagccaccgcaccggcaagacaaatttaaaaaggaatgtctggaggtttttttccaccaaaaggtttgatgaaaccccttgtaacttgccctactggagtcagtgggggtgggaggaactcaaaaattgtctcaaaactaggtgaagggaaaggcagtggagcagagacgtggctcgccacgttcaggatcttgggctacaccctccccttccccacaccgtaacggctccagccccttcttgtcttcagcttggagcgaagggtggctgaggcctgagtttgggctccaggaacctcgcccttgttagttattcatgagacggagggcaccatgggagctggctctcttgctattcataaagcggggaggcgggaggcgggggggaacctccttcccgctagggcttctgggaagatctacaatattcatgagggaggcgggcactacgagagctgaggctgcttgctattcatgagggggcgggcctccttcccgcgggggctcttgggaagattctacaatattctagaggccgcggggacgcctggtgggtagggctgcagctccggagcctacgggagtgtgaccctctcgcctcctggcgggaagctcttgaggagatattttcttttctaaacactaagaaatttgaggatggtggggcaaaacgactaactcccactttcctgtgactctgtagccggaaaaactgtcaaaatctgtggtaaaagagggttttttttcccagt

SEQ ID NO: 17919 - DNA, 2300 bp, Homo sapien
atactgcagatctagatcaggctgcagatcatcaggcaaattaaatactttacttgttccacctctagatagtcagaattcaggccgggcgcggtggctcacataatcccagtactttgggaggctgaggcgggcggatcacgaggtcaggagataagagaccatcctggataacacggtgaaactccgtctctactaaaaatacaaaaaattagcaggacttggtggcacgcgcctgcagttactcgggaggctgaggcaggagaatcgcttgaacccgggaggtggaggttgcagtgagccgagatcgtgccactgcactccagcctgggtgacaaagcgagattccatctcaaaaaaaaaaaaataaataaataaatataaaataaattaaaaaacaaaataaaataaataagatagaattcaaaagcaaccaagtttactgtttcgcccaagaacctgaacaaagatctagctaagtatctgaagcttgctaaggttgttgtgtggaactccacacctatttgtatcaaaacctcagtgtcagaaacaaactttgcaggatgagtatttagattcaagtatggatacagtgtatcgcagcagcctgcctccagaactccagatgaactcagatgagcctccagggccccctgagagagttggactttctcaattccatgtagagcctgaaactcaaaatccagagacccttgaagagatctagtcctcttcattccaggaagaagccccagagcagcttccacagctcactgaagaggcagaaccttcttcaacccagcaggaggccccagctctgccttgagggggtccactcttcttcaacagagcaggaggccccagcacagcaactacctgcctctgaagagattgtagctctgccattgatacatcatgaggtaaatgttccattgaaaagttggagtgaagctcagcactcacacttgcgcagtgtcacagtcaaacctgtggatgtggagcttgcgctaactccagagccagaaggaacttatgtcaagccaggaacaggcctctgctcagcctccagagcgcgccaaagaggtgggctcttcctcaacccaattagaggccccagctcagacaccagagcgccctgaggagacgaaaccctctgcaaccagcaagggaccccagctgagcctccaggtcctcttgtggaggctgaactttcccccagtgagcaggagcagccagctcagccttctgagtttcctgtggggggtgggggggttgaaccttctgagacccagcagaaggccccagctcagcctccagagtcctctacagagagtgcagctcaaactccatcaaagcatgaggtgacagttcaccctccaggtgaggatcaagctcattataacttgcccagcattacagcgttacagtgaaacctgcggatgtggagattaccataatttcagaacctaccaaggaggcagaatcttctccatcccagcaggagatcccaacccagcctccagaggaggtggaagcttctgcaacccaggaggaggccccagctgagcctccaggtcctcctatggagtgtgcaccttcccccagtgagcaggagcagccagctcagccttctgtgtttcctgggaggttgaacattctgaggcccagcaagaggctccaactcaacttccagagtcttctatggagagtggagctcaaactccactgaatcatgaggtgaccattcaccctccaggtgaggatgaagttccttttgacttgtccaacgttacagttaaacctgtggatgtggaggttaccataacttcagagcctaccaaggagactgaatcttccaaagcccagcaggaggccccagctcagcctccagaggagtggaaccttctgcgagccaggaggaggccccgactgagcctccaggtcctcctgtggaacctgaacgttcccccggtgagcaggagcagccagctcagccttctatttcttctgggaaggctgaatcttctccagcccagcagaaggccccagctcagcctccagaacatcatgaagtgacagtttcacctccaggtcactgtcaagctcagcattcagatttgcccaatgtcactattaggcctccagacatgcagctcactatagcaacagagcctactgcagaggtgggaagttctccaatccaccaggaggctacagctcaggtctcagggccaggaagtgatgtagaaccttctgccacccagcatggtggtgcacctctgcgtccagagtcatcagaa

SEQ ID NO: 17920 - DNA, 2300 bp, Homo sapien
ttgtcctacctccaagacaattaaggagagcagacacaaaggtgaggttagagtgaaagtttaataagcgaaagaagaaagctctctgccagcagaaagggagtcccacacgggtgcccctatgaggctgatgtccagggtttttaaagactgggaaggggaaggaatgtggttagttgccccaggaccactcaggagctgaaatgatgattcctagatgctgcttagcttggcccaggaccaatcacgagctgaaatgatgattcctagatgctgcttagcttggcccaggacctatcaggagctgaagtgaaagcttggccccggacctatcaagggctgaagtgataattcacagaggccaaacttatagtccaaaaaggaaagtagagtgtccactggaacccactggagcccactgtagccacgcccacaaaaggagaagaaactttgtcctgggaggccgctgactatacaaaggacaaagacatttctatgccaggtcttgttcctttatgtgagtgagatggaagtttgttgaagtttttatccaaatggacctgaggtttttctatctgtgcagccgtgggcatgtctccaggcacaacaccctgtgcctgttcccttatgggtgcctgcagcttgaatgttttcccaggctgctttttctgttgtgtggggatgaggcactgacctgtgggccgggagctctctggggacccttcccttgttatctacctaaggcaagctaactaactcctttcaatattactattgtaaaacctaagggccgggcgcggtggctcatgcctgtaatcccagcactttgggaggccgaggcgggtggatcacaagttcaggagatcgagaccatcctggctaacacagagaaaccccgtctctactaaaaatacaaaaattagccgggcgtggtggtgtgtgcctgtagtcccagctgctggggaggctgaggcaggagaatggctgaacccgggaggcggagcttgcagtgagccaagattgcgccactgcactccagcctgggcaacagagcaacactccgtctcaaaaaaaaaaaaaaaaaaaacctaagattggcgttctaggtatttttcagaccctgtattctgatggaccagctgggaccactcagattggcaaactggctcatctggtcttgtggcccccaaccaggaattcactcagcacaagaacacaagttttgacaccctatgatttcatccttgacccaaccaatcagcatttcccactccctagcccccagcctgccaaactatccttaaaaaaccctagcttccaaattttcagggaggctgatttgagtaataataaaactccagtcttctatttagctagttctgtgcttattaaactctttctctatttcaataatgctgtctcagtaaatcggcttttctgggcagtgggtacaatgaacccatcaggtgattacactgctctaccacgtagctgattatgacacctacccctctcagacactatcagctccaatttggacctattctttgaatttttttttttttttcaaaattgatctctacttctcattcaaacctcccatctcccacatcatctgacctccacaagttcacgtacacaattccccagaatcacgtaggacaactaggaaattctttttaaggatttcatgctagactgttaatagcttagtgagttatacttttatttgaatatgttaaactccttaaaaaaaaacctcttaagtcaaaagattgcatctttcatggttatttcccacaagctcagtaggtagtgctaatacttagtaccctaatctccagcaggagtgaagatgaaactggctgctataaatatgtccctaccctttcatgctgtcaggccattttgggactgtaccctaaacatgcacttgaatggaagttctaaactcagggatcgtggcggtgtggctggaggacaggaacaggctcagaggccggccccaggtaggaggggcgagggagcgatccgggcgccgcccctcccctcgcctgcgcctctttttttaaaaaaagcgtgggcgtgccttgcgcaggcgcagtactgcgcgagccttagccgcgcaggctcagcgaagggaggctggcggatctgctaccttttgcggttcccaccaagagtgacaaaaccttgctagtgtgggagctgagctctggacccacggccgacgctttgcatgtgagcctgggccagggtggagggagggatggagaaagccgcccacctgctaactggga

SEQ ID NO: 17921 - DNA, 2300 bp, Homo sapien
ggactacaggcgcctgccaccacgcccggctattttgtatttttagtagagatggggtttcaccgtgttagccaggatggtcttgatctcctgacctcgtgatccacccaccttgacctcccaaagtgctgggattacaggcgtgagccactgcacctggcctatttttctccgtattacttatcacctcctgcatcaaattatgtgtatcagccagtcacagtggctcacgcctgtaatcccagcacttcgggatgctgaggtgggaggattgcttgaggccaggagtttaagaccagcctgggcaacacagtgacacccccatctccacaaaaaatccatttttaaaaagttagctaggtatggtggtgcacgcctgtagtcttagctacttgggatgctgaggctgtaggatcgcgtgagcccaggtgttggaggctgcagtgagccatggtcgcgccacagcactccagcctgggtgacagagcaagacccagcctcaaaaaaatagaaaagaatgatccatgtattggtgtctgttgcctatcttccccctggaatgtaagcacaggagagccgggactgtgcctggtccatgacaagcactcctttgaatgaacaaaggaagtagggttttcgacatcctagtctccaaaaacagggttgtagaagggaagagttctgcctggtgtgattgtccctggtgtgagtcactggacacaggagcctctaaggaccccaactctgctaacttggattcccacacacatgagagaatgtcagtgcttacacacaccagggtgtctgcacacgcccgagactcaggtggctccatacccaaactctaccctgccctcgtcctgttaggccttgttctgggtggtgttcacctgagaatgctggtgatacccccagcagccagaccgcaaacgccctttcccactatctgcccacccccaacctggagaatgggtggccctggctgggagtccggcacaggtgtccagagtcacctgtttctcccatgcctctgacagctcagcatcactgtggcctaaggaagtctcatctagatgatgggttggcggcagagggtgggcaagataagaggagagtggcgggaaggggctgtttcagcaagtttgatttggtctgtctcacagagttttcttgggtttcaacaggaacacttcctctgttcatctggtatcacagctgggtttggccaacagcaaccaggctctgggaccctctgctctggggccatatcaagggactgagggctggcgggtgggctgccatgccttttgcctccccctacacaaaccccagtgccccatcaccttcctccatcgttcctcagtaaccctcctggctgcggacctcccctctggctcagcccccttgactcagctcctccatccagaccctctgcccagctgcctccattcagccctctctgcccagtgcctctgccaggcaccccccgccaggccatctcaccacaatgctccttccaattcagaacctcttgctttggaggcctcgaggcgtctagcctgccctcccagtcccagggtgagctggcagctccgaggaccctggtcagaaccatctcctccctaaaatgcattcccacacccaatctaccaccacatcacagtggaaacaggactcttgtccagactcaagatttccggagattttccaccaagaccaattctgaggccctggggacactgggcgtttcggggacgggagcaggagaactggggaagccatagtgctgagtcaagagatcctgggatgtgctgagtcagagatcctgggatgtgctgagtcagagaccctgggatgtgccacaatttattctcaaagaggctggaaaggggaggtcttggcaaaggttctcttcctttgaggatttcaaaattctactccaatgtttacttggttccatggttcaggtttagagccagagtttgggggaaatcaagcataagaacatttagatttgaggaggtgcccctccctttcaccccccttacctcccaatctcccccatggcccagcatccctgaattcctctctcttctctggctcaagcaaaacctcctggcttgtacatcaccatagcaggccccaggaatgcgagggaccctgtgtcagggcagggaccccatcatccaagacagttggcagggagagtgcaagacctgcctggtttctacaaccttccaaaggaggcagctcccgaaagaaggttttcagaacgcagggccttgggagacaggaagcca

SEQ ID NO: 17922 - DNA, 2300 bp, Homo sapien
actgtttttgtcctgggtgtcgatttttcctaagctgtttgcttttactcctactggcagacgaggagcagtgagggactgaaaggaactggggattcaacagcagtggctctcaaaatgtggtcctgggaccagcagcattacctgggtacgctcgggcctcatcccagacctaatgaattagaaacttgagggtggagtccagaaatctgtgttttcatatacgctccccatcgcttgagtccaggagttggaagctgcagtgagctatgatcgcagcactgcactccagcctaggcaacgtgcgagaacctgtctcaaaaaacaaacaaaatacacacacacacacacacacacacacacacacacacacacacacaccctgcaggtgattacgatctcaagttctagaggcttacgttaaaatttacacatttgcttctactatttacaagtttatgtttcagcctgagctcttcttgtaagacagaccacgaggtaccccagatggaggaatgtgcaaagacgccggggctggagctggaatccgtcccgagacttctcaccttgacctcgaggaaggcaggaggtcggagacagggggtgggcaggctggggaaagaggaaacccgcaggacaagagggttgtggctcgtcacgtggccacttgagggcagcaagtagctgcagctggaggtagctgcctatctgattctgtttgagagtccgccaagttgggatttaaattagacatcaagaagaatttacagaccggccttgccttgttccacggtaaggggacattgggtttagggctggaggaggtagtctctgggactctgggcccggcggaaggaggaaccggcgttctaagagattagagagcctttagttgtttcctttcttaggtgtttttttttcttttcttttcttttttttttttttaacctcagtgccacggaatccgtctcttccagcccacagtgtaccttctcctgtccccgcccatatccctcctcctggaaaatttctccaatggcgctcagcgttcgcacccttcctctccgcggttttctagtccctaggccccagcccactagaagccaggatgccccctcaccccgtctcccactctccagcgccccagctccttgccgtcacaagaacgaagtaggtcaggggagggaagaggcatcttcgtgtcctgacctgattccttgccgtctattaaatatcctacattgcgggtatttttattctgtcctggaagaaaaaataaaaagattatctatccccagagcctgtcagaaggtggtgacaggtggggtgagccatttcctcgtctggggctggctctgaagattgattgggtctggccctgagtaggcctggaggccccagagaggcaggaggcctgggttacctactcgtggggaggggtccagactgttgcagagtaaggggtagccaggccccctccaccctcacgtctgctaggcttggggggcaaatcggtgctggaaatggggggtggagggataaggtggagtcatggaaggggggtgggattcaggcccctcttggggagaaaagctgggggtctttgctgcagggggagatttctgggggtgggggctggaggacaaagcatcagagacgcacagaattccgaagaacagctcaggaagtcgcagagcttggaggagctgggggcggggaacagtcaggggcccgtgacccagggatggggcgcctgtcccttccaggggtccagtcctcgggccttctctctgcagctttcccggcggaacggaggagggaaagggagccaggagctcagtgaggagcgcggggcggctgatgcttctaggggttctctcagcccgaggggctcccgccctgtcccctactctgcaccccttgccttgggagcggctgcagagctctaggggagcgctccgttagggctgagggcaggcgccgggagagcccccaacgacgccgcgccccccgccccgccccctgccccagctcccccccacccccaccgacccagcggcccccccagctccccgcctgctcccggaggccgcagcctccagctccgctcgcgctctcgccgctcctgccggctcgcccggccccgcgctccgccgtctcctcgccgcccgcccctccgccagccccggggaccgcgcggccgcagcctgagccagggccccctccctcgtcaggaccggggcagcaagcaggccgggggcaggtccgggcacccaccatgcgaggcgagctctggctcc

SEQ ID NO: 17923 - DNA, 2300 bp, Homo sapien
tactgtattaggatttttataaggctgtagtaaatgctattgaaaaatgcttacctcttatttcagccttctcctctgtctgttcctcaaactggcttttggtttgagagaaggggaggagcgaccctggggttggaaaagcccaggagacaagatggagatccagtctgttcatctgtacatccctggacctggggcggtcctggggacagtccttttctcaagccagtcagtggacatttgggggagagtctaggcacggatatagaggacccaatattcctttttttttgagacagagtctcgctctgttgcccaggctggagtgcagtggcgcgatctcggctcactgcaagctccgcctccagggttcacgccattctcctgcctcagcctcccgagtagctgggactacaggcgcccgccaccacacccggctaatttttgtatttttagtagagacggggtttcactgtgttagccaggaggtctcgatgtcctgaccttgtgatccacccgcctcggcctcccaaagtgctgggattacaggcgtgagccaccgctctcggcccaagattccttaatctagttggttttccgaaagcgtggctatgaaggaagaactcaggagttctagccattcccattgtattttgtgtttttttcagtaggtatcccgacgcaaccctcagattaaaactttaagggaaaatgaagaccacacccctattccatagaaattaactctaatgacaacgtagtggcgtggcgggggtatagctcagtggtagagcatttgactgcagatcaagaggtccccggttcaaatccgggtgccccctctgtgctccggagttacctcgttttgttggtctccggaggtcctctaaagagttcccgcacagatggaatgggagggagtctcgagccctgccaccctttttgctttcgcaggcgagtgaggatggagtcctggcccctgccagtggctcagcctgtgtgtgtacccagggtagaatgcaatgcgagtgagggcgaggagctccgggctgacccttggaacacggtacgggtggctcaacctcgcaatggcagggcggaggcgagcgcacccccaggtcagcctggctctttcttggcgggaaggaggctgagtttctaagggctgggctggggaagacaggtcgggagaagccgcgtgagcatgtgggagggagaaagaagctccgagacgtggcaaggggtcttctgcagggcaggagagtgggacgcccccgaagtgaaatatttcgagagacttctccttccacaccccaggaatatattttcttatactgccagtggggatcttcagctcagagcttcagggaacaacccctgcttccaagtgagtaattcttctgggagttgtattttttccatctcttgtaaacgtcttaccccacttccacttcccttcgggaacgccacacagcgcctgcgcagcaataccactaaacgactacgtgcggtcggtttgccggcagagggggtatagctcagtggtagagcatttgactgcagatcaagaggtccccggttcaaatccgggtgccccctctttggccttttcgagatactgtttttgtcctgggtgtcgatttttcctaagctgtttgcttttactcctactggcagacgaggagcagtgagggactgaaaggaactggggattcaacagcagtggctctcaaaatgtggtcctgggaccagcagcattacctgggtacgctcgggcctcatcccagacctaatgaattagaaacttgagggtggagtccagaaatctgtgttttcatatacgctccccatcgcttgagtccaggagttggaagctgcagtgagctatgatcgcagcactgcactccagcctaggcaacgtgcgagaacctgtctcaaaaaacaaacaaaatacacacacacacacacacacacacacacacacacacacacacacaccctgcaggtgattacgatctcaagttctagaggcttacgttaaaatttacacatttgcttctactatttacaagtttatgtttcagcctgagctcttcttgtaagacagaccacgaggtaccccagatggaggaatgtgcaaagacgccggggctggagctggaatccgtcccgagacttctcaccttgacctcgaggaaggcaggaggtcggagacagggggtgggcaggctggggaaagaggaaacccgcaggacaagagggttgtggctcgtcacgtggccacttgagggcagcaagta

SEQ ID NO: 17924 - DNA, 2300 bp, Homo sapien
ttcaccaaacacctgctcggagccaggccccgtgctgggccctggggaatgaagacaggagtgagactaagccctgccctggcttggaccccagagaagggaaacatcttagaggaggctcctcaaactttatctctttttttctttttatagaaacagggtctcactgtgttgcccaggcttaccttgaactcctgaccttgggctcctgtcaagagatcctcctgccttggcctcccaaagtgctgggattacaggcatgagccacagagcccagcctcctcaaactttaatatgcagttgaatgacctgagagttttgtcaaaatgcagattctgacccagtgagtctgggcaggggtccaggcttttgcctttctttctttctttctttctttctttctttctttctttctttctttctctctttctttccttctctctctctctttctttctttcacagagtctcactctgtcgcccagtctggagtgtaggtacgatcatgtctcccaggttcaagcaattctcccgcctcggcctcctgagtagctgggattacaggagcacacccccacgccaggcttatttttgtatttttgtagaaacggggtttcgccatgttggctgggcgagtctcgaactcctgacctcaagtgatccatccaccttggactcccaaagtgctgggattacaggcatgagccaccgcatccggccacagttttgctttttttttttttttttccttgagatgtagtctctctctgtcgcccaggttggagtgcagtggcacaatctcagctcactgcaacctccgcctccctttgtcgcccaggctggagtacagtggcgcagtctcagctcactgcaacctctgcctcccgggttcaagtgattctccttcctcagcctccagagtaggtgggattacaggcatgtgccaccacgcccagctaatttttatatttttttagtagagatggggtttcgccatgttggccaggctggtctcgaactcctgtcctcaggtagatccacccacttcagcctctcaaagtgctgggattacaggcgtgagccaccttgctcagccctttgttgttgttgttgttgttgttgttgtatttttagtagagacgaggtttcaccatgttggccaggctgctcttgaactcctgatctcaggtgatccgcccgcctcggcctcccaaagtgctgcgattacaggcactttgagagcaacagcgcccggccatggttttgcattcctaataagctttcaggtgatgcctgtgtgactggtctgtagaccacactttgaggagcaagagtttagaaaaatgagacagacacagtgagggacatcagagaggtgctttgtttaaagtgacatagaaaatatacacatgcttttatatgtaaataatgcttctgaaaagttacgcaaagttacaataggaggaaaactaggagccagaggcaagaaggaaacttacttttcaccgtgtattcctccattgtttgaaattttcctttataattttttaaaatcattacatgtattactttttcatggaaaagcttctcctaagtaaagtactttggaggctgtaaaatgggagaggtgccatccagagagcgaatatcggggaaagctgcgatcggtatttactcagcaccacccatatgtgccaggcttgctagaccaggagctacagagcctcagtgagcctttgggtttgaagaaggggaagaaagttaactggcagaggggacaggggtgagaaaggagggacctgccgctagagggagcgaagagcagggaggcagtttgggacacttggcaggcctggagctgggtttggcagggcccccgggaagatggaggaaagcagtgggagctagggttgcctgtacggtgcaggatttgaatgccagaccgaggagccgcagtactaggaaggtccaagcagcgtgcccaatcgctcctccggactacagaggagcccgggaacccagggaagagctccagtgattggtccccctgcctgtcagtctggtgggaggcccagctctctaccctccccgcccgagagtcacttacaaccggtagagaatggtggtctttccttcattgtccagtcccacgatgatgaccgtgtgctctggaagcgtcggaggaagggcagcgtcagggccaaacccgaagaccaagggactgtgtgcccccaccagacctcccaggaaggagatagcgctccccgcaggctggggacctctgcccaccgtaccgcgtct

SEQ ID NO: 17925 - DNA, 2300 bp, Homo sapien
cctgacaccccatgacctcttctggatgtgctgtcagcggcacccactcgctcagcccccgcccctgcccggcccctcccccagcaccaggcaccctcccctgctgcctgctggcctgcgtcatctcattcagggacagcctggcctgcctccctccagcttgcttcgggctgtcacccactccccctgccggctgtctgcttccatgtcctcccccagaatctgtgacagggttgggtggaggcaggtcctaggaaaagcagagcaaggatgtttgggtccctgtagtcctggtgaggtcctggccagggaaacacgctcctcacctcgagacatgactgtctaagaagcacagagaaagggtgatggtgacgggggtgggggtggttgaggcatgaggctgttgattttataatagagaagatgatagcccagcacccctgcctgaaagggtgtaactgagaatagctttctggggtcttctgtgctcagtcagtaagcggctgctctcatctgtcaaccctgggccatcttaggctcagggtgagggactgagagaggcatgtggttgctatgactacttagcatctcaccaaagcctggtacccaaaaaaggcgagaggggcttgggattagacaaggaaaaggcgtgtattgaagaggaaatgggcagggcatttgagggcagaagacagcacagaggaggggtcctctggagatgagcccctcccttccaccttgggccaggagcgagggtgatgccaggcagatccaccactaattagagtgaggcccttctttccgtttcttctgtctctacagcacttggcacatgtgagcctcagtctgacttgggaggttcaggaaggggaggcttcattctagccttttctaagtataggaacagacaggaagtcctttcttcaatcaccccctcatccctcctgttgcaggacatggccagggctgggaagaatgacgctgtgcttttattgcccctcttggcagaaaaggaccttggctccttcagtgtttgccaacccagggagtcagaccccagcctccaattcttcctccttttagctccccagctctgatccccggtaggtggtggggagtggtggaggggggcagtccttgccacatctctgagctaaatataccctagcagtctgcacatgtagcaactctgcttgtaacccgagcccccaagggaacgggcagtttgggccaccccctaggccagcagggccaggcactgagggtgccgggatggaggcgcccagccggaccgtggtggtggtgagctggggatggagtggggtggcagcgggtagaacagcctctcaggaaagctgacggagggcagcctttactccagcgtgtctccatgcctcctcactgtttcctgtcttctgccatttctgatgtgtgcgtgtgtatgcgcgtacatgtgtctgcatatgtgtgtgtatgtgtgcgcatgcctacatgtgtgtctgtgtgcacctgtgtgtctgcatatgtgtgtgtgtctgcccgcacatgtgcgtctgcatgtgtgtctgtgtgtgtgcatgtaactgtgtgtgtatgtgtacacgtgcgcgtgcctgcatgtgtgttggggtcagtgagtgtgtgcgcgcgtatgcctgcatttgtgttggggttggtgagtgtgtgtgtgcacgcgcatgcccgcgtgtgtgttggggtcggtgagtgcctctctgctagtctgtctccctgtctgtttccctggctctttgactctgcgtgctcccatcaggggggagagggggagctacgctggttttctctccttctctccttcatgcctctttccccacttctgttagtgacccccgctccaccccaacccttcctccgcgggtctcccattttcattatttgtctgggaaagagatgggcagctgcaccagctaatgacctgaggcccctggggagaggtgggactttgtttctgtctttcccaggtcccctccatgccaaacttatggaccttcctggccaagtgacccttttctgccctcaggaaagaacccctacatccctgcagtcctcctcttttgccacataacctcctatgccttgtccaacaccacccctgcatagtcacacaaatccacacctcttgcctcctgccctcacatgtcccccaacctcagggtcacagatgtctgggagctcccccccagtacactcacatgtggctgtacacacacagtcatatgcagccaactatagagcacaccctcctccacacacttgtactt

SEQ ID NO: 17926 - DNA, 2300 bp, Homo sapien
tggctcacaactgtactgcggcaggcatggatccgcgatcgaacacacctcagaaataccgcactggctgaatggatgaatgattgcagaaagtaaaattaaaaaaaaaaaaaattgggttgggctcgatggctcatgcctgtaatcccagcactttgggaggccaaggcaggcggatcacttgaggtcaggagttcgagaccagcctggccaacatggtgaaaccctgtctccactaaaaatacaaaaattagccgggcgtagcggcgcgtgcttgtaattccagctactggggaggctgaggcaggagaatcgcttgaacccaggaggcggaggttgcagtgagccgagattgcgccactgcactccagcctgggcaacagagtgagactccgtctcaaaaaaaaaaaaaaagcagtccttttcttctgatctggaacacccaatgtaaaaatccaagaagaacattctggggtttaagaagtctacatctgaattgaggctccaactcatgattggttcctgctgatcaccctatccgtttcatctcaactttcctggctgagaaagtagaagagagagaaagggaagcaacatttatgctacttcctcacaacaacacgattagcgttgccctcattttacagctaaggtaacagattcagaacacagatatttctgattgcaaagcccatacttttgcggttatgccagcctttcttgtctccaaggggcaggtggaaaccctgctcagggttggaactctcctggaacgtttctaatgggcttcatcttcactcactgctccgccttccccaaggtgttgtgatcagaggaatgacagactgaccattcacttgctattagagttgggtgaggaggaggagtcccatagtctcctgtcctgcggaacacagcaaggtggtggccttattgtaaggtcacttgacctggagagggtcttctccatctctcctttctgtggagcaggagaaggggtggagtaggaagggaatgggtcctcctgtcatgagtgaccccttcattgaaacttacagcttctccaaacaccccagcaattcatttaattctccctcatcctcccaataataccaggtgacacagactccacagtaccagcaaccccattttataggagaggaggaaactgatgctcagagaggtgatttgtccggggctatacaaccagaaacagcctgagccaaattggcgccagagtctattgcccagaatctcctattcctcttctctccaccagtcatggtgggtggcatccagatcttggatgtttctccctaaatcaggggtaaaggtggcgcaattctaggtcaaaggtcatgagatctgattttaccagcttctcctctctcagctccatatttcttcctcttttctcatccaagagcagggacctcacccagccccattcctggccttttggaagaacaggggttgggggggcggtgtatcctagtgactgattagggcagaactcctggacccctgggatttattttgctgtctctattggacaccctccccatctcagcctcagcctcccaccggcagccccagagccatgttggagggagaggcttttctgtttggtttgaggcagcctgggccccacactggggagaaaggagttaaagccaggtcccaggatcaccgggaccgggaagttccggtggtccaaacaggagtgggttggggggacccgcaggaagagaggtttgggacaaaaggggggtggtgccagccatgccaatccccatcagcgctcggcatccactggtagaccgcccccccacccctcccccaagttccacgcctagtttctgccttcccgccccagcgggccgcctgcaccccacggccagtcagaggcccacctgcggccacctagagccgagaggggcttgcctccctgctgccgcacgcccattgtgtgcgccgagccggcggaggggctgcgaggggcggggccgggcgggcggagggagggagcgagggaggggcgcggggagatgctgagcctacgggggaggcggcggcggcagtggagagagcgggaggagcgagggaaggcaggaaggaggcagccgaaggccgagctgggtggctggaccgggtgctggctgcgccgcgctgctttcggctcccacggcctctcccatgcgctgagggagcccggctgggccgggccggcggcgggaggggaggctcctctccatggtccagaagaccagcatgtcccggggcccttacccaccctccca

SEQ ID NO: 17927 - DNA, 2300 bp, Homo sapien
gatggggagggtgtccaatagagacagcaaaataaatcccaggggtccaggagttctgccctaatcagtcactaggatacaccgcccccccaacccctgttcttccaaaaggccaggaatggggctgggtgaggtccctgctcttggatgagaaaagaggaagaaatatggagctgagagaggagaagctggtaaaatcagatctcatgacctttgacctagaattgcgccacctttacccctgatttagggagaaacatccaagatctggatgccacccaccatgactggtggagagaagaggaataggagattctgggcaatagactctggcgccaatttggctcaggctgtttctggttgtatagccccggacaaatcacctctctgagcatcagtttcctcctctcctataaaatggggttgctggtactgtggagtctgtgtcacctggtattattgggaggatgagggagaattaaatgaattgctggggtgtttggagaagctgtaagtttcaatgaaggggtcactcatgacaggaggacccattcccttcctactccaccccttctcctgctccacagaaaggagagatggagaagaccctctccaggtcaagtgaccttacaataaggccaccaccttgctgtgttccgcaggacaggagactatgggactcctcctcctcacccaactctaatagcaagtgaatggtcagtctgtcattcctctgatcacaacaccttggggaaggcggagcagtgagtgaagatgaagcccattagaaacgttccaggagagttccaaccctgagcagggtttccacctgccccttggagacaagaaaggctggcataaccgcaaaagtatgggctttgcaatcagaaatatctgtgttctgaatctgttaccttagctgtaaaatgagggcaacgctaatcgtgttgttgtgaggaagtagcataaatgttgcttccctttctctctcttctactttctcagccaggaaagttgagatgaaacggatagggtgatcagcaggaaccaatcatgagttggagcctcaattcagatgtagacttcttaaaccccagaatgttcttcttggatttttacattgggtgttccagatcagaagaaaaggactgctttttttttttttttgagacggagtctcactctgttgcccaggctggagtgcagtggcgcaatctcggctcactgcaacctccgcctcctgggttcaagcgattctcctgcctcagcctccccagtagctggaattacaagcacgcgccgctacgcccggctaatttttgtatttttagtggagacagggtttcaccatgttggccaggctggtctcgaactcctgacctcaagtgatccgcctgccttggcctcccaaagtgctgggattacaggcatgagccatcgagcccaacccaattttttttttttttaattttactttctgcaatcattcatccattcagccagtgcggtatttctgaggtgtgttcgatcgcggatccatgcctgccgcagtacagttgtgagccaaatgagactgagactagttcccgccctccaagagcttgcaagacccgcagtggcgtaaaaacactaacatcttttagtgatcgattctgcactccaggggttttcaatctactacaagagtgaataagagttcgcctttgtctgatatctgttgtcattctctctcgcttctttaactgattttttctcagctaataaaacatccacccacaaccccccgaacgcccgcaaacaccaggccactctagcaaaacctctctcactccgcctgcgcaatccagctgacttccggttacagataaccacgtgattgggaacccttgctgcgcatgtctagtaggaagtcggactataccactttccctacggaaggggtacttttttatgtttttaagtttaaaaccgatttctgatatttgacttttatcatttcaggcctatatggaggctatgagtgagtttagtgtggcagaagatgaaagaaccggacaggaatacggacgaaattggagcagggtttgggctctccccttcgcagataatgggaggagccgggcccgagcgagctctttcctttcgctgctgcggccgcagccatgaggtgagggcgagctggtctccatcaggcgctgacgcgtgtcgacaagggactgtcggtcttgggaccgcagctggggttgggggagatgaaatggaggccgccctaaagcggccggtcccggggtttggggtag

SEQ ID NO: 17928 - DNA, 2300 bp, Homo sapien
tgaacaggcctttggggagactgatttgatggcactcaggctccatcccaccttcctcaggaaatctcgaagtcagagcccctacaaccatgaaccctcactgtgcccttgtcctacttctgccactggcaaataaatctctattcctggacagggtaacctgagcagggctccaatggtgagctcgtgcttgggagggcagagatcctatgaatggctgtgtgcatggggggaggtgagtggggggtggaggtgttcaccccacccctcaactttcaggctagcataagggcccccttcagcacctcaggccccccatgtggcaccccccacccacaatcttaccacccacagcagaggaggagggagacttaaacccagaagtctctccacccacaccagggaaaggttctctcagccaccagtgcatctcccttttcttgggcagaccaagagaggaagccagatctgctggtcagagccagaaggggcagaaggaaagagggctggaggtgagggagggggacctgagaaaatgggtcccagataatcaacatgcattagaagaggtatcttggtcaggtgtggtggttcacacctgtaatcccagcactttgggaggctgaggcaggagggtcacttgagcctaggagtttaagactagcctgggcaacatagcgagactccatctctacaaaaaattttaaaattagctgggtgcagtggcatgtgcctgtggtcccagctacttgggagggttgagcccaggaggtccaggctacagtgaggtgtgatcaagccactgcactacagcctggccaatagagcaagatcctgtctccaaaaaaaaaaaaaaaaaaaaaaaaaaaaaaagaagaagaagagaaggagaagaagaaatattggaaatatcttgaacgggcacagtggctcacgcctgtaatcccaatacgttgggaggccaaagtgagaagatcgcttgagcccaggagttggagatcatcctgtgtaacatagcaagacttgtctctaccaataaattttaaaaattagccaggcatggtggcgtatgcctgtggtcccagcaactagagaggctgaggtgggaggattgcttgagcctaggagtttgagactgcagtgagttatgatcgcaccactgcactccagcctgggtgaaagagtgaaaccctgtctctaaataaaaaaataaaaaaataaaaaatagaaggttattgtggagagaggggcaccttggaaggtgatggtgaggacctcttcccccacctctctgtattatcccctgatctaactccagttgtggtaggatctttaggaggggagcgtgtctcagagaagtttggggactttgggtgtgaggactgagcccccatctctgctgaagttcagacgccaagactggaaggggatagagtcatccggctttccatcacaaggaggaattgtccggcctggcctttgacacatacaccatagtccagttgtgtgtatatttggagagagccttttcagggtataaaggcatccaattaatggcacagatgggtccccattcttccttcaccaacctctggcatctatcaatcttcgctctttggaagtcctagcttcgatctcactctccgctatcttgctgcggccccaacctatttctattccctgcaacccatccagacgctactatgatctccccaagcttccctcaatctggtcacgcccctccatcccgggtttttcagtgtgaaactccctcctccgcttctttccccgccaagccccgccccatcgtgtcgagccccccaagactccgcccagttcgccctcctggccaccgaggcagccaatagctgagagcctgatttgcagggctgcgcgggggagcggcgtagggcagggggcgggaccaggcgacctcctaaatcaaagttgggcggcgaggactgggcggaggggccgccgggtgccgggctggggccggcgggggaggggaggggatggggggcgggcgcagcggacggcggagccggctggacacggacagctccttggctccctccctcggctcatccccgcggccccacttccctcctccccgcgctgcgagcagcatcctctgcagaccctcggtcctcgcgcccggggtcgtcccgctcctgcggctcagcgtggtggcctcccctcgcccgccaccccggcaactttctctgcccgctcccgcgggttgggggctgccgtgccgggggctaactgggggcagcctctggagaacggcttcagag

SEQ ID NO: 17929 - DNA, 2300 bp, Homo sapien
agcagtaaaaggataatggggaaaaatggagtcacagcctttcctcgcctatatttcttttttttttttttttttttgacatggagtctcgctctgtcacccaggttggagtgccatggcacaatctcagttcactgcaacctctgcctcctgggttcaagtgattcttctgtttcagcctcccaagaggccaggattacaggtgcccaccaccacgcccagctaatgtttgtatttttcatagagatggggttttgccatgttggccaggctagtctcgaacttctgacctcaagtggtccacctgccttggcctcccaaagtgctgggattacaggtgtaagccaccgcacctggccagtttctatcataaattttaaatgtaagattggaagatacagagagctgtataaaatcataccagtagggtataattagcccaggtagtttaggaataaaattgggttgtatccgagtgccctaacttgacattttgattctccagcaaagaacataggttactaggttactaaccttgccttctcacttgggataaactttttttttttttcttgttgcccaggctggagtgcaatagtgagatctcggctcaccgcaacctccgcctcttgggttcaagcgattctcctcccttagcctcccgagtagctggaattacagcctgtgccaccacgcccggcaaaatttgtatttttagtagagacggggtttcaccatgttggtcaggctggtttcaaactcccaacctcaggtgatctgcccacctcagcctcccaacatgctaggattacaggcgtgagccactgcgcccagcccaggataaacattctacctgcctgaaagtaccataagaggcaagtgagtttcttgcatgatgggcttctgcagcttccccctcaagtcacatctacctgttgtatttatttatttatttatttttgagacagagtctcgctctgtttcccaggctggagtgcagtggcgtgatctcggctcactgcaagctccacctcccaggttcacgccattctcctgcctcagcctcccaagtagctgggactacaggctcccgccaccacgcccggctaattttttgtatttttagtagagacggggtttcaccctgttagccaggatggtctcgatctcctgacctcatgatccacccgcctcggcctcccaaagtgctgggattacaggcgtgagccaccgcgcccggcccgttgtatctattttttttagacgcatcaattcagtgtctctgaagcctttgatcgttaggaaggtcagtacataacctcttaggtgaagctgagttgatctttggagcccaagagagttaattttcaggagaaaaagaattagggcaagctcccctgtgggatgttaagagaaagtccatatgcgcttcttccatctctgcctcttgtttttaaataagtgcttgtgaagttcagtttatagaggttgagtctcagtgcttcctcagccagggtggtttattgctgttttacaaagaaccatgaacaagcaaaatcctatcaatagtcctttctgttttatgttttatagtcttattttgaagaatcggcatggtaaaatgatagacaagtttcaaataaagcagataattagctctagaattggggtactttgcctcaggtacagcatctgtcttgaatacatagtgatggctgtgtcacacatgggtacatttactttcctctctgatcaactgcacccctttttactggcaaagagggctcctactttctacacacttaaccagtcaaacagataggttttggcaccaccgaaagaaccacaagtgcaccccagctgcatctgggcatggttttggtactaggactagagaagtgagcagtaaatgacagtccttaccctaggaagagatgggagaagagaggtgtccagacatatttaccttttctcttctgtcatgccccaagaaccaaggatcatctttgaagtgacgtcttttttgttaaattggaagaagaaaactttgcagccaggcgtggtggctcacgcctgtaatcccagcactttgggaggccgaggcgggcggatcacaaagtgtcaggagtttgagaacagcctggccaacatggtgaaaccccatctctactgaaaatacaaaatcccagctacttgggaggctgaggcaagagaatcacttgaacctgggaggcggatgttgcagtgagccgagatcacgccactgcactccagcctgggcaacggagtgagactccatc

SEQ ID NO: 17930 - DNA, 2300 bp, Homo sapien
gctgggagaaaacagctcttagatgagacagaatgaaaaggcttttttattccactggctgaagtcaagcaaaaacattaaaagtacctgggacaggaggagaagacagacctgggtttgtgggcctgagaatgagtttctgaagctaggtccctggttttaggaagccccctctaggattaaaaaaagccggggggtggcgcgctggtcgtggtggctcacatgaggcctgtaatctcagcactgggaggaggctggaggatcacttgggcccaggaattgcagactagtctgggcaacatagggagaccccgtctctacaaaagaaaaaagatcccagcactctgggaggccgaggcgggcggatcacttgtagtcaggtgttcctgaccagcctggccaacatggcgaaacctcgtctctacttagccaggtgcggcgcggcgcgcctgtaatcccagctacttgggaggcttgaacccgggaggcagaggttgcagtaaaccgagatcgtgccactgcactccagcctaagcgacagagttgaacctctgtctcaaaaaaaaaaaaaaaaaaaaaaagaaaaagtttgtacagtgctttaagagttgggtaatatgtcctccagctaaaatatacctgttcttaaagatctgccgcacttgttgctcttgttaatttcttagacgcataacaagtcagtcgctaaaaccactaattaaaaggggtgtgaggaagaccaactcataactgctttggaagcatacaattagcagtgctgctgctcctgccaggtgtgctggaatttattatacagtttctaatagttcactcttaggacataattttgtagtttgttgctcatagaaggggcaacaaaactacaaaatcctgtgttattccttcgtggaaattcggtcataaattctgagaccttgaaggccagagttgttaaaacataatataatatgatgacacagatcagcttctatacaaggagcccgggagtctgatgaagtgtttccatcgggaaaacgcccccgcctactcgctcacacacgcttgtttctcccgccaaagtgacgtcaggccgaagctctcaccaaacagcgccctgattggcggacaggcaggcgctgcagcccattgggcgccggcggcggccgagcaaggaaaaccaaaggctcttcggtctcgcccgccccacccccacggacgcgcgccccgaccccggccaaaggaagggttgcccggctccagccctgcacccccgacccccggcctcaggtgcagctccgcagccatccccggaccagggcgggcacttggcctgttgctcagcgcaaccaccctcgccctcccgagccatgcacagggagacaagcgtccggccccggccccccaggcctccctgcagcaccccgtaatgtaatgcactggggcgggggaggcgggggaggcggcggcggcggcaaccgcggaggcgcggcggcagccgcactgccccaatctagacacatccagaagaggaggaaaatggctccgagcagggaccgcctgctgcactttgggttcaaggcgacagtgagtgacaggggaagggagctgggtggccgggaaggatgcgggtgccttacaggatcctggggaacaagtgacgaggggcgacgggcgcgggcagaggctgaggttctgtgcaggcaggtgcgtgcctgtttgcccgcggagggaggagagggggacacggggcagaagaggggcccccgcgcagagtgcggtactgctctactctccctcgctggtccgcgagcacgcgcgcactcgcatccgccccacagacccccttttccacacgcacaggcacttccctgcctcgccttctcccgatgggctcgtctgcctcggaggcgcagggggtcgtgccgccgccgcgcaccggctgctcccgggagcgccgtcagggccggccccgtgtgggggaggggtggtctcgcgccgccgccgccgcgctcctcccctcccgcccctccccctcccgggcgctccgaggcccgggcggctctgtccaatgagcagcggcgttgctggcaggtggggagtgtttttgttttgggttgaagttgaggctgaggagagagccgagctagcgacgagcagtcgttgcggccgccggcgccgcgggaggtggtggaggcctagccggagccgagaggtctcttgttcccgtcccacggtcccggcgtcacccctccggcgcccagtccccgtcccggaactcccgggcctgtcctgggcccccg

SEQ ID NO: 17931 - DNA, 2300 bp, Homo sapien
cagccttggcgacagagcgagacactgtctcaaaaaaaaaaaaaaaaaaaaaaaaaaaaaaagagtcctttggcgcctccttcaaagcttagtcacttacaatttgcccattgtacccattttcctatgtatactgttcctatatgtaccttgaatacttttcttgtttaatgacatggctttctttttttttttcagactccgtcttgctcttattgcccagactggagtgcgatgacacgatcttggctcactgcaacctccacttcccggattgaagcgattctcctgcctcagcctccccagtagctgggattacaggcatgtgtcaccacacccggctaattttttgtatttttagtagaaatggggtttcaccattttggccaggctggtctcgacctcctgatctcaagtacctgcctcagcctcccaaaggacattgctctcttatcttctagagtagaacttttccaatggtgtctctcatctgcattttcagatgacaaatgataacttctcattccattctgtaaccagaagttagtaaagtttatttataagctttataaagttaaaaatttcctagcaacacttagtacagacttttttttttatttgtatagagtttccatgataaagtgtagttgggtatctggcattggtacttagggcataataattaatgaaaaaattttgagcccctatgattatagtgaccaatcatattttcggaactctaaataagattagcctatcaagcgctagggttgtgttttcatgtttgtttatttgtctgagacagagtcttgctctgccacccaggctggagtgcagtagcatgatctcggctcactgcaacctctgcctcccaggttcaagcgcttctcctgcttcagcctcctgagtagctccgcgaccagccgtgttttcatgtttgtattagcagctccaaatatacacatattaggactccacagatgcttactaagtgaagaacacttagtttgaggatagtaaaggatacagttttttctttttgagacagtctcactctgtcacccaggttggagtgcagtgacgcgatctctgctcactgcaactttcgcttcacgggttccagagattctcctgcttcagcctcccgagtagctgggattacaggagcgcaccaccacacctggctaatttttgtatttttcgtagagacggagttttaccatgttagccaggctggtctcaaactcctgacctgatgatccacctaccttggcctcccaaagtgctgggattacaggcatgagccactgcgcctagccagaaatagttttgaaactaaaaaaatgagaaaaggggaattaactgtgctataggctcgctttgaacgtcatgttacaatgcgccactatctttcttaggatgtaattattgcatctagtatctcaggttaaacttatctttcataagacactcctgataccaatagcctttgaaaatctagtcatggccgggtgtggtggctcatgcctgtaatcccagcactttgggaggccgaggcgggcggacagcgaggtcaggagttcgagaccagcctggccaacacggcgaaaccccgtctctactaaaaatagctgggcgtggtggcgggtgcctgtaatcccagctactcgggaggctgaggcaggagaatcgcttgaacccgggaggcggaggttgcagtgagccgacatcgtgccattgcactccagcctgggcgacaagagcaagactccatctcaaaaaaaaaaaaaaaaaaattaaaaaaaaaagaaaagctagtctttcagtacagggatctggagattttaatttgcgagctgtttaactgctaaaataaaaaaaaaatggcggtttccgcaggggagccgaaagctaccggccggcaggtttaatatccagcggcgcgaggcctgagacagctcagatcaaagggaagactgcgctgaaagaaatctcgcgaggccgacgcattgaccaatattcgcgagatttcgatgccctgtcctcttcctctctctggcaggaccacggtttatctcgcgaattttgggaagttccgttggggaagatggcggcggcctcgagcacccttctcttcttgccgccggggacttcagattgatccttcccgggaagagtagggactgctggtgccctgcgtcccgggatcccgagccaacttgtttcctccgttagtggtggggaagggcttatccttttgtggcggatctagcttctcctcgccttcaggatgaaagctc

SEQ ID NO: 17932 - DNA, 2300 bp, Homo sapien
tgagatgggaggatcacctgagcccatgaggggaaggctacagtgagttatgattgtgccactgcactccagcctgggcgacagagcgagacccttcacacacacacacaaaattaggttaaaaaaaaaaaatgttttggatcgccctgtgagcaaaaggaacaagaacatttacagagagtgatttttgagaattgagactaccttaattcagaatgttttctggtcctgaatttaccagctgaacttctccgttttggacaagccccttcatttctccatgccttagttttctcacttatacaacctatttcagaggactgttgtgaagatggaatgacttaaggtaggcgaaagttttttaaaaagtaataaatgaggggccagtgtaagatagtgttattttcttgttaattaatactatgcttttcttgttcatattataatcttttgtatgaggatgaaaggctaaattatccaataacggccatgggaggatctcaagatgggatgagcttttaggttctgagatttgaagcaaagattggtaaggagacaacaccataggatggaagagcttgtgttttagtctcagaaagacatgaatttgaatgttgactgtggcacttgttggaccaaattattcaacttccctgaggctgggattccttttctataaaacagggatgaaaatctcgtgttttgcaggataattgtgaaaattagagataatgtatgtaaaattcttggcaggtagcacacaccctatatgtgggaagcactgttaaaacactcagggacttgggttgaaatgtcccgacatttgtcttttgctctgtaaaaaataatctcaaccgggcgcggtggctcaagcctgtaatcccgccactttgggaggaccagacgggcagattgcttcattctaggagttcaagaccaaggatcgcggattgcttgagtctaggagttcgagactagcctgggcaacatggcgaaaccccatcactacgaataatagaaacaaattagcacggcgtggtggcgcgactctatagttccaagtactcggcaggatgaggtgggaggattgcttgagcccaggaggtggaggctgcagtgagccgagatcgtgccactgcactccagtctgggcaaaagagagagaacttgtctcaaacaaacaaaaaaatggcccggcgcggcggttcacgcctgtaatcctagcactttgggaggccgaggcgggaggatcacttgaggtcaggaggtcgagaccagcctggccaacatggtgaaaccctgtctctactaaaaacaaaaaagttagccgggcgtggtggcgggcgcctgtaatcccagctactcgggaggctgaggcaggagaatcgcttgaacccaggaggtggaggttgcagtgagccgagatcgcgccactaacactccaggatgggctacagagcgagactccgtctcaaaggaaaacaaaaaacaaacaaaaaaaagtcatcctggtagttaaaagatttgttaaaaaggatgttgaaattattttgtcacggagcctgggagtgtttgtttaatcagttaccgataaagttttggttaaaaaaaaaaaactcggtttgttccgtttcaataaagctttgctcaaacggggagctccgggagctcatcgcgagactcaggtgaaacgcgtttctagtttgggacctgatctcgcgttgtttgataagcaggggaatgaggtgaaagcgaagcacgaaacatcgcgagaggctactggactctcgcgacgatttctgggattgcccctccccccttccccaagtgccgtttcggtttaatctagtgtgtgactgggtctgtgtgagggagagagtgtgtgtggtgtggaggtgaaacggaggcaagaaagggggctacctcaggagcgagggacaaagggggcgtgaggcacctaggccgcggcaccccggcgacaggaagccgtcctgaaccgggctaccgggtaggggaagggcccgcgtagtcctcgcagggccccagagctggagtcggctccacagccccgggccgtcggcttctcacttcctggacctccccggcgcccgggcctgaggactggctcggcggagggagaagaggaaacagacttgagcagctccccgttgtctcgcaactccactgccgaggaactctcatttcttccctcgctccttcaccccccacctcatgtagaagggtgctgaggcgtcgggagggaggaggagcctgggctaccgtccctgccctccccaccc

SEQ ID NO: 17933 - DNA, 2300 bp, Homo sapien
gcgcgctggggtaccgacgcccccccacaaccctcctccacccccgagtctcgtgcgggctcctgcctaggctaccctggatgcccacctccgccgcctgccccgcccagagccggcccagccctacccggctgccggcctgggatctcggcccaggccctctccccggcgctgggccccggctccgcccctcgcttgaatggggggctgctccccgcgcctgcttcttctcagggtcagggcagggaccgggtgggggttttagggaccagatatctttgccaggggaggcggcgcgctcgccctgaaagcccgttctctcctggcggtggagagaggctggtcggccgccggtggggacagctgccccgctccgcgctctcgcggcccgggccccccggcccagctccctcacccctcccgtggctctcacccccacgctccctaatccaatttgcaacttggctgcgcgccgccccttgctcggcccccacccccgcacccccaattccagaggcgggaggatcgtctcctctagccgatgcgtccccagctcccggagccggctctgggcggcgaggactgaagcagcggggcgtggggaggagactgagagaagcgagcccagtccgtcccctctgcggtcagggacccccttcccccttcaagctgactccctcccacaaggctcttcagatctcgttgtattttgggattgatgggggaaaaatccaaatttgtttgtttgcttcccttttttcggtggtggggaaaggtggcaggctttttgggacaaccatggaggggtcctccgtctcggcctcttcgcatatccccctccgtgatcctgccttccccccccaccgagcccatcgcaggcagagacacctcctctgcagccccctgggctgcagcccctaagggagagagaacctggggcccctccgatgcccacccaatgaggggggcatcatcccaggaaggaggtatttgaggaccctcctgtcggccgaagctgccgcccctcctcccaaccggcgggtcagatctcgctccctttcggacaacttacctcggagaggagtcaaggggagaggggaggggagggggggagggggcaagagagagaggggggagaagagggatcttctcgcttatttcattgttcccccatcttcagggagcgggggcagcggctcctcaaggcggcgggcgccggcgtcttcagagcgccatgcgaaccgcggagcgagtgtggcatctctaccaggcggggtaccagcctctatgccaggccatatgggcttggcacgtcacgggcagcagctatcacatgagagacggtgattggcatgcgtctgcactgggggagagccggctcccccgggacccgccgccatctgtcactctctactccaaaaaaaaaaaaaaaaattaaataaataaaggaaataaataaatatttctgccgccctcccctccccgcccaacgcagggaaagcagggattgagaggaaggtgggaggagttgccccctgtatatagagaccccctcacgggaacaatggggtggcaaggctggacactgggggctcgtggtggccaattctatgctccctcagggtcccgctctgtccatttcctcccctgcaggcccccaaggtgggtcagggaccagaccccgggttggggagaaaggacctctgtgcttgcccccactccccaggagggtccccttggccacaaagggacagctgagaccccctcccaggatggctgtaaggggcgtccctggcccgagccccataggtagatgttggcaccatgccatccctcatccctgtctgcccctcccccacccaccctcacgcacacacaacatatgtggctaaacgaaattcaaaccaagggaaagacagagaaagggaaagatgtgcctggatgtctgtgcctctgcatgggcgtgtgtgtgtctgtggggacatgtgtgtatctgtggagtcagccgatgggagatctttccttggttgttgggggcgtatccatgttagggtggagtggggaggggccgcgagatgagcctgtgcaccacccatctgggggtggaggggagggtctaagtctggattcctaacctagaaacctctcactctcctcctcccactgccagacaggtgaccagtccaccagcggctttctctcctggtcttcagacttggttatttgagggaggaggagcaggcagtgctgagaactgcctaagttcctggatgagactcaagcattctcctccccttctg

SEQ ID NO: 17934 - DNA, 2300 bp, Homo sapien
gtgcccaaacttggtggaggctggccagcactcctgagtctctgccctacctgaagcccatcctttggcctctttctctgccatgcccagaatctccccaccacgactatctgccagagatgggattcgccttgcagacccaggattcgtgaatgaagggaagcatggtaggcttatttttagagaccactgaggcagattgtgggcttataagtggagtactggtctgtgggtcaagtgcctgaattctaggcccagttctgtgtttcccctgtgtgttcctaggcaggtcagtttccctccatgggcctctgtaagatgaggagttggagaggtacattctcaggctactttcaactcccagccaagtgactcaagagtcccaggcagcaccagcacccctatctccaaggcctcctgatgtgtgtctctatttagaacttaatccaacctacccaacatcagatcagtgtcttaccagcccaaggtccctggggagcctcctagagggagagagccctgcccacccagattgagggtaaaggcctccccgtgctcatttttgtaccaccacagtgcttggcacatggtagacatcaaaatgtgtgtgctgaaagtataattgaagttgtgtatatatgtcagctagagtgtctggaggggcagaaatgtgggtctaaaacatacaaatgctccaaatggggtgtgggcaagggtctgtctacaccaggctgtgattacctgctcacatacatgtgtctatctgagtaggggtatgttatctatttttctacaccacagggtgaggaacaggtatatgtgtgcatgtgtatgcatccgtgtgtgtgtgtatgtgtgtgtgcatgagtgtgtgtgtgtgtgtccaaagccacctcttcaacctgtgccatttgtatctgtgtctggcccaatgagagtgttgaaaggtgagccacaagataaaacagcaacttcctacctcccttatcaagacagctgtctgacctacctccccttggccactcttgggattactggggttggcttcagtattttcagatttttcagaaggggaggagaatgcttgagtctcatccaggaacttaggcagttctcagcactgcctgctcctcctccctcaaataaccaagtctgaagaccaggagagaaagccgctggtggactggtcacctgtctggcagtgggaggaggagagtgagaggtttctaggttaggaatccagacttagaccctcccctccacccccagatgggtggtgcacaggctcatctcgcggcccctccccactccaccctaacatggatacgcccccaacaaccaaggaaagatctcccatcggctgactccacagatacacacatgtccccacagacacacacacgcccatgcagaggcacagacatccaggcacatctttccctttctctgtctttcccttggtttgaatttcgtttagccacatatgttgtgtgtgcgtgagggtgggtgggggaggggcagacagggatgagggatggcatggtgccaacatctacctatggggctcgggccagggacgccccttacagccatcctgggagggggtctcagctgtccctttgtggccaaggggaccctcctggggagtgggggcaagcacagaggtcctttctccccaacccggggtctggtccctgacccaccttgggggcctgcaggggaggaaatggacagagcgggaccctgagggagcatagaattggccaccacgagcccccagtgtccagccttgccaccccattgttcccgtgagggggtctctatatacagggggcaactcctcccaccttcctctcaatccctgctttccctgcgttgggcggggaggggagggcggcagaaatatttatttatttcctttatttatttaatttttttttttttttttggagtagagagtgacagatggcggcgggtcccgggggagccggctctcccccagtgcagacgcatgccaatcaccgtctctcatgtgatagctgctgcccgtgacgtgccaagcccatatggcctggcatagaggctggtaccccgcctggtagagatgccacactcgctccgcggttcgcatggcgctctgaagacgccggcgcccgccgccttgaggagccgctgcccccgctccctgaagatgggggaacaatgaaataagcgagaagatccctcttctcccccctctctctcttgccccctccccccctcccctcccctctccccttgactcctctccgaggtaagtt

SEQ ID NO: 17935 - DNA, 2300 bp, Homo sapien
tcccttgggatggggctatgtctccatgggaacctcaggccccccagctcctagctccttccaagaggagtgggcagcagcaatgggggccttccaggcctggctgaggtgcccatcactcccttttttctctcagagacctggaggggaccaggcccctcaccaactcccttcccccaatgccagggggaggaacagatggcatctctgggtgtccttctccttccgtctccttccttccatttctggctctttctgtctctccgtcactgcatctctgcatctctggtgcacagagaggcgcgcgtatgtccctgcgtgttcatgcttgcttgtgtgtatgtgaacacacgtgttgtgcctctttcaagcccatgtctgaagcaggcccatcccacacctccctctgttccaattttcccctggtttttattgtatcttctaaaaaaaagttgaaatgtgtcgagtgagaaaaacttgttccatttttctgaaggaagaaaagacaggggcaggagacagagcgaaagggatgaagtccccaggtgcacacccccaacctcagacctccttctctgggtgactgaggggagcttctcagacccagagagttgaggtcattcctgacaggtggccggaagggtggcaggaaccccccaaccaagggctcccctatcttgaacaagtttttgcctcctgcctgtgagacccctgaagcgtttaacccagccctcagggtccaagggagaaggcagggagagaaaactttctcccctaaggaagcatttattcacttattcatccattcactcgcccatcaattcaacaaaaattcaatttctatatagaccaagcattctgaatgtgtgtggggaggggtatgagcaaaaaaaattaatattgtaaagcattttacagttcccaaggtgttttaattaagagttggcatttattggaggctcattcatggaatggattatcccatttagtattaacaacaaccctatgaaggtgtagcataatttatcccatcttacagatgaggaaatcaagaccaagagatgttatataacttgctcaaagcattcagcactttttttttttttttgagacaaggtctggctctatcacccaggctggagtgcagtggcgtgatcacagctctctgcaacctctgcctcccggtctcaagcgatcctctcacctcagcctcccgagtagctggaactacaggcatgcgccgccatgcctggctaatttttgttttttaggcagaggcagggtttcacaatgctgcccaggctggtctcgaacttgtgagctgaagggatctgctggcctcagcctcccaaactgctggtattacaggtgtgagctaccatgctgggcctctcatttttttttttttttgagacggagtctcactctgtcgcccaggctggagtgcagtggtgcgatctcggctcactgcaagctccgcctcccgtgttcacgccattctcctgcctcagcctcccgagtagctgggactacaggcgcccgccaccatgccctgctaattttttgtatttttagtagagatgggttttcaccgtgttagccaagatgatctcaatctcctgacctcgtgatccacccgcctcggcctcccaaagtgctgggattacaggcgtgagccaccatgcctggctgggaccaacatttttttaagttggtaatggggttggccaggaatcagaagcccagagcatgggcatgtaattgaaatatcacagagccaggagactccaggaaaaaggctactagtcaggattgaggaccctgcttcagtaaaaggattgcaaagccttggaggctgtgcccaaacttggtggaggctggccagcactcctgagtctctgccctacctgaagcccatcctttggcctctttctctgccatgcccagaatctccccaccacgactatctgccagagatgggattcgccttgcagacccaggattcgtgaatgaagggaagcatggtaggcttatttttagagaccactgaggcagattgtgggcttataagtggagtactggtctgtgggtcaagtgcctgaattctaggcccagttctgtgtttcccctgtgtgttcctaggcaggtcagtttccctccatgggcctctgtaagatgaggagttggagaggtacattctcaggctactttcaactcccagccaagtgactcaagagtcccaggcagcaccagcacccctatctccaaggcctcctgatgtgtgtctctatttagaactt

SEQ ID NO: 17936 - DNA, 2300 bp, Homo sapien
gtcagccagtcttccccacccttcttggccccaggatttagatgccagcctggccacaggctgggggagatgggcaaaaaccctccctccgctcccaaagacctcatcttccaggcctagctgagagggaggcttctctgccctcatctcccttctcagctgccccagcctgggatccggggaatgtttcctgatctggggtctcccagagctccaataagttcagcagagcctccgtaaataagccctcctgctcaaatggggctcagctgccatgttccctgaggccttttcagctcctatgggctctgaggtgcaactggtgctgatgcctccctgtctccaccctctcatcaccctcccagctatcctctgtccccttcatccccacgatccttccccacactgccagcactggaagccacaagccccttccccacctctgcccacccagtggctgtccgggccactgcctgggccatgcccttcccataccccttcttcctttcaggacctccttatttaccctccgaaggcactgccaaacaggtctttgccactccccaccacaccccatcttcgacagaggttctgggccaagcctaggggctgccagagatgcctacacccctgggccaacaacttatcatccagctgtttcccaacaagtatataagtcaacaaacatacagggacttgagccaggcctggggtgggctgatgtggagctggatggccaggacatcccactcctatgagcaacactctggacctcctgccaccctttccctcacccccagagtgggccctgaccccaattccagaagattcctctggcctttcactccacccaggacccagatgctggggctgggagtggaaaagctgcaggaggattgggggtttcaggcctgagagtgaccaggagagaggacgccaacacaaacagagccccaggaaaacatgcatgtacacgtctacacacaccctctcagtgctagacagaagcattcagaccctctgcacagctccaaggagggaaacagcagctcctgcaaaggcacccaaggcccggacaaatagaccaaatagacagggacattccacccacagggccagctcctcccgctcccgctccagagacacacacaaatacctctggagagagagaggctcacacctgtctcccccaaccctgcttctgaatgcaccaaattcatgcacgtgatggcacgtgtacaggcagcccccaaacccaccccaactctgggccggccctgtcctccccaccccattagatccggagaggaaagacaggagccacgtgaatctacagtacatcatggcagggcacattccccttctccctcacaggagcgctcacacatccacaacctcataccccagcaactgcacagcggagctgtggatacagtcccccaccccctgcaagctggcacacgcctgcccatcaccttgacagcctctgacatcctcccccacacccacaccctcccccgcacacacgcagtcctcccacaccctgccactcacacctgcatctttgacactctgacacacttacacagacacactcacaccacaccggaccccccaaaacacactccctggctatgggcaccacagggccccggcacacccctgcacactctccctgccacgatgactgacacgtgtcctcccacacacaactcggtcacactcgctccctttccaggacacccccattcacagcgtgacaggctggtactctccccacgacctcgcaggcctctctgaaactcccagtaccaggaccacgaaggggttaaagccagagtcctgcctccccgctgcccctctccccctccctccccctttatcctctctgctggactccatcaataatgcagcttcaagttctggggagaccgcagggggccccccagctggctccccaggccttggctctaactcccaccctcctcccagccccaggagaacacgattctccatgctcattggccagtttcccctaaaccctccctccgagcacccgggcgccagtcccaggcggaggggacgggctggggaccccaaagctgggaccggagggtgagcccggcagaggcagagacacacgcggagaggaggagaggctgagggagggaggtggagaaggacgggagaggcagagagaggagacacgcagagacactcaggaggggagagacaccgagacgcagagacactcaggaggggagagacaccgagacgcagagacacccaggccggggagc

SEQ ID NO: 17937 - DNA, 2300 bp, Homo sapien
ctgacacacttacacagacacactcacaccacaccggaccccccaaaacacactccctggctatgggcaccacagggccccggcacacccctgcacactctccctgccacgatgactgacacgtgtcctcccacacacaactcggtcacactcgctccctttccaggacacccccattcacagcgtgacaggctggtactctccccacgacctcgcaggcctctctgaaactcccagtaccaggaccacgaaggggttaaagccagagtcctgcctccccgctgcccctctccccctccctccccctttatcctctctgctggactccatcaataatgcagcttcaagttctggggagaccgcagggggccccccagctggctccccaggccttggctctaactcccaccctcctcccagccccaggagaacacgattctccatgctcattggccagtttcccctaaaccctccctccgagcacccgggcgccagtcccaggcggaggggacgggctggggaccccaaagctgggaccggagggtgagcccggcagaggcagagacacacgcggagaggaggagaggctgagggagggaggtggagaaggacgggagaggcagagagaggagacacgcagagacactcaggaggggagagacaccgagacgcagagacactcaggaggggagagacaccgagacgcagagacacccaggccggggagcgcgagggagcgaggcacagacctggctcagcgagcgcggggggcgagccccgagtcccgagagcctgggggcgcgcccagcccgggcgccgaccctcctcccgctcccgcgccctcccctcggcgggcacggtatttttatccgtgcgcgaacagccctcctcctcctctcgccgcacagcccgccgcctgcgcgggggagcccagcacagaccgccgccgggaccccgagtcgcgcaccccagccccaccgcccaccccgcgcgccatggaccccaaggaccgcaagaagatccagttctcggtgcccgcgccccctagccagctcgacccccgccaggtggagatggtaaggggcccgtgccccaccccggcagcgtacccgacacaccccgcggggcttcttcgccctcccaaggcgctgccccggccggactggcctgggggtgggggcgcaaggagagccgggctctgcctcggtcaggacggggcgcggggccgcgtgtgaagttagctggagactcgtgcaacttttccccgcggctttggtcctgatcccggggcaagagagttcctggcagtgaggctgggggtgcgggggtggggggacaggccgattccagaccgcccaggagtggggtgggggcgtcctttggtcccagcacagtccccaaagggtagtcagtctcctaggctaccaccgggaccgctccgcctggctctgtcccagagctggtcagatgtgagcagcggtggacactgaccttgtcacccagggcaggagtatgaggctgccaccgggtgaatccactaccctgcccctctctaatcccgcgtgtgtgcctgggctggggtctccagaacctggctctggcctcctgctgtcaggccccagagccccaaccccaaggagggagaggtggggagtcatcacaaagccagacctcttcccacagactactgagtcctcctgagggccttcttgggggttgaggggcttccaaaggctggcgggtgctgtgacagagagctccacttcccatccctagtggagcaggggtcacttgttgctgagctgagatgcagctggctccccactgagcagtgatgagggggccaagtcattatggggggagatagagggcagggggtacagtcctgggcctaagcagctttgggtcatgagggtgtcatggggagcttggctggggaggtggcagtttcagcttaactcacctggttctctttgtgcatttccctggagctcaacagggacctaattaactgacagttggtctgattgccaagctgaggggcggggcggggaggggggcggtcagttgctgcttggctcacgtagcaaggagggcaacttttcatttctcacaaggactgggtgaagagttctgcagccttacagagactggaaaagaagcccaaaccaaggcccccagagaggtcccccaggcccctttgggtccctgagcctcagctggaggtggggggtgcctgcagtgcgctggctcagtctccttctgaaaagctggatccagcttgtttgaagcccttgagc

SEQ ID NO: 17938 - DNA, 2300 bp, Homo sapien
tcgctgaaaggtactatacccccaccgaccttcctggctgtccgcctgatccctggaactgggcagacgctaggggagcttttgtcagtggggagggattgtttcgccacacatagcccgctgtcagcgtggcgcaacaacccaacgtaaagaccaattttttctcagtctggccttgcaaaacacaggagtcccgaggctgcaatgggcagctatgggccttaacatcgggttgtgggcttgaaagaaaagagatggctggcctaagacaaccagcaggcatccgcgtggaagggactccacctgcagctcctcttcaccagcctgtggtggaccacctcccacccctgctcatccagggcgccttctcctgtgggcttcacccctggcctcccctcccatttgcatcccatttgcacagatctgcacactggtctcctctttcctgcttccctttctccatggaaaagcaagccattccttttgcacacttactcaacacctagtatatgccaggccaagttggtgggcattgggcagaataagatgagtcagatttggtccctgcccccttggggctctttgcctcaaagggtcagggaggggccaagtaaggtggctcacacctgaaatcccagcactttgggaggccaaggcgggaggactgcttgagcctaggagttcgagaccagcttgggcaatacagtgagacccccatctctatgaaaaatttacaaagtgagctaagcgggccgggcgcagtgactcacgcctgtaatcccagcactttgggaggccgaggcgggcagatcacctgaggtcaggagtttgagaccagcctgaccaacatggagaaatcctgtctctattaaaaatacaaaattagccaggcgtggtagcgcatgcctgtcatctcagctactcaggaggctgaggcaggagaatcacttgaacccgggaggcagaggttgtggtgagctgagatcgcaccattgcactccagtctgggcaaaaagagcaaaactctgtctcaagaaaaaaaaaaaagtgagctaagcatagaggtgcacacctatagtcccagatacttgggaggctaaggcacaaggattgcttgagcccagaagtttgaggctgcagtgagctatgatcgcaccactgtgctccagtctgggctacagagtgagagcctgtctcgggaaaaaataaaaaaagaaaagggtcaaggaaggtacacaaagatgtttaagcttggatttgaaggatcataggaatttaacaggcaggcaagggcatcccaggtccaagaagagggaagaaggtgtgcaaagagaaagagatgcgagtcagagggggacttctgggccaacctggaggaggcttcgtttctagtcagggagctggggagatatacctgaaggacataggagggcctcttcctgactaagccctgttgcctaccaaccccccacctcaactcctgcctggggctcttcctgcccggccagccccctccgctcctgcggaggttgggagggagagctaccggaagagtatgctgggaagtggttcgggggagggtttaataagttcccagcaccagccaaggtcaacaggtatacctgtcagcccacttgccagggttgggaacagagaggagaggctgggaagggaggagagaagggaaggggttattttgctttccccaggacaggaaaatgaagggtcagagctgcagcaagtgggcagtgtggctcagcacctggaaggacctccccacctagaggggtgtgtggaagggccccaaagcaggcatgagggacagagtgtcatcttctcaggagagaatttaagaaatccctctccctcccaccttgggctgggtagggagaggctgggtggatgtgaggggaagacctggctcttgactgcaagcatgggcgaacaggccaggatgaagatgttagggccagggtgctaccatgcaccgtgcagtggtcaaaattgtgcaccccctcaactgcccctttaggccacatcttaggagagtccaggtgagtagaggcagggaagaggaaagggatcaggagaggggtggccagtctggggcaaggctggggaccttccaactgaagaaggaagacttgtggtggggggagtttggggccccacagagtggggcagagaaggagacagcctggaaggagtgatggggagaccccagagagcccaggaggcatgagggaggtgggggaagcgagggaggctcacggggcaccagcgcaagcaccgcacacacc

SEQ ID NO: 17939 - DNA, 2300 bp, Homo sapien
accaacatggagaaatcctgtctctattaaaaatacaaaattagccaggcgtggtagcgcatgcctgtcatctcagctactcaggaggctgaggcaggagaatcacttgaacccgggaggcagaggttgtggtgagctgagatcgcaccattgcactccagtctgggcaaaaagagcaaaactctgtctcaagaaaaaaaaaaaagtgagctaagcatagaggtgcacacctatagtcccagatacttgggaggctaaggcacaaggattgcttgagcccagaagtttgaggctgcagtgagctatgatcgcaccactgtgctccagtctgggctacagagtgagagcctgtctcgggaaaaaataaaaaaagaaaagggtcaaggaaggtacacaaagatgtttaagcttggatttgaaggatcataggaatttaacaggcaggcaagggcatcccaggtccaagaagagggaagaaggtgtgcaaagagaaagagatgcgagtcagagggggacttctgggccaacctggaggaggcttcgtttctagtcagggagctggggagatatacctgaaggacataggagggcctcttcctgactaagccctgttgcctaccaaccccccacctcaactcctgcctggggctcttcctgcccggccagccccctccgctcctgcggaggttgggagggagagctaccggaagagtatgctgggaagtggttcgggggagggtttaataagttcccagcaccagccaaggtcaacaggtatacctgtcagcccacttgccagggttgggaacagagaggagaggctgggaagggaggagagaagggaaggggttattttgctttccccaggacaggaaaatgaagggtcagagctgcagcaagtgggcagtgtggctcagcacctggaaggacctccccacctagaggggtgtgtggaagggccccaaagcaggcatgagggacagagtgtcatcttctcaggagagaatttaagaaatccctctccctcccaccttgggctgggtagggagaggctgggtggatgtgaggggaagacctggctcttgactgcaagcatgggcgaacaggccaggatgaagatgttagggccagggtgctaccatgcaccgtgcagtggtcaaaattgtgcaccccctcaactgcccctttaggccacatcttaggagagtccaggtgagtagaggcagggaagaggaaagggatcaggagaggggtggccagtctggggcaaggctggggaccttccaactgaagaaggaagacttgtggtggggggagtttggggccccacagagtggggcagagaaggagacagcctggaaggagtgatggggagaccccagagagcccaggaggcatgagggaggtgggggaagcgagggaggctcacggggcaccagcgcaagcaccgcacacaccttctgttgtcactgtggctcacgaagtgaactctcctcccccgctgggggagaaggaagctgcctgggctgccacctgctctcctgccttacctccccccacagccctcatggatccttctctaccaggagggcactgttttgtaggcttcagtccttttgtgggcaagggaaggtgcccggcagggttggggcttgtcagggaagaatcgagggccctagagagaggggcacagcactaagtcttagcttgaggggttgtgctccaaggctggagctctcacacttggctcaagatgaagctctgccgcgtccccaaggtcagggtagggtgatttattgtgcttttattgcctggatagcttgcccagagccagcaggaggtactgggctgggagctgggggctgggtggggcagcgggcacatacaaagcaccctctgtgcctgtccccgagttggcaggagcatagcaccctgctcactgtgccggaggtttccagcctggccctacccctctgggccttctgaggggaggggccactggcagaccaagaaggaactgcagcaactccccattccccacccccagcccctcctcagcatcttgtctgtggcctgtgaactttgtgtcgcatatgttctaagatcctgccagctcctgcagcctctcctcagtggcccctcaacctctgccatcccccagaacccctggccttggcccctttctctaaccccttgctcctttccatcttttggaaacttgtctccagctgcccacactgttcccttcccagccctatctgagcaggtctttggaggctgggggggttgctttctaggtc

SEQ ID NO: 17940 - DNA, 2300 bp, Homo sapien
gctagcggatcacttgaggtctggagttcaagaccagtccagccaacatggtgaaaccccatctgtaataaaaatacaaaaattagccaggcacagtggcacacacctgtaatcccagctgcttgggaggctgaggcagaagaatcccctgaacctgggaggtggaagttgcagtgagctgagatcgcaccactgcactccagcctgggcaacagagtgagactccatctcaaaaacaaaaacaaaaaaccaaaacaaaacaacaaaaaaaaacaaacaaacaaaaaatgcagaagggcaccgggtcaaatgatagtcctatgatggagcaatataaaccaccacgactcctagtggctcctgggtgctggcgctgggctgggcagggtattcactattacatcttgtttaaggtaatctacacaatttccccctttctatttccttcagaaaggtactaactgacttacgtaagccatatggctagttgctgggagagctgttctagcccagttctctctccatgcttccatgatgcccctggaaagcttaacctcagccatcagacacttagctcacactccaggacagccggatggatacgcagagcctgtgttcttatctcttctttcccatccccagctgggcaaaagacaacctgtggccagggtctggaagggccctgggagcgcccaccccctctggatgagtccgagagagatggaggctctgaggaccaagtggaagacccagcactaagtggtaaggcttgggagtgtgaaatggggaggaggggctgggatcttggtgggtggggccaggccctgagtccctctctgcttgcctttcagagcctggggaggaacctcagcgcccttccccctctgagcctggcacataggcacccagcctgcatctcccaggaggaagtggaggggacatcgctgttccccagaaacccactctatcctcaccctgttttgtgctcttcccctcgcctgctagggctgcggcttctgacttctagaagactaaggctggtctgtgtttgcttgtttgcccacctttggctgatacccagagaacctgggcacttgctgcctgatgcccacccctgccagtcattcctccattcacccagcgggaggtgggatgtgagacagcccacattggaaaatccagaaaaccgggaacagggatttgcccttcacaattctactccccagatcctctcccctggacacaggagacccacagggcaggaccctaagatctggggaaaggaggtcctgagaaccttgaggtacccttagatccttttctacccactttcctatggaggattccaagtcaccacttctctcaccggcttctaccagggtccaggactaaggcgtttttctccatagcctcaacattttgggaatcttcccttaatcacccttgctcctcctgggtgcctggaagatggactggcagagacctctttgttgcgttttgtgctttgatgccaggaatgccgcctagtttatgtccccggtggggcacacagcggggggcgccaggttttccttgtcccccagctgctctgcccctttccccttcttccctgactccaggcctgaacccctcccgtgctgtaataaatctttgtaaataactgctgagactcctctttcaggggaagcaggaggaaaagggaggtaatggggcgtcctgatagggaaggccggtggtcaaccaagggttagggttttgaccctactgtccaatcctctagtctaggagtctttctggcagacagcaggctcggggcactcagaggaagaactacagaagttctagctgctgcttgggatggctgaaggaggcaggtggggtggggaagtccttctcgaataactggattcctccaaagatttccccatccccacaggactcccctcgggaaattcccctttttccctcagtgccaggcctgtgtggcctaataacgacggccctggtcttcttcccactcccctacccttaggtaggcccttagactccggcctttgagtccgcttctgcgcagggccggggctggaggcggggcgaaggggcggggccgcaggcgaacgcaagtcccgcttcgctctcgggggcggactcagcggcggaagtggcgctgccggaagatcttcttccgctctgaggcgctactgaggccgcggagccggactgcggttggggcgggaagagccggggccgtggctgacatggagcaggtgggtcccggagcggtcgctgggagcgggtgg

SEQ ID NO: 17941 - DNA, 2300 bp, Homo sapien
catgcagtctggcacagatctggctgatagatgttggggatcccattgccagcggcctgtcacatcccctccccatcgcctgtttccagagctgagcccagcttttccgtagcactgtggagatgaacctgtcatggggctcagagtgtggtgttgggagtagccttggcctggtgcctctgcctcacctgccctccgactctgctgcaaacagtcagttcctgtttgtgggggcttgcacaggggcagagggatggacgagctggcttgctcagaacctcctgccagccacaaactgagctgcgcttgttttggacgtggtagactgaggggcccaggaaggtagtccacatagtgaaagtgtggcaggacacctcaggaggggagagtggttagatcttgcctcccaagatcagggacaaacatctagagcttcccttcctctagaccccaaactactccctggtgctgggatgtggggagactcagggagcctcttggtcaagtcccagaagctcaggcccccaccaagctggtgagtttttgcctccccgcttcagctcctctgactttcttttttttttgagacggagtctcgctctgtcacccaggctggagtgcagtggtgtgatctcggctcactgcaagcttcacctcctgggttcacgccattcttctgcctcagcctctcgaatagctgggactacaggcaccggtcaccacgcctggctaattttttattttgtatttttagtagagacgggtttcactgtgttagccagaatggtctcgatctcctgaccttgtgatccacccacctcccgcctcccagagtgctgggattacaggtgtgagccaccgcgcccggcttcctctctgactttcagtgggacctttccttctcacccaagggacggggcctcttagagcccagcacatgggtggggcagagactgtaggcctgggggctacatggcagggagggagtgccagagttccttttgtctttagggttcctgagagcccgatgctggcacaggatggtaagggattgggtaaatccattcacctctctgggccttggttgtcgtatctgtaaaagaagaggaaccgtccctgccctgagtggacgtgaacgtgggtgtggatctgtgggcatggggtggggggcggtagagcactgggctggcctccagagtggctgcttcctactctctttagggtttgccctgttcctgtctgttatgtagcatggagctgagggccaggagacctactgagcattcatttattcaacaatcaattacaaagcacctattgcatgccaggcattgtgctgggcaccagggagacagcagtgaccatgtcagataaagcccgtgaggccatggagtttacagtctagtgagagaagggtaaacagtgaaataaaacaataaagatcgtttcagatagtgacccacttcactgaagaaaggaaggcagcttactatcatgttatgctgtgatttggagcaggagggtgggaggctttctgaggagaggacttttgagctgcctgttgaagggtctgtgggagaacattccaggcatggggagagccagatcgaaggtcccaaggcaggacagggcagctgtattgagggatgtaaaaaaggccagagtggcggtggcagcaagacagagagaagggctgggcagaggccacctgcaggcctggactgagagggcctggtgaggagactgttagcctgagaagggtgggaaaccgtgggagggcattgcaacgcattctctaggccggctatgtgaagagcaggagggtgagagaggcagcctggaggcccacccgtgagaagcagattgccatggtccaggcagagatggtggtggttggacctaggcagggcaaggggtggtggagctgagagggaccaagatgcctgctctccatagctccaagcacacagacactgctctaggaaggccctcccagttgccatggattagggggtgggaggggaagactggctgctgggagggaatgtggctttgtgcttggaaaacaaagaacagagcttggggccctcttctcctgggggtggtggcaggcccagaggctgttgacaggaccagaggctggagctcagggctaggcctggtaggagcaggctacagccccagggatccaggagggggtaggtgcccatgcagagggaccccagagccctccaggggtgaaccctgtggctgctgggcttggggcagggagcaccaggaaggaggacagataattagcg

SEQ ID NO: 17942 - DNA, 2300 bp, Homo sapien
catcaacagcctcccctccaggttcctccatcccctacctcttgccccttccgggaggtgaggggcagccccaggcccttgcttctacctgcagagctcttcctgtctccctctcacagaccaacacaggcatccgtaagaacttggagcaggagatcatccagtacaactttaaaacttccttcttcgacatctttgtgagtggccttggctgatcctggggaccccggaggcagagagggagcagggaaatgacttctgctgggttctcttttggcagcatatatccagtctgatcagagactcggctcccatccttcgggagccatcagtcattaaaacctttgctccacaaggctgggcgcagtggctcacgcctgtaatcctagcaccttgggaggctgaggtgggtggatcacttgaggttaggagttcgaaaccagcttggccatcatggtgaaaccccgcctctactaaaaatacaaaaaattagctgagcatggtggttcgcacccataatcccagctacttgggaggctgaggcaggagaatcacttgaacctgggaggcggaggttgcagtgagctgagaccgtgccaccgcactccagcctgggcgacagagcgagactctgtctcaaaaaaaaaaaaaaacctttcctccacaaagcccccttcagagagccccaggtgggagagggaagataagacccctgtgcaaggttacatccaaattgtcccagagacatgctgactcagtcgttgtcccctgaggtgtgcatgcccataggaagggaacgtgggggcaggaccagaggggaggtcagcctgcagcagggtggggggcagtagcttcctgtgactgccttgctcccgtcccccaccaggtcctggccttcttccgcttctctggactgctcctaggctatgccgtgctgcggctccggcactggtgggtgattgcggtaagatgccactttcctggcagcttctgggccctggcagggctggtggaagggatgggatggaggaggactcacttcccagcctctgccttccccttcctccctccctcccctgggcaggtcacgacgctggtgtccagtgcattcctcattgtcaaggtcatcctctctgaggtcagtggctcagggtctggccagtctggtgggcatcagacctgagtggtatgcttctagagaggagcatttctctaatttggggtgtctgtccctgttgtccgggttagggggagagggaatcctgtcctttggtatctataaggaatcatccttcacccgcttccctgacttagccccttgcagctctaggaatcagaaggttctttctccagcctaaccccagtttatcctgctgcagacttgagagggttcccaagcagctgctaccaggaatggggtgtatgccagtttggctggctagagttggtagccacagaagggggctctgggtttggggtgacccctgccatggagctcagccccctcccttcacagctgctcagcaaaggggcatttggctacctgctccccatcgtctcttttgtcctcgcctggttggagacctggttccttgacttcaaagtcctaccccaggaagctgaagaggagcgatgtgagtgcttgcgggtaggggggtgcagcgagggttacccacagccccaagagaggggagttgcgggcatgagagtcagtctgaagcatctcgccacctctgagcagcctccagtagcctgagggggagcttgggtgggggtaccccaggctgctagggtgtaactgtcctcggtccgggaccgagtctgctcctccagggtatcttgccgcccaggttgctgttgcccgtggacccctgctgttctccggtgctctgtccgagggacagttctattcacccccagaatcctttgcaggtgagggctggtgtgtgggggaactgctttcagggaggggccttgtgaggaatggggtaggctgggtctgttctttctattccttctatcaggctccctggggaaagccagcaaccctctcccacacacttttatcccccacatccttgcactcacatacccgaaccccactacctccccacactctctccccaccccttgccattgtcatctgtgcctgttttctgcagggtctgacaatgaatcagatgaagaagttgctgggaagaaaagtttctctgctcaggtatttgcctgcctacccctaacccctgcccttggaatgggtgcctggaggagggcgggtgcaggggtcagccggggtgggc

SEQ ID NO: 17943 - DNA, 2300 bp, Homo sapien
tgggacacctgtgctaagccttgttcagatagggtagctctgcctttctgcttccagcccagtcccagctgggccaagaatggagtgtgagtggtaggggctgcgggggggtgtcagggcctcactctgttccaaagtccccccaatgatgcctctttccataggggagagaatggccctgggggcttcatcgtgctcaagtcggccagtaacccccgtgtttgcacctttgtctggattcttaatacagatctcaaggtggggtgctggggggctgccaggtgggttctgtggagtggaggggaccctgctgctgacttggttgctgcatgactttgggggctctctgccatgcctgggcctcccctttgtcagccacctttcttacttgaaaatttgggtcagggtccagatggtctcttagccctgggttgctgtagggcatgtgcccccccttcttacctctgagtcctgaggccctgaggaagggtggctggtggccagcccggccccaccctggtctgtttgtgttgctggtgccaagagccaggcccagcatgttcttcctgccaggggtgagtgggagagggcgacccaggctggattccagagctgcacctgcattctggcccagagcccccctgctggtgccagctgcaaggggagaccctgctgagggcaggccatcaagtgtgacttctgcctgccttcccccagggccgcctgccccggtacctcatccaccagagcctcgcggccaccatgtttgaatttgcctttcacctgcgacagcgcatcagcgagctgggggcccgggcgtgactgtgccccctcccaccctgcgggccagggtcctgtcgccaccacttccagagccagaaagggtgccagttgggctcgcactgcccacatgggacctggccccaggctgtcaccctccaccgagccacgcagtgcctggagttgactgactgagcaggctgtggggtggagcactggactccggggccccactggctggaggaagtggggtctggcctgttgatgtttacatggcgccctgcctcctggaggaccagattgctctgccccaccttgccagggcagggtctgggctgggcacctgacttggctggggaggaccagggccctgggcagggcagggcagcctgtcacccgtgtgaagatgaaggggctcttcatctgcctgcgctctcgtcggtttttttaggattattgaaagagtctgggacccttgttggggagtgggtggcaggtgggggtgggctgctggccatgaatctctgcctctcccaggctgtccccctcctcccagggcctcctgggggacctttgtattaagccaattaaaaacatgaatttaaaaaaaaaaaaaaattccagcccctcccactgccttgcctcttgagggaagagaaaggcaggcagcagcttggatgaagagggaagacccctcacacagcctctcctgggctcacaggagggcggagcccggggagccagttcctgaaacatgccccccattccccccccgcccaccccccactccccgctttcctgaccagttcaactgagcagatgactggtcagaaaaaaatgccccgccccctgccaggcttcagcggggcaagtttaaagtctctagtccaggaatggaggtgggggtatgggcacctggcagtgcccacagcaagccttgactgtgtggcctggagatggggcctgagcttcagggtcactgaggcacctctgggatccaggccacctggagccccggacctcccagactccactcacccattccctctccccgcacggcactcacaccaggggcggcctggagcccggatcgcagggcggggccaggccactgcctgccttcctcctccctcccggctggcctgcccccttgcctgcctgcatgcaggcttccagcagagccagcttcttcagagccaggtggatcctgtttcggtcctgcctaggtgtgtgaccctgggcgaatctacctctctcagcttctgcttcccactttatgaaaatgggactgatgtcacagggttgttatgagattaaaagatatgaagaaccggggacagtgctcagtaatcaatagtctgcagttctgcacccacgtgctcctgggtactctgccgtccccacagggtcctcagctcagcccctgtcactgcctctcctgccaccctttgtccactcggcagtgttctcactcctcatccccccacacccaccacctgtctgccagcctcttgcaccat

SEQ ID NO: 17944 - DNA, 2300 bp, Homo sapien
gcagggcagcctgtcacccgtgtgaagatgaaggggctcttcatctgcctgcgctctcgtcggtttttttaggattattgaaagagtctgggacccttgttggggagtgggtggcaggtgggggtgggctgctggccatgaatctctgcctctcccaggctgtccccctcctcccagggcctcctgggggacctttgtattaagccaattaaaaacatgaatttaaaaaaaaaaaaaaattccagcccctcccactgccttgcctcttgagggaagagaaaggcaggcagcagcttggatgaagagggaagacccctcacacagcctctcctgggctcacaggagggcggagcccggggagccagttcctgaaacatgccccccattccccccccgcccaccccccactccccgctttcctgaccagttcaactgagcagatgactggtcagaaaaaaatgccccgccccctgccaggcttcagcggggcaagtttaaagtctctagtccaggaatggaggtgggggtatgggcacctggcagtgcccacagcaagccttgactgtgtggcctggagatggggcctgagcttcagggtcactgaggcacctctgggatccaggccacctggagccccggacctcccagactccactcacccattccctctccccgcacggcactcacaccaggggcggcctggagcccggatcgcagggcggggccaggccactgcctgccttcctcctccctcccggctggcctgcccccttgcctgcctgcatgcaggcttccagcagagccagcttcttcagagccaggtggatcctgtttcggtcctgcctaggtgtgtgaccctgggcgaatctacctctctcagcttctgcttcccactttatgaaaatgggactgatgtcacagggttgttatgagattaaaagatatgaagaaccggggacagtgctcagtaatcaatagtctgcagttctgcacccacgtgctcctgggtactctgccgtccccacagggtcctcagctcagcccctgtcactgcctctcctgccaccctttgtccactcggcagtgttctcactcctcatccccccacacccaccacctgtctgccagcctcttgcaccatgagttgctactcctggggtgctggactgtccccacagccatctgtctcccctgctccccatgaagaagagccagtcccctcccaggtagcacatcagagcgggcaggctccagagctcttctggtcctcttgcagtggccagaaagtggggaaaggggcccagagaggggcagggactgacccatggtcacacagcctatttatggctgatctggagccaggccttctgactatcacccatcagagcccctggattcccatttcacccaacacaggtgttggggtagaactgggggccctccacccctactagcctgactgtctcctgagacctgtctcctaagaccacttacctgaccactggccatggggaaggaaaacacctggccaaggctcatgccccaggttcccaggcatgaagttgactgtctccgcccctgctggtgtggtgagggtgactggggactaggcactaggcctttggtgcaggcgcctgaggacgtggttgcactctcccttctggggatatgcccttgagcccaggcagaggagagcacagccagggcaggacctggcagccctggtacagagcccagagggggcatcagttcctgctggtcctgctctgtttacagacaagctgctgtcctccctgcaaaggggagtgggtggggcagagggcaagtgccaggggggcacaaggctgggcatgtggctggcatgagacggtgtctgagtaatgtcaggcacctggaggcattgaccccaggaccttggaccccagacctctgaccggggggcagccagcgtccaggtaccccaacccctgccctgggtccggcgtccccccattagtgagtcttggctctacttatagcatctgacaccagaggggccgaaaatagcccctggagaagggggaggagggggctatttaaagggcctgggaggggagagagaatgaggagtgatcatggctacctcagagctgagctgcgaggtgtcggaggagaactgtgagcgccgggaggccttctgggcagaatggaaggatctgacactgtccacacggcccgaggaggggtgagtgtgggtctgctagagccctgcctctgctcccccagagcaccctcactgagccatgaggccagagcatgaa

SEQ ID NO: 17945 - DNA, 2300 bp, Homo sapien
cccttcctggctaggactgtggaggggagctgctggccatggctgctttgtagtttgcccagagttgggggctaggggaggggggagccagaggccaggatgcctgagccccctgagttcccaaagggagggtggcagagacagtgggcactaagggtggagagttgggggccagcacagctgaggaccctcagccccaggagaagggacaaaaggtactggtgagggcaagaggtgcctgggaggagtggccctgatccaggaaaatgtgaggggaatctggaacgctctaggcagaagaagctgggagggagggggaggtgaaaagggcagaggcaaggatggtggggcccccagcaccctctgttagtgccgcaataaatgctcaatcatgtgccagagttgcatctctttccttgtggttgggggggctggcccatgggtgtcccctcaatgcccacttctgggaccaggctccgcatctgagctaaatatggcagagctaatgggtacaccccatacttggggtgggggtgggggcaggacagagctgtaaacagggtgctgtctccagtctccttcccgtaccctgaccgctgcccagtcctggcttctgtgtccagccccctggcactgggtggtaaccagcaagccagctggcatccgcatccagggtttgtttcaatgatgtctcgtggagaatatggaggggctggtgccaggactgtccttggctttgcctcggggtgtgaacggggtcagtgacctctaaaactaacctgcctctcagttctgaatccagacagaatcaatcctcagctgtgtctcgctccacaccccctgccctggaagccagggaaggttggaggtgctagggggtcaggctcccctctgtgacccctgcagctgttgtggtgactcatgtcccaacctagctgcctctcccaaggagactttcccctggggacaagggggagggaatggcatggaggaggcccacatcaagcggggccaggaacccacggtggcaggagctgggctggtgacctacccagggcagaagggcccgggactcatccagaggggaaggaaggggtcttcaggaagaccacggagatgccacaggcagaattggcttcccatctgggagataggtggggagaccctggcattttgacagccagaacctggggtgctgagcagaatcttcatgcctggcctggccgctccttcggagggaagctggagggtgggctgcgagaggagtggggtcagagcccctacatccgcaggaccccaaatcggctgggccccaaggcccggactgcgctccccggtggccccggcggccctccgcgaatgcgtcctgcccctcccctgcccaagccctctgccctcacccgggtccggcgccgcccccgaagtggcgggaacaacccgaacccgaaccttctgtcctcgggagcccccagataagcggctgggaacccgcggggcccgcaggggaggcccggctgttccgcccgctaagtgcattagcacagctcacctcccctatcgcgcctgccatcggacgggcagtgccgcgccctgctctggggcccccggagcgaccacagcggaggccggaacggactgtcctttctggggcggggtggggagggggtgtcgctggagggcccggtggcatagcaacggacgagagaggcctggaggaggggcggggagggggagttgtgtggcagttctaagggaagggtgggtgctgggacgggtgtccgggagggaggggagcctggcggggtctggggcctcgtcgcggagggcgctgcgagggggaaactggggaaagggcctaattccccagtctccacctcgaatcaggaaagagaaggggcgggctgctgggcaaaagaggtgaatggctgcggggggctggagaagagagatgggaggggccggccggcgggggtgagggggtctaaagattgtgggggtgaggaactgagggtggggggcgcccagaggcgggactcggggcggggcaggcgaggcggagggcgagggctgcgggagcaagtacggagccgggggtgtgggggacgattgccgctgcagccgccgccccactcacctccggtgtgtctgcagcccggacactaagggagatggatgaatgggtggggaggatgcggcgcacatggccccgggcggctcggcggtcagctgccgcccccacagcggaccggtcggggcgggggtcgggcggtagaaaaaagggccgcgaggcgagcggggca

SEQ ID NO: 17946 - DNA, 2300 bp, Homo sapien
tcgtcccgacaggtccagcctgaaacagacaaatgtggcctggtgaactccccagcacagagaggaaagagagagcatgaatggggtccaagcgcaaatgtaggccaagagggcctgtaagttggagagaaccaggagaaatctcaaaattctagcttcccctttgaatgaatgagagatgatgagatgtacacataggggaaggtgtatgtacgtatgtatgcatattttagtgagcaattagagatattcgtcttttttttgtttgtttttttgagacagttttgtttttgttgcccaggctggagtgcaatggtgcgatctcggttcactgcaacctccgcctcctgggttcaagcgattctcctgcctcaggctcccgagtagctgggattacaggcatgcaccaccacacccaactaattttgtatttttagtagagatggggtttctccatgttggtcagggtggtcttgaactcccaacctcaggttatctgcctgcctctgccacctaaagtgcggggattgcaggcacgagccaccgcacccggcattttttttttttttttttttttgagacagggtctcgctctttcatccaggctggagtgcagtggggagagcatggctcaccacagccttgacctcctgggctcaaacgatcctcccacctcagcctcccaagtagcgagaccacaatgtctggctaattcttttattttttgtagagaaggcatcttgtcatgttgcctaggctagtcttgaactccagggctcagatgatctttctaccttggcagacatttcctctccttttgctcaagtccatcaagatgttggcatctgatgaactcatctatggaaacctgggtttatatttgtccttcctgaatataggatttgctcttactctcctggaaggagttcttgctatcttactcccttcctatgaaaatgaagcccaaattcttcaacctgacttttgaggctccaaattgcctttccaaccgtattggtcactactcctgttcatgtaccctgctccctgagtaaataaagctcctggatgtgcccacatctgcccagggcatccattctctctgttccctctgtctggaatgcaaagtggtataatagtaaagaggacaagcttgtggtcaaacaggccagaactggaaactccactttactacatactggctgtgtgaccttgggcagggcatttaatctctctaatccccatctgtaaaactgggattagagaaactatctcaaagggtgtgataaaaattacttgacatattgtgacacctgtcacacagtgagtgctcaatacgttggttctttgcccactatggtccaaatcgaatgtaccagtccaaagtccctccttcaaacaaaacgttccaagatgatccctgcccccacgtcttcaaagccggaactgacaccttcctatcccaaatgcttcctaatcaaagagtctttcaggggctcaaatcattctctgccttgcacttgaaaaggctcatgtccccgtggggactgtgagtcccaatgggcgggaccctggtctgatttctgtgccattcctagacattgtggcccgaatgtatttaataaatacccttttgactgaacaaataagtaaatgaaagcttctgggaaagtaagagaggctggtaaggctctcatcaccttaggggcttcactcacattcataagagacctcgtggggaaactaaggttcagggattgcagaggcgtattgggggcgcagggggcgggagcaagacaaatgggcggggcttaccgtgggggtggggcttacctgctagactcatgtagattggctggcgggagcggaagtgattcagagcgcccccagagcagttctgctcttcgcactgcagtacgcagtcgcggtacaccggctcacggtcgccctgggagccgctcgccagcgccgctgccccagctagcaggaccaaccgcgccgccaggccggccatcctttctccctggctcgccgccgggggaggagcttaggagtatgaagcttccacttccggagtaaccggaagttcctgtgttctttattctactctccgctgaagtccacacagtttaaattaaagttcccggatttttgtgggcgcctgccccgcccctcgtccccctgctgtgtccatatatcgaggcgatagggttaagggaaggcggacgcctgatgggttaatgagcaaactgaagtgttttccatgatcttttttgaggtagggctgtttactgtcacca

SEQ ID NO: 17947 - DNA, 2300 bp, Homo sapien
gtcgtgatcatgccactgcacttcagtctaggtgaaagagtgagaggctgtctgggaaaaaaaattttttttaactaaatgtatataaatgtagcaatatgtcaactattaacagcaattagattgaattatatatatgtatagttatttataaatcttatttaatgtggggcgttactgcatttcagtatgtttgacataatataggatgaggccttcaaaattggaattttctttttctttttttttttttttttgagtttcgctcttgttgcccaggctggagtgcgatggcgcaatcttggctcaccacaacctctgcctccctgggttcaagcgattctcctgcctcagcctcctgagtagctgggattacaggcatgcaccaccacacccaactaattttgtatttttagtagagatggggtttctccatgttggtcaggctggtctcaaactcctaacctcaggtgatccgtccgcctcggcctcccaaagtgctgggattacaggcgtgagccaccacccccagccttacttaggaattttctaaaggggagactccctattttgtcaggatttcatcctctttaatcctaaatgtccatctttatatgaggatcctcataaaaagactcatcccagagtcacagaaaggacaaaatgaaatgaaaaaagaaaaaaaaacagtattgtaaaagaactaatctgtaagatgcaaagtagtattagcactggatttccggtcagctcctggagggctaaggggttgttttgttcatttcagcttctcagtcagtatcagttgggtggtcaactccaggggacactattcatgttatatttaactggaagaatttgccattcacagaaaaggcaatgtgaatgctgctccccagagcaccattcacagaaaatgcaatgtgaatggtgcctcctggagattttgccttgcttagcaaggtgctagagctaaggactcagaaatgtttgttaagtgagtgaatggaatcccaggctacttcttactcattccaacccccaggacgaaaaagaaaagttgacaaggggtgaggagagtgggggaggagaaagggtgatccttagctacaaggcttctatgagattgggtgtgggtcggtgctgatgggagtgcaggggaggtgagcagggagaggatactaaagcaagcgtcctgttcccagggttcctaattttcctagaaatattacttctctccgatctcagtgcagaaccatactgatgattttacagccctggatttgtcaagttcttatgttgatgtatgctgttcattcattaaacagaagaacaaacaaacgcagttagcgcctaccataagccaaattctgtgctggaggtagagtggtgaacaggacagcaaaggttctaccccgcatggggaagcaatcaccctcgggaggtggtacttcaattgcgactagaagaaaaaagaagagtgagtgattcagaccaggccaggcagtcaggaagcttgagggacatagccctctgaagcgggtctggagcaagggagtgagggagaccagtggacaggggccaaatcaggcagggtttgtggagactgtattttacccaaggtaattgggagccagtaaataattttaagaaaaaaaaagtgatatgggcaaattttaatttttcaaaatggagcgcaggttggaagaggcaaaagtagaggcagggagagccattaagaagctactgcggctgtcttggcgacacatgatggtgtctttaaccagggtggtgccagaagagatggagagaagtggatagttacaggtacgtttaggaagtaaaatccgacaggggtggtgacagtaaacagccctacctcaaaaaagatcatggaaaacacttcagtttgctcattaacccatcaggcgtccgccttcccttaaccctatcgcctcgatatatggacacagcagggggacgaggggcggggcaggcgcccacaaaaatccgggaactttaatttaaactgtgtggacttcagcggagagtagaataaagaacacaggaacttccggttactccggaagtggaagcttcatactcctaagctcctcccccggcggcgagccagggagaaaggatggccggcctggcggcgcggttggtcctgctagctggggcagcggcgctggcgagcggctcccagggcgaccgtgagccggtgtaccgcgactgcgtactgcagtgcgaagagcagaactgctctgggggcgctctgaatcacttccgctcccgcc

SEQ ID NO: 17948 - DNA, 2300 bp, Homo sapien
ccaggctggtctcgaactcctgacctcgtgatctgcctgtcttggcctcccaaagtgctgggattacaggcatgagccgccatactcggccaactttgtattactttcttaaagagagtttcccaaattatataagcttcaggccccacaaaacctagatctgccccagtataactaaatctgggaccatttattgagcaattattatgtgccaagtattgcgctgagtgcttccagagcattatctcctttaaccccagcatagtatgtcagatgctgttttacagatgagccaactgagaccagagatgctcagtcacttgcccaaggtgacatgactgatatggaatagagtcaagatttttttttttttttttgacacggagtctcactctgtctcccaggctggagtgcagaggcgcaatctcagctcactgcaagctctgcctcccaggttcacgccattctcctgcctcagcctcctgagtagctgggactacaggcacccgccaccacacctggctaattttttgtatttttagcagagacagggtttcaccgtgttagccaggatggtctcgatctcctgacctcgtgatctgcctgcctcggcctcccaaagtgctggaattacaggtgtgagccaccgcgactggccagattcaagatttgaacccaggtcctcttggtcccagaggcccctgtttctcaactccctaggatggcatagcaacctgtcccacaagaggtgcctgctttaagtgtgctcagcacatggaagcaagtttagaaatgcaagtgtatacctgtaaagaggtgtgggagatgggggggagggaagagagaaagagatgctggtgtccttcattctccagtccctgataggtgcctttgatcccttcttgaccagtatagctgcattcttggctggggcattccaactagaactgccaaatttagcacataaaaataaggaggcccagttaaatttgaatttcagataaacaatgaataatttgttagtataaatatgtcccatgcaatatcttgttgaaattaaaaaaaaaaaaaaaagtcttccttccatccccacccctaccactaggcctaaggaatagggtcaggggctccaaatagaatgtggttgagaagtggaattaagcaggctaatagaaggcaaggggcaaagaagaaaccttgaatgcattgggtgctgggtgcctccttaaataagcaagaagggtgcattttgaagaattgagatagaagtctttttgggctgggtgcagttgctcgtggttgtaattccagcactttgggaggctgaggcgggaggatcacctgaggttgggagttcaagaccagcctcaccaacgtggagaaaccctgtctttactaaaaatacaaaaaattagctggtcatggtggcacatgcctgtaatcccagctgctcgggaggctgaggcaggagaatcacttgaaccagggaggcagaggttgtggtgagcagagatcgcgccattgctctccagcctgggcaacaagagcaaaagttcgtttaaaaaaaaaaaaaagtcctttcgatgtgactgtctcctcccaaatttgtagaccctcttaagatcatgcttttcagatacttcaaagattccagaagatatgccccgggggtcctggaagccacaaggtaaacacaacacatccccctccttgactatcaattttactagaggatgtggtgggaaaaccattatttgatattaaaacaaataggcttgggatggagtaggatgcaagctccccaggaaagtttaagataaaacctgagacttaaaagggtgttaagagtggcagcctagggaatttatcccggactccgggggagggggcagagtcaccagcctctgcatttagggattctccgaggaaaagtgtgagaacggctgcaggcaacccaggcgtcccggcgctaggagggacgcacccaggcctgcgcgaagagagggagaaagtgaagctgggagttgccactcccagacttgttggaatgcagttggagggggcgagctgggagcgcgcttgctcccaatcacaggagaaggaggaggtggaggaggagggctgcttgaggaagtataagaatgaagttgtgaagctgagattcccctccattgggaccggagaaaccaggggagccccccgggcagccgcgcgccccttcccacggggccctttactgcgccgcgcgcccggcccccacccctcgcagcaccccgcgccccgcgccctcccagccgggt

SEQ ID NO: 17949 - DNA, 2300 bp, Homo sapien
gggcttgggccagggcctggggtctgggcctgcagacagctgtgtctataaagcagctgaagggctgaggccgggggaggtcctggcagcagggcgttattttgggcctggcctgccacccccagctcctgtttctcttgggagtctgttgggggaggaagtgtggggaagaggagggggtgcaagtgggtgaggcatggagtggggaggcctccctcagggacatggacccttgagttctatttctgttcctccctcctgttcctccctctttgtccttatctgcctagagaggtgggaatagaggccattctgagtatcactaggagaccaccagtttgtggccactggccactggcccaggcagggaacctgggggcttgccctaccagcctctcccagcaatctgaaggcagggggtacctcgtattaccccctaggatttgaccttaggctccaacttgctgggagagcagtgcctctggtgtcagaccccaagccagcccttgtgctgtccctgaatctgcatgtagcctgtgggaggcggagcagtgaccggcaggaattctgggcagctcaggcacctgtgggcctgagggtgccctctgcccccacccttccgatctcctgggcaagacacgccaggtgattcatctcaccagagcagaaaaacaagttcaactgggcactttaatctcccctcactggcaggcctggtgtgagctgctaccccggcgcccctcaccaggggtgctttacctcctctagtattcctgaccttagtgggcatttctggtctcagggataccaggctggggtccaagtgggccaggtgtggcagttcagccctatgccccatggctgatggctcgcgctgggcaggtatgcagggctgacgtagtgcctttgtggcagcagtttcgtggcacacattctgccagctggttctggagtcttgccctgaggaggtggccagggtgagggtgccagcgcaggaacctttggcgcatgcttcaccctggcctgggatctgcagcctgggtccagatgcccacaactggaatctgacgctccttttctcttcatgggggactcccagaggtctctgcaatgaccagagccccggttgtcccatgcctcagctgcaactccagctgaccctccttccccactctctgggtggcattacgggggtgtggatcccttgccaagaggttggcatgtgggtgtgctggaatggcatagggagaatgcaccgagtttgtttgcttgggagaggggcagggggtatccagaagattcatgattcgtcatcgcctctcttgggggatttttacccctttgccctgagttgtgcctttgggacaaaggaagcctttctttgccagccaacaccctgtactggcgggcgagctccccagggctggcacgctggggcagcctctgaatgcacagggtgggcctagtcagaagaagcctttcccctgaaatccctctacttcccaagcacgcaagctttctcctgctgttaaacctgcagtgtgcaagggacatgggcggaggggtccttcagtcaggcttctccctgtctgaggtggcatgacttggagtgagtttggatggggtggccaggtctgagaaggtcccccgccagtgtcctctgacccatctgctctctcctgccagtgtgcaccggcacagacatgaagctgcggctccctgccagtcccgagacccacctggacatgctccgccacctctaccagggctgccaggtggtgcagggaaacctggaactcacctacctgcccaccaatgccagcctgtccttcctgcaggtgaggcccgtgggcaacccagccaggccctgcctccagctgggctgagccctctgtttacaggtgggtggcagaagaaggtgccctgcccttctgtttcctctcttgttgtggtttctcaaccaggaagtcctttctaacatctaacccccattcattttactgcagaatcagttgactctctctataacgtggctggccgaggtcatgtctggatgggatgcgtctgtgtttccgctaaatcttgtgctctcttgccagcatgatcatgtcccctgtccacctgctccagccactatccctctcccacttacagcagaagaaagggctggtgagaaaggtggattacaggcccacttctgccactgacgagccctatgaatgtggcctacacccccttagcttcactgggtctcagtttccctatctgtatattgggagcagttgtgaagctcagaagag

SEQ ID NO: 17950 - DNA, 2300 bp, Homo sapien
aaaaattcttactgccttccaacccctgtgaccccattctctccacggtgactgtgtcataccccaaaggtgacctctgtttttctcctgtgaccctgtcaccttccatggagtccccatcccagatccgtgagtgacccccatcatgactttctttcttgtccccagagtggcggtggggacctgacactagggctggagccctctgaagaggaggcccccaggtctccactggcaccctccgaaggggctggctccgatgtatttgatggtgacctgggaatgggggcagccaaggggctgcaaagcctccccacacatgaccccagccctctacagcggtacagtgaggaccccacagtacccctgccctctgagactgatggctacgttgcccccctgacctgcagcccccagcctggtatggagtccagtctaagcagagagactgatgggcaggggaggtgggaccttcagcccagggtccactgtgggggcagagggagtggcagagacaccggggttccttcccctaatgggtcaccttctcttgacctttcagaatatgtgaaccagccagatgttcggccccagcccccttcgccccgagagggccctctgcctgctgcccgacctgctggtgccactctggaaaggcccaagactctctccccagggaagaatggggtcgtcaaagacgtttttgcctttgggggtgccgtggagaaccccgagtacttgacaccccagggaggagctgcccctcagccccaccctcctcctgccttcagcccagccttcgacaacctctattactgggaccaggacccaccagagcggggggctccacccagcaccttcaaagggacacctacggcagagaacccagagtacctgggtctggacgtgccagtgtgaaccagaaggccaagtccgcagaagccctgatgtgtcctcagggagcagggaaggcctgacttctgctggcatcaagaggtgggagggccctccgaccacttccaggggaacctgccatgccaggaacctgtcctaaggaaccttccttcctgcttgagttcccagatggctggaaggggtccagcctcgttggaagaggaacagcactggggagtctttgtggattctgaggccctgcccaatgagactctagggtccagtggatgccacagcccagcttggccctttccttccagatcctgggtactgaaagccttagggaagctggcctgagaggggaagcggccctaagggagtgtctaagaacaaaagcgacccattcagagactgtccctgaaacctagtactgccccccatgaggaaggaacagcaatggtgtcagtatccaggctttgtacagagtgcttttctgtttagtttttactttttttgttttgtttttttaaagatgaaataaagacccagggggagaatgggtgttgtatggggaggcaagtgtggggggtccttctccacacccactttgtccatttgcaaatatattttggaaaacagctaggcaccggcctatgtctgggggtggctctgtgccatcccttcctgctcaccttacactcaattcctcttttcctggagggagtggctgggaatcttcagaaagcttggatgaggagccagacatccagttctccagcttcagggttgggggagatcgggaagctggattcagatctgagagccctttgacgaccagatcattcttatttagaacgaactaattcctaaggccactcaccagaatggggttatttcctccttgtgagtgaggagagtggtgggtagggtgggggaaagacgaggcagggtctactgtgggactcattttccttgccttggctatgccagaggagctcactgacctaaggagtagctgtccagaaagcccacccagccagcacagccaccctggcggtgcaaaggctgggctgaccggacttctgtgccccccacattcccagactggacgtataaaaacacacactagttagcattagtgtttgtagcgccactttactgccaatagctgacattgccctgggttaggggagaataaataaaatctgtggcatcagacaggtattaccgaggcgaagagtggactgggctttcgtgggcacttaccctgggaagggggtatgaggtggctggagaagtgttcatggagagtgtctctctcctgcccccaaggccacggaatcttctattccttctttgtacccaaagggcaaagtggaggccagggtctctttgctaaggagcta

SEQ ID NO: 17951 - DNA, 2300 bp, Homo sapien
agcagcattattcaaaaaagacaaaaaaaactggaaccctaaatatccatcagctggtgaattaagaaaaaaatgtggcataaccacacagtggaatacgactcagcaatgaaaaggaacaaactactctagacgctacaggatgaacgcatttcaaaaaacatattgaatgaaagaaccagaagcaaaaggccacatagtgtattattctgtttatatgaaacatccagaaaaggcaaagttagagacagaaagcagatcagtggttgcacaggactggaattgggagctggattgaccagaaacaggtgggaaggacttatcaggttgacggaaacattctgtaactggattgtagtgatggttaggcaacagtacaaatcactgcattttctttcttttcttttcttttcttttttttttggaacacagtctcactctgtcacccaggctggagtgcagtggtgagatctcagctcactgcaacctccacctcccaggttcaagcgattctcctgcctcagcctctggagtagctggtgcgccaccacacccagctaatttttgtatttttagtagagacagggttttgtcgagttggccaggctggtcttgaactcctggcgtcaagtgatccgcccaccttggcctcccaaaacgctgggattacaggtgtgagccactacgacctgcctggtttaaaaaaaaaaaaaatgagcccgggtgcagtggttcacacctgtaatcccagcactttgggaggccaagatgggcagatcacaacttcaggagttcgagaccagcctggccaacatggtgaaaccccatctgtactaaaaatagaaaaattagctggcttggtggtgggcacctgtaatcccagctgctcaggaggctgagacaggagactcacttgaggccggaaggcagaggttgcagtaagccgagatcgcaccattgcactccagcctggccaacagagcaagactctgtctcaaaaaaataataataatagtaatacaaaagttagctgggcgtggtggctggcacctatgatctcagctactagggagactgaggcaggagaatcgcctgaacccaggaggtggaggttgcagtgagccaagatcgcgccactgcactcaagcttgggtgacagagtgagactccatctcaaaataaataaataaataaataaatagcctaaagggacactagagtgggtggcgtgttaggataccatagtggtactgtaggcagggaaaaggcagcgaggacttgtgcagactccatttccagagctgcaaaatgggaataatgacgccagccccccagtgagaggctggatgagaagggatgcgcagaaactgttgggggcacagagcctgaagagcatctactgttttccagtgcaggcaagaagcagctgcaaaagactggaaaaagcagtttagagctttgggatcagaaacacttgtgtatgtaactacagggtggttccaaatgccatcagcaccgggcgtggtggctcacgcctgtaatcccagcactttgggaggccaaggcaggcagatcatttgaggtcaggagttcgagaccagtctggcgaacatggtgaaaccctgtctctactaaaacaaacaaacaaacaaacaaaaaactgggccaggcgcggtggctcatgtctgtaattccagcactttaggaggccgaggctggtggatcacctgaggtcaagagttcgagaccagcctgaccaacatgatgaaaccctgtctctactaagaatacaaaattaaccgggtgcggtggcacgcgcctgtagtcccagctactcgggaagctgaggcagaagaatcgcttgaacccgggaggcagaggttgcagtgaaccgagatcgcgccattgcactccagcctgggcaacaagagcgaaactccgtctcaaaaaaaaaaaaaaaaaaaatgccatcggcatgttagcgagaaaatgtcaactatttcatgcatcagccacacccacccccatccccaggatgcttgccccaccactttctctttcttttgtaaactgaaaagcgctttgcagtctaagatagtccattagagtaaatgaagccatgaagtccagcggacaccgggagtggggagtggggaagcccggcactccgggagaccgggccagggaaggagggtctggaccggacccagcccctgcccggggagcgagctccggagctgccctacgaggtcaaaacgtagcagtggcggagacccgcagggggcgcccgaacgccaccc

SEQ ID NO: 17952 - DNA, 2300 bp, Homo sapien
gccatataagttgattcctacagcactccgccctctgactgtggctttgtttccatcccatccttcaatatccaggatgatctttccaaaatgtaaatgtgccctctcctctgtgcttctacttaagtctaaatacaacttgcagggtctggtctttgaccgctactcctgcccatctggacaaacaggatggatggctctcaaacctggtttgcagaacagccacctgagggcttgtcaataccacaccttcctgggtcttagccctagagactgagattcagttgctggagaggagcccaagaatctattttccacacaaggttagggaggtctagaggccacatttgcagaagcacagcttcctctctccacaccttccacacctgtccaggttcacccacgtggcctctgcttcctcccttctcctccaaccccactctctgtctccgcatgctgcatctcctcctgcccagagctctggcattgatttcctcactggggaaagtggcctccttccccaattcccatccaccgattccaacccccttcccatgtcagccagcttctcctctgctcagctgtcacctccactgagaagtctttcctgactccctatgtgagtcattttcccagcatagttgtctcctgtcatttcttatttgtgtgattctttggttaacatcaatcttcctgattggctgtgtgaggatgggcggggtctgtttttgttgtttacgcctgtatccccagcacaaaacatggggctggcatatggtaggtactaaacagatagttgaataaatgaatgagtgaattgtctactctgcctttgcacaagctgctccatcaccaaagagaccttgcctcctcccccacttctttgctgggcccactcataccggttttcctaggaaaactctggagaaaattgaggcaggagccactcattcgtgccccttccagggtggacctcttatcaccctaaggattgtttgttttcctgtcacccacatcaagctgggtggtggccgcagcctttgatctccacctcctaacccctctcccaagtaccctgtgtttgcccagcactgaatgagacagctaaagtgatccctgagagaactaaagtgttccctcaggccgggcgtggtggcttatgcctgtaatcctaacactttgggaggccgaggtgggcagatcacctgaggtcaggagttcaagaccaacttggttaacatggagaaaccccatctttactaaaaatacaaaaattagctgggtgtggtggcaggcgcctgtaatcccagctactccggaggctgaggtaggagaattgcttgaacctgggaggcagagtttgcagtgcgccaagatggcaccactacactccagcctgggtgacagagcgggactctggctcaaaaaaaaataaaataaagtgatccctctaagaggaatccccaggggcccaggccagagctttctccaggtcaccatggctcctcccactgtgccaccctgcctaaccccctcgattttaaaggagaagccaagactctggactttgctcagaaggtggggggcgggggagggagggcttaccctgggtacctctgaggggccagggcgcagccaccacggtaagggtgactgcagatcgaggggcaggccatgttgctggacaccaccctggctggcgtccctctcggcagggtgctctttgccccatggggtgggatccagagctgcagacaggcccccaggcttggccaatgaacagaccaggttcggggagggtgttggaaaagagtggatggggtggttccccttaccttgcagcccccaggccctcccccctccctcccaggtggtcgggactcttgatcttcgctcgtggtactgtctgttcggctgtcttccccgcctctccccaggcacctgcatcctcccttggcacctgctgccaggctaggaagggcaaaaacaatcccagttggcgtagtcagggagtctccgccctcctcccaggtttcctcctcccaggcgcctcccctggacccgcccccatctgcccaagataattttagtttccttgggcctggaatctggacacacagggctcccccccgcctctgacttctctgtccgaagtcgggacaccctcctaccacctgtagagaagcgggagtggatctgaaataaaatccaggaatctgggggttcctagacggagccagacttcggaacgggtgtcctgctactcctgctggggctcctccaggtaaggggaccgagat

SEQ ID NO: 17953 - DNA, 2300 bp, Homo sapien
tgtccaggttcacccacgtggcctctgcttcctcccttctcctccaaccccactctctgtctccgcatgctgcatctcctcctgcccagagctctggcattgatttcctcactggggaaagtggcctccttccccaattcccatccaccgattccaacccccttcccatgtcagccagcttctcctctgctcagctgtcacctccactgagaagtctttcctgactccctatgtgagtcattttcccagcatagttgtctcctgtcatttcttatttgtgtgattctttggttaacatcaatcttcctgattggctgtgtgaggatgggcggggtctgtttttgttgtttacgcctgtatccccagcacaaaacatggggctggcatatggtaggtactaaacagatagttgaataaatgaatgagtgaattgtctactctgcctttgcacaagctgctccatcaccaaagagaccttgcctcctcccccacttctttgctgggcccactcataccggttttcctaggaaaactctggagaaaattgaggcaggagccactcattcgtgccccttccagggtggacctcttatcaccctaaggattgtttgttttcctgtcacccacatcaagctgggtggtggccgcagcctttgatctccacctcctaacccctctcccaagtaccctgtgtttgcccagcactgaatgagacagctaaagtgatccctgagagaactaaagtgttccctcaggccgggcgtggtggcttatgcctgtaatcctaacactttgggaggccgaggtgggcagatcacctgaggtcaggagttcaagaccaacttggttaacatggagaaaccccatctttactaaaaatacaaaaattagctgggtgtggtggcaggcgcctgtaatcccagctactccggaggctgaggtaggagaattgcttgaacctgggaggcagagtttgcagtgcgccaagatggcaccactacactccagcctgggtgacagagcgggactctggctcaaaaaaaaataaaataaagtgatccctctaagaggaatccccaggggcccaggccagagctttctccaggtcaccatggctcctcccactgtgccaccctgcctaaccccctcgattttaaaggagaagccaagactctggactttgctcagaaggtggggggcgggggagggagggcttaccctgggtacctctgaggggccagggcgcagccaccacggtaagggtgactgcagatcgaggggcaggccatgttgctggacaccaccctggctggcgtccctctcggcagggtgctctttgccccatggggtgggatccagagctgcagacaggcccccaggcttggccaatgaacagaccaggttcggggagggtgttggaaaagagtggatggggtggttccccttaccttgcagcccccaggccctcccccctccctcccaggtggtcgggactcttgatcttcgctcgtggtactgtctgttcggctgtcttccccgcctctccccaggcacctgcatcctcccttggcacctgctgccaggctaggaagggcaaaaacaatcccagttggcgtagtcagggagtctccgccctcctcccaggtttcctcctcccaggcgcctcccctggacccgcccccatctgcccaagataattttagtttccttgggcctggaatctggacacacagggctcccccccgcctctgacttctctgtccgaagtcgggacaccctcctaccacctgtagagaagcgggagtggatctgaaataaaatccaggaatctgggggttcctagacggagccagacttcggaacgggtgtcctgctactcctgctggggctcctccaggtaaggggaccgagatcggtctcagacgacagcctgccaggcaacccccagccgcaccagggccccaggctgtgccagtctccggctgaactggccggcggcccaggtgggaggattggagccacctggctctccccctcccccgctcggtgatgtcaggccaggggcgggggctggagggggacaggtagttaagggcctggcgtctccctccctgaagacgtggtcccagccgggtgtcctgacgctcggggttcaggtaagaacccaagcgggcatttatcctttgggggcaggcacggccggtctggaggccggtagggaaaggctgggtctcctgatgggttgcttggcctcccacttttctcttttctgtccatttcccaccctgccccctcctccc

SEQ ID NO: 17954 - DNA, 2300 bp, Homo sapien
ctactctgcctttgcacaagctgctccatcaccaaagagaccttgcctcctcccccacttctttgctgggcccactcataccggttttcctaggaaaactctggagaaaattgaggcaggagccactcattcgtgccccttccagggtggacctcttatcaccctaaggattgtttgttttcctgtcacccacatcaagctgggtggtggccgcagcctttgatctccacctcctaacccctctcccaagtaccctgtgtttgcccagcactgaatgagacagctaaagtgatccctgagagaactaaagtgttccctcaggccgggcgtggtggcttatgcctgtaatcctaacactttgggaggccgaggtgggcagatcacctgaggtcaggagttcaagaccaacttggttaacatggagaaaccccatctttactaaaaatacaaaaattagctgggtgtggtggcaggcgcctgtaatcccagctactccggaggctgaggtaggagaattgcttgaacctgggaggcagagtttgcagtgcgccaagatggcaccactacactccagcctgggtgacagagcgggactctggctcaaaaaaaaataaaataaagtgatccctctaagaggaatccccaggggcccaggccagagctttctccaggtcaccatggctcctcccactgtgccaccctgcctaaccccctcgattttaaaggagaagccaagactctggactttgctcagaaggtggggggcgggggagggagggcttaccctgggtacctctgaggggccagggcgcagccaccacggtaagggtgactgcagatcgaggggcaggccatgttgctggacaccaccctggctggcgtccctctcggcagggtgctctttgccccatggggtgggatccagagctgcagacaggcccccaggcttggccaatgaacagaccaggttcggggagggtgttggaaaagagtggatggggtggttccccttaccttgcagcccccaggccctcccccctccctcccaggtggtcgggactcttgatcttcgctcgtggtactgtctgttcggctgtcttccccgcctctccccaggcacctgcatcctcccttggcacctgctgccaggctaggaagggcaaaaacaatcccagttggcgtagtcagggagtctccgccctcctcccaggtttcctcctcccaggcgcctcccctggacccgcccccatctgcccaagataattttagtttccttgggcctggaatctggacacacagggctcccccccgcctctgacttctctgtccgaagtcgggacaccctcctaccacctgtagagaagcgggagtggatctgaaataaaatccaggaatctgggggttcctagacggagccagacttcggaacgggtgtcctgctactcctgctggggctcctccaggtaaggggaccgagatcggtctcagacgacagcctgccaggcaacccccagccgcaccagggccccaggctgtgccagtctccggctgaactggccggcggcccaggtgggaggattggagccacctggctctccccctcccccgctcggtgatgtcaggccaggggcgggggctggagggggacaggtagttaagggcctggcgtctccctccctgaagacgtggtcccagccgggtgtcctgacgctcggggttcaggtaagaacccaagcgggcatttatcctttgggggcaggcacggccggtctggaggccggtagggaaaggctgggtctcctgatgggttgcttggcctcccacttttctcttttctgtccatttcccaccctgccccctcctccccacccgccctcttttcgtccccatcctggtttccagcgctccttgttccctccctgtacacctccctgcaggcagcagctgagaatgggaaggaagacctgattctctcctccgacttggctttcccgctgaaactagcccctccccgcacacccggggagagccgccctcactctctggctcgcccagtttaccccagtttgggtttccccaagtctctaagacagacgtctctgcgggctgcggggagatgtggggagggccccctccactttggagggcagtgaaggagagggatcctctaaattgtcgaggcttcatctctccagattgtatgcccttctcagcaacaccgcctccggccctccgatgggaaagtggaggccgggtgagacggggtccctcctggcttcagcatgaaatgggcaggaagg

SEQ ID NO: 17955 - DNA, 2300 bp, Homo sapien
ctggactatgtgatgttcacgattcacatgggctgccacggcttccgtgaccctttcgagtgtaacatgtgtggatatcgaagccatgatcggtatgagttctcgtctcacatagccagaggagaacacagagccctgctgaagtgaatatctggtctcagggattgctcctatgtattcagcatcgtttctaaaaaccaatgacctcgcctaacagattgctctcaaaacatactcagttccaaacttcttttcataccatttttagctgtgttcacaggggtagccagggaaacactgtcttccttcagaaattattcgcaggtctagcatattattacttttgtgaaacctttgttttcccatcagggacttgaattttatggaatttaaaagccaaaaaggtatttggtcattatcttctacagcagtggaatgagtggtcccggagatgtgctatatgaaacattctttctgagatatatcaaccacacgtggaaaagcctttcagtcatacatgcaaatccacaaagaggaagagctgaccagctgaccttgctgggaagcctcacccttctgcccttcacaggctgaagggttaagatctaatctccctaatctaaatgacagtctaagagtaagtaaaagaacagccataaaataagtatctgttacgagtaactgaagaccccattctccaagcatcagatccatttcctatcacaacatttttaaaaaatgtcatctgatggcacttctgcttctgtcctttaccttcccatctccagtgaaaagctgagctgctttgggctaaaccagttgtctatagaagaaaatctatgccagaagaactcatggttttaaatatagaccatcatcgaaactccagaaatttatccactgtggatgatgacatcgctttcctttggtcaaggttggcagagcaagggtataaagggggaaattgtttggcagcaccaacagaaaacaaacaaacaaaaaacagctacctaaaacttcttgaaagagttcatggagaattggtgatacagacccaaagcaaatttgccaatgatattttccacaaaaaaagtccaaaaagtatggctcagcctccccctccccacaggagaggaattggagatagatggcatgtgtgtttagatcggagttgagctccggaatggggtgaggagggacacctctattgagaggttctccttgatcaggcaggcttcggccctttttttcccatttaaatggaactgctgtattccatgaaaattcctgaaagtctgatcacggttctgcagatgtataagtcatccttgtcactcataatatgtacatactatcaggaggagtgctgttatcatggtaaaattagcactggaataggaggtcacaaaatgctggctaattagctatgtgactttgagaaatcgtttaactttttttttttttttttttttgagacaggatctcactctgttgcccaggctggagtgcagtggtgcaatcatggctcagtgcagcctcgacctccccaggctcaggtgatcctcccacctcagcctcttgagtactgggacaacaagtgcacaccaccatgtctggctacattttgttctttttgtagagataggggtctcactatgttgcccatgctggtcttgaactcctgggctcaagcaatcagcccgcctcagcctcctaaagtgctgggattacaggtgtgagccaccacacccagccttatttaactcttaaaactcagtttccggccaggctcggtggctcacacctgtaatcccaacactttgggaagccgaggcaggcgcatcatttgaggtcaggagttcgagaccagcctgacccacatggtgaaaccctgtctctactaaaaatacaaaaattagctgggcagtagtggcacatgcctgtaatcccagctactccggaggctgaggcagaaaaatcgcttaagcctgggaggttgaggttgcggtgagtggagatcacactactgcactccagtctgggcgacagagtgagaccctgtctcaaacaaaacaaaacaaaaacaaacaaacaaaaacaaaaaaaactcagtttcctcatccataaaataggaattagatttcaatgttctcttaggtcccttctagctttaattcatatgtgattatgcagtaaccacaaggtattttttaaacctcctaatgtatggatattaagcagaagagtatttatatgaatacatgtttcacattcctttggtatgaaaatggtgtgttaag

SEQ ID NO: 17956 - DNA, 2300 bp, Homo sapien
aggtactgtttgtcaggtttctccactgtcaacttattcccctgctttcatactatactcttcggaaggaagtcactttgtgcacccacacttaaagagtggggatttatgctgcatctccttgaaggtggagtagctacataagttattttaccaattcacttttaatccccttaggtatcactctcgggagtccgaaatactcagtattgaactatttacagagtactaacacgttccactgtcaaatatacagaagaacattgtaatggaaaatcataaagtttccttacaactttttttttttttttttgagacgaagtctcactctgttgcccaggctggagttcagtggcaagatctcggctcactgcaacctctgcctgctgggttcaagcgattctcctgcctcagcctcctgagtagctaggattagaggcatgcgccaccacgcccagctaatttttgtatttttagtagagacagtattttgccatgttggccaggctggtctcgaactcctgacctcgtgatccacctgccttggcctcccaaagtgctgggattacaggcgtgagccactgcgcctggcctacaactttttcataaccaaataacttttcatcctcataccatccctgtgaaattttacagttcctcttctgctacttttgatgtgctatttttgcttttagaaactaacaaacaacaaatttcccctttcagtactaaaattagacctagtgtttagagtatttctccaaaattgacatcctgcagaactcccaactcatacagttatagagatgctactgtggtgcttaaagccagtgtagtttttcacccacttgaatatatatacacacatcacatagactgcctataccaacgacatactattgtttaaagctacaattcataaaattacagcatgtatactttaacttgtaagtgtgggtttcttctgatatggacagctgatgcacaaaccctcagccttaagtctcaaatatatttgtatgcactaatataattttctaatagcggtgacagtggccttttgagactcattcgtatattgtcccacacgctggatatctttagaagggctcacctgaacaatgtcccttagacctcaatgtgaagaaaagttctgctttgaaaaacagttttgtggtcacttcccctttcctctctctgcagtcaaatgtgtgctttacctctggacagtagggagggtgttgggagaagatgttgactgatacatatctgtatactaacatctttaagttaattttacaatcttactgcccccaccttccacccttagctctactttctttgcttaattttctggtacatcatatatgtatttttgtaaggtgtgtatttagaagaaggcaggctgggagaaaataaacacactctataaaacactccctctatttatatagagtgggtagtattgcgtgagtggtggcaaataaatcaagcagttcccagagggaaaacaaaagtgagataaatgcttccaaaaattaaaaagttgaattgatagaagtgccaaaatcctttccaactgtctgaaaacttggaccaaaaacttttaccatgtgaaatgaaaaagtgaggaaggaaaaaaaaatactttgaaagaagggggttctcattgatactttccacggctgttatcactgaatctagacaaaaagttccagatcttcctcaatttaagataaacgtctttgaacttcagcttgccaagaaagcaaggctgacccccgaccctccgtgtgatgtcacttttctcatccattatccttctaaaatagacattttgagacaatttagtgatgcgacatttccatcctgtcggggttccttgggtttgacattcgaaagggggctggaggcgcggaacccgcggcactccgcggccagcgtcctttaaagccgccgccagccagcgccgctgtaaccccgcgcaccggcaggtcgccggctcctgcccttttcagtctgcgccgacgcggctgccggatcccggggactccccgcgccgggaatctcccgccagctgcgcgctgagtccaggcgacggcaggagcacgtggagaggccgagtagccacagcggcagctccagcccggcccggcagcgacatggaaggtgagcctccagcccgcttcttttctccggggtctttgagaaacttaacctgtgcaagcagtagaaagagtttcttctgaatctcagttttgcttctatttacttcttttgtcaaaagtaaatatgaggta

SEQ ID NO: 17957 - DNA, 2300 bp, Homo sapien
ggggattaaaagtgaattggtaaaataacttatgtagctactccaccttcaaggagatgcagcataaatccccactctttaagtgtgggtgcacaaagtgacttccttccgaagagtatagtatgaaagcaggggaataagttgacagtggagaaacctgacaaacagtacctcagccagcagaccaaggttaacatcaagtgataaggcatgttgatagtatgtccccttgatatgatgtgatgagaatgtcattttatctctgtaatcttcctcctaagaatccataattctagtctaatatggagaaagacaccaaattccagtagagaggcattctacaaaatacctcaccaattaaagccaggtcaagaccttcaaacacaagaaaagtctgacacagccaaggggaatctaaggagatacgatgactataggtaatgtgggatcccgcatgagatcctggagcaaaaaaacaaacgaggtagggaggacattgagtaaaaaactaaggaaatctgaataaagtttggacttcagttaatagtaatatatcaatatccgttcattaattgtaagaaatgtaccataccaatgtaagatgtcaataatagggaaaatcgggagggagtatgtaaaaactctctgtactgtttttgcaaattttctgcaaatctaaaactcttctaaaataaaaagtttatataaaaagagtggatgggtacttttgacaactattactcatttggttaagtctcctctcataggatttagtttatcacacaggatttacaactatcaattacttacagtaaccaaaaagtcaataaaacacactgtggatatataatgtactttgactaaaactggaatgaagaacttgtagggaatcaaagataatgcctaaatctgtcttcattatcatcaccttaagaagagaacagttgagaccagaccatgtatccagacatggtaactgaaaatgggtggatctgactcactgagtcacatttcatggcttatgctatataggtaaaattaacagtgactaaaaatgaaattactgacaaagtttgctcctggaccatatgagagagtccaagtactgactcggctcaaaggaaataaaaccgaaaactcttgatctcacccaaaataaccattctgcaccctgtctgaaccttgggctctctctactaaccagcctactcaaaaccactactgagagtggtgtcccgctgctaagaaacagacaacacacagggcctttcgggccaccaaactagtagccaagaaggaaccatcaaagacgcgggcatgatcccctttggagctccccgatcttgactagtcatccatccctacagaaaaggccaatcgggctccatccctacagaaaaggccaatgggccttacaattgggcccatttttaaagcaaggtcacttcatcaacctagatacgtttgcactgggggaggtctctcacatcgcctcatacttgaagtgaaaatgaagattcaacgttcctctagagtgggaaggcccggaagcgccttcttggctcagtagtggctcttctgggtcttggtcttgctggtaaagaatgcaattaggtaaaaatcgcgtgtcagtttgaaagagattcgacacccagtttcagcgttcatgagaagagaggcgtaggaaatccccacgcgggcctttctgcttcacgtgaggaggaaattgtcacaagtctctgccttcctcaggtccccttcctaggggattcctcatcgcatcccctagccgccctaccccaccacggtccttgggacctcgcggtgttctctccttgatcccttcggcccctagactggggaatccccggaacgcgacaccgtggcttcttttcctttattctcttcctgccttccgctccgctcagagagcaaggggccaggagcgcgggaaaatggcgccggacgcgaggcgcgaaaagttcgcatgcctgctgccgcgtgggcgccagaggatctggcgatcgcctgcagcgccgtcgccccgcccccgcgcgcgagaatcgaagcacgcacgcgttctcctgcgcgtccgctcccgccgttgcgacggacgggtaggggaggcgaccccggcgttctgctccgcactgtggaggaggtggggaggtgttgggccagggctgaggtaggagggagtctgtccctcgacgcctcctgcgacgccagcccctgagcgatgatgcgaacgtgcgtcctactctccgcggtgctctggtgcctcacaggaggtggggctc

SEQ ID NO: 17958 - DNA, 2300 bp, Homo sapien
gtaaaggaggaaaccctgaaaagcgaccggcaatataaattttggagccagatctctcagggccatctcagctataaacacaaggttaggatcctgggaggcagggactgtggaggccagtgttggcccacaccccgcaggtcaaggcgatgccagccttagactcttccttcactcctctccgagcagccctgctgctcttggccaccttgccccaagaaagggtgggtggcattgcccagtccttcccttgttactctctagcggtgccctcttttcatttgcattttctttctttcttttttaaatagagatgaggtcttgcatgttgtccaggctggtctcaaactcctgggctcaagcaatccacccacctcggcctcccaaagtgctgggattacaggtgtgagccacgcacccagccttcattttctttgtacatttcccatggttcatcattacacaggtgtatttttgcttgtttattgtctgtctcctttctaggaggtaggaggacaggagccatggtgcctagaacaaagcagctcctcagtaaacatttgttgaatgaacagtggcaacaagatgagttttggcatcagacgtgggttcaaatttcagctctgccactgtttttagctgtgagactgtctcacctgctgacctctgagagcctcagttttctcgtctataaaatggggatacaaatgactgcctcacaggattgtttgggagatcaggcaagataatgatgtagaaacacctggggatccgtcaatgtgagctcctttttctagggccaaagggaagtgaccatccccccaaatcgggtcctgagctatcgagtaaagcagcttgtcttccccaacaaggagacgatgagtaagcaaaggcagatggagaacaggatggggggccctaaacacaccagtgaggtggggggtgggattcaaccaggctctgtcagcctagggtgggtggctggtgagcttggaggttggggaggggtccagggaaaagggtgggttcagcactaggaaggactgaggctccatgctctgacctggggacctggacccgctgacccaggatttgcctgaacatgacataagagtcattaactcctctcccagtctccaaatagaataattgtcttttttggctggacgtggtggctcacgcctgtaatcccagcactttgggaggccaaggtgggcggatcacctgagatcaggagttcgagaccagcctagccaacatggtgaaaccctgtctctactaaaaatataaatattagctgggtgtggtggtatgcgcctgtaatcccagctacttgggaggctgaggcaggagaattgcttgaacctgggaagtggaggttgcagtgagccgagatctcaccattgcactccagcctaggcaacaagagcaaaactccatctcaaaaacaaaaaacaaaaaacaaaaaacaaaaacaaaaacaaaaaacagttgtctttttttttttttttttttgattggaggctggtatagggattgagagggactggagaaagggaacttacagagtgataactggtctctccaataacttgttttttcctccctttttggtgctggtttagatattcatttcaggggcaaaacaaaatcctttccagaaggtgagtgagctgctgggcttcccgttcgtcatttcagaatgggcaaagacactatttttaaaaatggaattacagagtggttaggtccgaggatgtggtaagacgcacccacaggtgggaaccatggcaagcgcaggggaaaaattagcctgttgaagagtctggattgcacatcggactagggtttccaggctgctcctaggacaacttcgtgctggcagtcagctggatcctgagcttacagccctccctgaagtcttgttggcctaggaagcacaattaaatgacttggccagttccagcaggacagcactggctgtgaaaagggtcctggactggagtcaggcagtctcagggtctagtcccaccctgccactcactagctctacagcctcccaagtcacagttttcctgactttattttaatttaatttaatttaatttttttgagacagagtcttgctctgtcgcccaggctggagtgcagtggtgtgatctcagctcactgcaacctctacctcctgggttcaagcgattctcctgcctcagcctcccaagtagctgggaatacaggtgccctccaccacgccaagttaagtttggttttttttgtttttcttttttttgtatttttag

SEQ ID NO: 17959 - DNA, 2300 bp, Homo sapien
cctctgaaagtgttgggattacaggcatgaaccaccacgcctggcctgtcatcccttcaaatgttctttcagaactgaggcatgcagaggctggaagacaggctgggctcaccggggtggttatctctgagagaggacatgggtgaggtcagaggcctctccctggagaaggaggtaggtggagaagccagatggcatccagataaggaagaccagcatctccttgagagtgtacacgggagcacgagatggggagggaggctgagtgctccttacaggcccaccctgttgcctccaggtgttagctgctgttgtcctgggtcttcagtgttgaccgtcgcatggcatttgggcagctggttctgctgggttatggtcctcatgtccctggcacagacacagccattgcctgctggcacttgatacctactcatattccatttctctattccaaacacactggattgcatggcccagggcgccacggtgtgcaccattgtctggcccacactcacctagaatacataccaggatctcctacccactccttaggtacaagaagaagaaggggttctggccgggcatggtggctcacacctgtaatcccagcactttgagaggccgaggtgggtgggtcacaaggtcaggagattgagaccatcctggctaacacggtgaaaccccgtctctactaaaaaacacacacaaaaaaattagctgggcgtggtggcaggcacctgtagtcccagctactcgggaggctgaggcaggagaatggcgtgaacttgggaggcggagcttgcagtgagccgagattgcgccattgcactccagcctcggcgatagagcaagactccgtctcaaaaaaaaaaaaaaaaggggggttctggccttaatctgcctccagctcagttataaggtggcttatctaaaggcttgggaggtggggcacccagccctacccacccgtccaggaagttccacacctggacaactttcagtttcattattttagcttcctgagattcagaggccaggaactgtgcagagatctgtggggattctcacaacttccatttctggtgaacagctgaggtcagagaggaggtgggtaccacttgagatgggcctgtggttcccgggtactgtctttccagacacctagaattcccaggttggtagtgaactgagagtcaaccaccatgatggggccagagacagaggaggaagcagtgagtggataagtgcctgtgctgggcagaagggatataggggaaggtggccaaaggtaggatggggaagtggatcccaggaagcttttgtttcttctgaggccaatttaccaccacctcattgggaaattgttggtagggaggcacccatccaattgccttgcagaatacagcaaggcagggagcccaagaatcagagccaagggaagaaacgaccagttgaggttagtaatgtgaagtctggcaaccgtgcccgtcattcctccctggttcctctgttcatcaacgttggggctagtctggctggggcatggtgggcctgcctttccatcccttgggccccttggaacaagggggcaactctgctgtgggagatgtagaaaatgggtctcactttctctatttggggcaatagctgctacttttttcctccagatgggtaccatgaggggcagaggagaatctgggatctgtgatgtttagccctctttactgagtcatggctgcctcacgttctagaagtaaggcaggcaaatcattccaggtactgattgtcctggaacctttggctcttccttgacctcatgtcacgtgcgtccatgtgaagagagtccacgaaacgggctttatatgagcaacaaggctgggtgcaggcaagctgagtccaaaaaaggggtcagcaaagggtggtggcattatcattagttcttatatgtttgggataggcttacaaagtacattctcaagggtggagaaatattacaaagtaccttcttaagggcaggggagaatattacaaagtaccttcttaagggcggcggcggggagactatattgtatcagggtggggcaggaacaaatcacaatggtggaatgtcatcagttaaggctattttcatttcttttgtggatcttcagttgcttcaggccatctggatgtatacatgcaggtcacagggaatatgatggcttagcttgggttcagaggcctgacacctcaggctgccaaatgtggaagatttaaatacttgaaccaataccctcctcccaaaaactgaaattggcttc

SEQ ID NO: 17960 - DNA, 2300 bp, Homo sapien
tcagtccttcccagtgaatccccagcccttctccagtttctcacttctctccccaaggcctttccccagtcacctctcccttgggagcgctgcgtttccttctggcctttcagtggaggggacttttcatacttcctcctcccaccataagcctgagtggcaggggaagaggttctggggactttctgaggccaacatggctaggagagagaggagtcctatagcaaggaatccttatctcacgagggcactgaccttccagcgtgttctggggagtatcagctgctattcccaggagaggcacaaagtcccaggtagaagggaggagctgtccccagcagcctggggtctctagccccggtccaccatcacagcacccttggagtgagtgtcagggagtgtgggatatttgcccaagtccagccaccacccctgtccgagtagagcccacacagtattggaaagagaaatatagccactgctttcactcctgggagtaggggtgccctggttgctttcaccagcctgcaagagtatagtcagggtgaggtgctggagaacatcaacaacgatctgggttcaaatcccagctttgccacttattagccatgttgctgtgtcaacttctctgagcttcagtttattccactgttgtgtaaagataatgcctcttagggctgttgtgagcattagcacagtgcctggcatatagtaaatactcaatatatggtagccatattattataattgtaattgttactaccaccactgtcgtctatttatttatttatttatttatttttttgagactgagtcttgctctgttgcccaggctggagtgcagtggcaccatcttggctcactgcaacctccgcctcccaggttcaagcaattctcatgcctcagcctcctgagtagctgggattacaggtgtgtgccaaaacatctggctaattttttttttttttttttttttggtagagacggggtttcgccatgttggccaggctggtcttgaactcctggcctcaagtgatctgcctgcttcggcctctgaaagtgttgggattacaggcatgaaccaccacgcctggcctgtcatcccttcaaatgttctttcagaactgaggcatgcagaggctggaagacaggctgggctcaccggggtggttatctctgagagaggacatgggtgaggtcagaggcctctccctggagaaggaggtaggtggagaagccagatggcatccagataaggaagaccagcatctccttgagagtgtacacgggagcacgagatggggagggaggctgagtgctccttacaggcccaccctgttgcctccaggtgttagctgctgttgtcctgggtcttcagtgttgaccgtcgcatggcatttgggcagctggttctgctgggttatggtcctcatgtccctggcacagacacagccattgcctgctggcacttgatacctactcatattccatttctctattccaaacacactggattgcatggcccagggcgccacggtgtgcaccattgtctggcccacactcacctagaatacataccaggatctcctacccactccttaggtacaagaagaagaaggggttctggccgggcatggtggctcacacctgtaatcccagcactttgagaggccgaggtgggtgggtcacaaggtcaggagattgagaccatcctggctaacacggtgaaaccccgtctctactaaaaaacacacacaaaaaaattagctgggcgtggtggcaggcacctgtagtcccagctactcgggaggctgaggcaggagaatggcgtgaacttgggaggcggagcttgcagtgagccgagattgcgccattgcactccagcctcggcgatagagcaagactccgtctcaaaaaaaaaaaaaaaaggggggttctggccttaatctgcctccagctcagttataaggtggcttatctaaaggcttgggaggtggggcacccagccctacccacccgtccaggaagttccacacctggacaactttcagtttcattattttagcttcctgagattcagaggccaggaactgtgcagagatctgtggggattctcacaacttccatttctggtgaacagctgaggtcagagaggaggtgggtaccacttgagatgggcctgtggttcccgggtactgtctttccagacacctagaattcccaggttggtagtgaactgagagtcaaccaccatgatggggccagagacagaggaggaagcagtgagtggataagtgcct

SEQ ID NO: 17961 - DNA, 2300 bp, Homo sapien
ggaaatattgaagaagctgcctgttctgctctgggtggttcaaatacccacctgcctggtgaccactaagtgcctctgggggtcccactccagctgtgtgacaactgtttcctggcagccccctggggaaggaaaggtaggtgtagtccgagtaaagtgctccgcagtttccctgggctagccttttccttcctgttccctcactttcagttcagggtgccatgaactgccattcagagtcaggttggcatgccatgacatcatctgaccttgctattccagccctgccctgcatagagtggacttagaaagaagctgggtaaggagttgaaactacccagacaagacctcttggtgacatggagaatgggagtaaccgaggagacctcaagagccatttagttcaacctcctacagtaatattaagtagattcctacaatgcaacaggtgctttacatacattcttttgggttcccacaaccttggaggtggggtttcacaggtgtggaattggagattaagacaagtaatttgcccagggtcacactgccaataaaggagggcctaccccatgtctaccaggcagtaaagtctgtgcccttgcctttagacgatgcagatgtgaaaactgcagaccagagcctctcattcaaagccacacaagctgacctgagacagaaactcaggctccttactactgatggaggaatctatgatacgtagcctcttctcacgtcaggtgcggggcggccaaggatgtggcccggtccggggcagcctgggccaagcgtgactgagaaggagaaggcaggctccgttccgggccctccagaccctcatcccagccaatgttgtgaaaagcgctctcccaggagggcccagcagggcaaagggccgggctagtctgtttctggaggagccaatctggggccagggcggaggcagccaggtgcagtggaaaaatcctgcagttggggtcagaatatttgggtttcgatccagtctaggacccagcaaagacctacagaaagttacttacaagtccgagtctcctcatctgcaaaactggggcacggataaaatacacttgaagggcacagaagcaaaagttggaattgttacgcaccaaaattctatcatccgatctgaccatcacgtcacggtacaacttccaaccgtgcgtccccgaagaggccgggaacggagcccaggaaaaactacaactcccaggaggcgtcgggagggccggcccggagccagcggaagaaactacaactcccagaaggcgtcgggcgtgccggcgcggggcggtgacgtacggggaccggcgcggagcgctgattcggccggagctgccagcggggaggctgcagccgcgggttgttacagctgctggagcagcagcggcccccgctcccgggaaccgttcccgggccgttgatcttcggccccacacggtgagcccggaaggaaccaagaggccccagggctacgggaggggcgggagagaaggtgggggctgctggggaggcgccccgggctggagagacgggggcagagggagtggggggtggagggagtgcatcagccgagggggtgcatcggctggggaggtggccaaggaataaagtgcgagcgggaggccgggggtggaacgtcgggaggagcgcctcggctaggggtgggaggcggggagcggctcggcttcggggataaacgtttggctgcctccagggctgggtgaacgcgtggagatggctgtggggtcccggaccggaccgggttccgagtgcgaagacccaggctggggaacagagcgggacccctccccccggccccgcacccgaggtctcactcagaaaaccccaacaacagtgaggactccgcctcttcgctcctcctctcctgtgcttagtgcgggttcgcctgggcactcgctttccgctcctaccgccctcccccagtcggggtggctgggccaaagttgagaggttatcagctgtggtcctgcagcttggggggtgggcggaatggacatggcattgtgacgtgctgccccggactccccgttggggtccccatccaggcctggatgttttgtgctcctcttccagaagacaggaggtttgctgttgtgagggctgctctttcctgggggagggaatgggaagggctcacctggtggctgccctggtggtgctcagccttggcttgagtgtctggcatactggctgggcccggatatttgtatgtggagccaagagggtggggcgggaaggagggggaaagagctaccagc

SEQ ID NO: 17962 - DNA, 2300 bp, Homo sapien
tgacttccttagaatatgctaccaaaagtgtaattatggctctgaggcaagaagaatttttcagcttcttggcacacagtgacaagtgtttgtccaagggtttgtatgtcccccagcacgaaataagagagctgtcactcactctgaatagtgcttagggctattcacagctgaagaacgtttggggaagatatgataattatgagggccaagagagaaggagaaagatgacaacagggactcccgctaaataaagcagaaagtgatctgcaatttaccacaaacctagagtgagtcagaactctgttcattcctattgtgaaaaaaaaatcctcgataacaggagttattaatagtgcatgacatgttcagtaatctttctgttagactctgcattagtcagaaccttatttgagacgtggactcagtctgggtcactgaacttcatagagatgtcaggaaactgaccaagatccagagggatcgatcaacttgatggaggatgaagaatcccagagaaaaatcaaaggagtcaagcaggcacacttcggaaaaaacagagacacctttcttgccttaatgctggggaggtttctgtgaaaagaacaacactgggtttgcttatgtctgcagaaagatgactataaggaaaggcacctccacaaaccaggagaaacttccacaggacataggcagagctatttcagactcagatgattatttcgatcttggaatgagcccttttggggccattggccctggaaatattgaagaagctgcctgttctgctctgggtggttcaaatacccacctgcctggtgaccactaagtgcctctgggggtcccactccagctgtgtgacaactgtttcctggcagccccctggggaaggaaaggtaggtgtagtccgagtaaagtgctccgcagtttccctgggctagccttttccttcctgttccctcactttcagttcagggtgccatgaactgccattcagagtcaggttggcatgccatgacatcatctgaccttgctattccagccctgccctgcatagagtggacttagaaagaagctgggtaaggagttgaaactacccagacaagacctcttggtgacatggagaatgggagtaaccgaggagacctcaagagccatttagttcaacctcctacagtaatattaagtagattcctacaatgcaacaggtgctttacatacattcttttgggttcccacaaccttggaggtggggtttcacaggtgtggaattggagattaagacaagtaatttgcccagggtcacactgccaataaaggagggcctaccccatgtctaccaggcagtaaagtctgtgcccttgcctttagacgatgcagatgtgaaaactgcagaccagagcctctcattcaaagccacacaagctgacctgagacagaaactcaggctccttactactgatggaggaatctatgatacgtagcctcttctcacgtcaggtgcggggcggccaaggatgtggcccggtccggggcagcctgggccaagcgtgactgagaaggagaaggcaggctccgttccgggccctccagaccctcatcccagccaatgttgtgaaaagcgctctcccaggagggcccagcagggcaaagggccgggctagtctgtttctggaggagccaatctggggccagggcggaggcagccaggtgcagtggaaaaatcctgcagttggggtcagaatatttgggtttcgatccagtctaggacccagcaaagacctacagaaagttacttacaagtccgagtctcctcatctgcaaaactggggcacggataaaatacacttgaagggcacagaagcaaaagttggaattgttacgcaccaaaattctatcatccgatctgaccatcacgtcacggtacaacttccaaccgtgcgtccccgaagaggccgggaacggagcccaggaaaaactacaactcccaggaggcgtcgggagggccggcccggagccagcggaagaaactacaactcccagaaggcgtcgggcgtgccggcgcggggcggtgacgtacggggaccggcgcggagcgctgattcggccggagctgccagcggggaggctgcagccgcgggttgttacagctgctggagcagcagcggcccccgctcccgggaaccgttcccgggccgttgatcttcggccccacacggtgagcccggaaggaaccaagaggccccagggctacgggaggggcgggagagaaggtgggggctgctggggaggcgccccgg

SEQ ID NO: 17963 - DNA, 2300 bp, Homo sapien
aacagacagagatgaaaggactataacacacacagcaggtttctatgtaaatatgtgcttgtgatagggaccagatgactaacgacaaccttttttttctttttcttttttttttttttgaatcggagtcttgctctgtcgcccagcctggcatgcagtggcacgatctcggctcactgcaacctccacctcccgggttcaagtgattctcctgcctcagcctcccaagtagctgggattacaggcacctgccaccacgcccagctaatttttgcagttttggtagagatggtgtttccctcatgttggccaggctggtctcgaactcctgacctcaggtgatccacccacttctgcctcccaaagtgctggaattacagccgtgaaccaccgcacccagcctaacgacaaccttcccacacactcaagcccccacctctgcctctcctaaggagaagggacatttgattgctggaatggctggagctgtggaaggaggatgaagtattgggtggctgcagtgagccatgatcaagccactgcgctccagcctgggtgacagagcgaggccccgtctcaaaaaggtgtagggtggatgggaaagtatgtaaagaaaaagagagtgagcagggaccagagaggcagaggcaaggcttggctttgttctgtttcaagacatagagaagagatatttgggagcatctgtcatattgaatgagactttggggacacaagtggagtaatgactattttagggagttttcctaagtgtggaatggtctagtctcattcaccatcagcccctcaaggaaacgttcagtaaagatggaattggccgggcgcagtggctcatcctgtaatcccagcactttgggaggccgaggcgggcggatcatgaggtcaggagatcaagaccctcctggccaacatggcgaaaccccgtctctaataaaaatacaaaactagccaggcatggtggtgcatgcctgtaatcccagctactcgggaggctgaggcagagaactgtttgaacccgggaggtggaagttgcagtgagctgagattgcaccgctgcactccagcctggaggacagagcgagactccttctcaaaaaaaaaaaagatggaatttactcttcacagcattcagggttgcgtttctttttccatgagtggtactaagaagagcctcaaggtgggagcaggaaggctctgctgtgtcaggttatacctgcacatatgcatggccacatggcccaacactgtaagggccttgcttgtaagtcccttattctgtcctctagcaatgtgaccatgtaggcaacatttgaaattcctttaaaattccttctaggcagagatttaagctaagaggaggacctgagtgacctctggtgcaacatctgaaagcccacgacaagcctcctgggcttttccatgaatatcgccgtgcccctgcctacggatatgctgatgtgtgtatacaatattctgtgagaagcagagacgctgaacactaaacaacacaaacccatttggtctaactccatctctgcctactcagacatctgcttctagcggtatcagagttatgtctatgtagctaaaacaaatggagtaaggcagcaatacacacaggctgacaagcccaggatggagggcggcactgcagatgctctgctctctactggaatgtgtggacatacaggaatccctatcccaggacacccgcagacccccaccatgaatccgagatgctccccaatgacggtgatgatgacagaacagagatgccatccctggtcacacacacacacacacacacacacacactcccactgcctccctctgcacccctcccaaaggcacctgccttcctctcctctcaatccacaagccaacctccagctgccacctctctatcagccttggctacccccacccacgctggcacctgcctggcagctccctatccaccccctcagccctcaggaggccagggcacacgtggaacaggttgatgttgttctccaggaagtggagtgggaggggggtggggtcactagggcaggcggggtccccggaagcctctgtccctgcataaagcagcctgtcctggcaagggatggtcatcctctcaacctacagacccagtgagccctaggccctcaccccagacccagctgctggataggacccagccccgctcccaggtaagaacttgatgacagcagggaaggcaggggtgctctgaggacacaggaagatgggtggaccaagaagggaatggaactccccta

SEQ ID NO: 17964 - DNA, 2300 bp, Homo sapien
aagtagttctatgagtgcagtacatgtctgtaatcccagcactttgcaaggccgaggcaggaggatcacctgaggtcaggagttcaagaccagcctaatcaacatagtgaagccctgtctctactaaaaattaaaaaaaaaaaaattaaaaattagctggacatggtggctcgcacctgtagtcccagctactcaggagaaggaggcaggagaatcgcttgaaccccagagggggaggttgcagtgagccaagatcacgacactgtactccctagcctggccaacagaacgagattccgtttaaaaaaaaaaaaaagttttatgagtggaagaatttctctaaggattttggtccgtggagtcagactctcccccagtgtcttagtcaccccctgcccagcctggttccctcatccaccaagaattcatgaccaactgccagaagctttgtgttatgccgccagcctccctgatcctgagcaccttccaaagcctcactctattgctcatggatatactgggttgttatctgctgacttggttgttttctccttgtgatgtaaacttaatagagagatgagctaacaccctaactatctagaagagtaactcctttgattgttaaggatgaacataactcatctgttttcttccttaccattctcgcccaccttcagttgcagatatggtgttatgaagaggttctaatgagtttattccaatgatgattcaaaagtcctgttatccaccccccagccctggagggtgagaggacagttgaggaggaactggtcaaggcatgttccctaaaactagagcacatatctttccagttagcgagtggctgtttaacgcaaggaacatcctgcaatcctatgaaagaggatgcaaaagatatgcaggataccctttatatatgcaaaggaggaggtcaaaacatatttcctgccttctaggtccttacaacagggctagattgtcttgtagggtccgtgaaaggtctaaaactcaggacttccacttatgggagagagaaaagtttcaaggtagggagagagtttttgttgtgtgttctaagaaattgggagctatatccttcaccttgtttcaccttccctgcagaaccagtggggcagtcctttgaaaaataagtgggtagggtttcttgtccaatttgcttccccttaggtacaccactaagtaaaccatcattctctccttaggcacaccattattctgttccccatttcacaatgtctgtctggatgtataaaagccctctcaatgggctccctaaagcgtctgccagtaggggctcccaccctctttcctcaacactcccaatccaccgcagcccagagcacagtgtctgcttatctaaccatctgactcccccgtatactacattcttgagctgtttttcacccccctatttgctaaccgtgggccgtacatagggtggacccctatattttgttaaactggagtgattctacgcaaatgcacgctcctacctatcggcactcccagcctgcagaaattgtatgccttatgttcagcactaaactcaaatctaaccaaggaagtccggatcccatagggttcttcctactctccagttcggtttattttaaggccaacagccctagcttcacgtccctccttcacagccttctttccttccctcctgccggatgcgcccggcagccgttgagcacaagcccagcggatctggaaggagaccccgccgcgaccggggaaaattgagcgaacttgggcgcaaaacccgcccggcaactcgtgacgtcatctcgtcccgcgctcggataggctgtacccactccacgctggttgaggcgctcttaaagtcctttgtaacccagattggagcctgaggggacctctcgtggacgcccacagaaatgcactcgagaggaacataaaagcatcacacttaagcgctcgaaagaaagccccacgaacccataaaggctcctccccgctccttcctcgaagctcctccttcatcctgcacctcggctgtggatttatttcccctttgttgactcggccatcggcctgccgggcctggcgtttcccagaaggcccagcgccgggaaggggtttgcagctgctccgtcatcgtgcggcccgacgctatctcgcgctcgtgtgcaggcccggctcggctcctggtccccggtgcgagggttaacgcgaggccccggcctcggtccccggactaggccgtgaccccgggtgccatgaagcaggagggctcggcgcggcgccgcggcgcg

SEQ ID NO: 17965 - DNA, 2300 bp, Homo sapien
caagtatttaagcatcaaccttggtattaggcactgtaagggataggaagggaggataataagtgatctttctttcttttctttcgttttttgttttctgagacagagtctccctctgtcactcaggctggagtgcaatggcacgatcttttctcactgcaacctctgcctcccgagttcaagtgattctcctgcctcagcttcctcagtagctgggcaggcgcctgccaccacatccaactaatttttttgtttgtttttttggttcttttttttgaaacggagtcttgctctgtctcccaggctggagacagaggtgccatcttggctcactgcaacccctgtctttggggttcaagggattctcctgcctcagcctcccgagtaactgggattacaggcgcctgccaccacgcccagctaattttttgtatttttagtagagatggggtttcaccatgttggccaggctggtctcgaactcctgacctcaagtgatccacccacctcagcctcccaaagtcctgggattacaggcgtgagccaccgctccaggccaggtatttcttattattagagtatttcaaagagataaagaatgttgtgtcagaaagcttgagggtgtatgtgaagtcacagagcccagtagccaggatgtagacccagtcttcccaaattcaaacctctgctcctaccttcacacaacatccacctccatggtgtcttgacagggaacgggagacgtgtgttgattaggtcaatgtagtaggagattcattttatttctgttcagaagttcagagaaagtcagatttgtttttgatcaaataatgaaagagaaagggtcttaaagaaaaagttggctaggtacagggctcacacctgtaatcctagcactttgggaggctgtggcaagaggattgcttgagaccaacctgagcaacatatggagacaccgcctctgcaaaaattaaaaacctagctgggcgtgatggcatgcacctgtagtcccagctacttgggaggctgaggtgcaaggatcacttgggcccaggaagtcgaggctgcagtgagccatgatcgtgccactgcactgcagcctgggcgacagagcaagactctgtctcaaaaaaaaacaaacattaaaattgaactggtctttgaaagatgggtaggattttcacaaggagtaaaggcttttcagacacacagggtgcgtgagcaaaatgttagattgcttacaatatgagagacactaaagtttcttttgaaaatcactaaaaatactagtaattaacatatataaaatgtgtcatgtaccatgagagaggctttcaggcatttaaatctcagtggcaggaaggcgtagagagctggaagagaggtctcgggctgttggtgagggagcgcagggagagagagggcgggagtgaaggcatgtttgggagaaggcctgcaaccagccctctgccctctgccctcacacacctttgccgtacccctgtcaccacccagcttacagaatcacctggggctctgatgaagctgtagattccgattcagagagtctgtgttcctaacaggccttgggtgatgccagtgctgctggtggcacagagcgctctgaggagggcggtgctggctcatcctgttcaaagcggaggtcagctagcattcattcctgcagccaccttgtctcttgtaaacttgaatgtctctctccgcccattttcaccctccctgtctttacttaacaccagcttcactacctgtgttttccatcacactccttcctctctcttctagccttggcccatcacctgtttgcttcagtctccgggaagaaaacccccagccctgctgcttcctctctcaggcggccgttcctgtctcccctggctccctccccaacagtgcactggccagccccttccctccagtgttctctctgctccttctcaccacctgggcctcagcagagcactctgagagcttctctgtcgatagtaaaaccctcattctctccttgagtgaccttgtttgctttcccagcttcagcgctcgcctgcatgatgctcttcagcctgtacattactaactccgttactctgctggcactgccaccgcaaggtcccacagacttggcggcttaaacaaccgaaattgatttcatcacaattctggaggctctaagtccaacagcaaagtgtgacacgattggtttcttctgagggcctctctcgtctgcttgtcgatggccgtctcctggtgttttcacatggtcttccctctgtgcgtgt

SEQ ID NO: 17966 - DNA, 2300 bp, Homo sapien
aaaaaaaaagtgcctgacatataagaggtgtgcaatgcaatagttgccaggcaacatgtttaagaatgtggagctcctgccttccatggtcctgttaaaaacccaccctcaaggccaggtgcagtggctcatgcctataatcccagcactttgggaggccgaggcgggtggatcacctgaggtcaggagttcgagaccagcctgaccaccaacatggtgaaatcccacctctactaaaaatacaaaattagatgagcatggtggtgcatgcctgtaatcccacctacttgggaggctgaggcaggaaaatcactagaaccagggaggcggaggttgtagtgagccgagatcgtgccattgcactccagcctgagcaatgagcgaaactccatctcaaaaaaacaacaacaaaaacccaccctctactcccagggagctgggtacagagctgggccacatcagtgcaaggtgctgagccacagagctaaggcggagctgcaggaccgcggaccagataacagtgtgtgagatcagtgtgtgagatcagacgtccctgccattggtgaccaccagggggcccccaagcaccagagatggccccatccagtcaccacatccacttctcatccagagatgtctgtttcttggcacgctggggtaaattaggacagaaggtgacagtcttgggtgtggtcagtcagactgccccaggcaggccttgtggcctgtagaaaacgttcaggcctaggccgggcacggtggctcacgcctgtaatcccagcactttgggaggccgaggcgggtggatcacgaggtcaggagatcgtgaccatcctggctaacacggtgaaaccccgtctctactaaaaatacaaaaaattggccgggcatggtggcgggcacctgtagttccagctactcgggaggctgaggcaggagaatggcgtgaacccgagaggcagagtttgcagtgagccgagatcgcgccactgcactccagcctgggcgacagagcaagactccatctggaaaagaaaaagaaaacgttcaggtctgagccagaggcccaggctgtaattctgtcacttaccatgaccttgggcaaggcacttccttccctggcccagttcacggggttggaatcgactccaaggtcccttccagcattaacgctgcatggttctaagatgagaagatggggcagtttcccctctctcaccccagcccgtgtccacttcaaggtgaatgaccagggaagtcacgtgtcccaatcccgcagttccaaagcccttggggaccctactgtcagggtcgtgcacgaggaggtgaaggtcaggtgagccaatcgcctcgaagggtcttgcctcattcgggacagacatccggtttcctctggctctaccgggattctaggggctttagccgaatgagtcatggggggcgggggggtttctgggggagttcccagctaatcaacttgggacaggacagcctggaactttcgatggtgcctatccaagtgtggggtgggcacagcagccaagacccaatgtccttatctcaggtaggggctcaggaggtctcccagacaggcagcctccggagagtttgggggtaggaatgggagcaaccagcttctttttttctctcttagaatttgggggcttgggggacaggcttgagaatcccaaaggagaggggcaaaggacactgcccccgcaagtctgccagagcagagagggagaccccgactcagctgccacttccccacaggctgctgccgcttccaggcgtctatcagcggctcagcctttgttcagctgttctgttcaaacactctggggccattcaggcctgggtggggcagcgggaggaagggagtttgaggggggcaaggcgacgtcaaaggaggatcagagattccacaatttcacaaaactttcgcaaacagctttttgttccaacccccctgcattgtcttggacaccaaatttgcataaatcctgggaagttattactaagccttagtcgtggccccaggtaatttcctcccaggcctccatggggttatgtataaaggcccccctagagctgggccccaaaacagcccggagcctgcagcccagccccacccagacccatggctggacctgccacccagagccccatgaagctgatgggtgagtgtcttggcccaggatgggagagccgcctgccctggcatgggagggaggctggtgtgacagaggggctggggatccccgttctgggaatggggattaaaggcacccagtgtcccc

SEQ ID NO: 17967 - DNA, 2300 bp, Homo sapien
ggtggctgaggtcaggattttgagaccaccctggccgacatggcgaaaccctgtctctactaaaaatacaaaaattagtcggatgtggtggcacacgcctgtaatcccagctacttgggaggctgaggcaggagaattgcttaaacctgggaggcagaggttgcagtgagctgagactgcgccattgcactccagcctgggcaacagagcaagcctccatctcaaaaaaaaaaaaaaaaagaatctttgttgaggaatacagattgagcttgaacttgtgaactaggatattgggccctggctaaaggcctccatgtttatttatttatgtattttggtagagctgagagtctcattatgttgcccaggctggatttgaactcccgagctcaagtgatcctcctttctcagcctcccgagtaatttactcttattcctggttgtaaatgttagggatgaccagtccatagcatggggagggatgagggctatgcataagaaggctcagacattggagcctccagaggtgggtaacatttgctttcgggtttctcactgggggaaggaaaggctatggccaaagccctgggcataatttatatatggatctttgggataagcaagatttaaacaacaacaacaacaacaacaacaagaaacttaaaaaaacaagtttttaatttacaggaaaaaaatggaaggtaatagagggtccccacatattctgcacccaatttctctttttattaacatcttagcattagtattatgcatttgtaacaactaatgaactaatattgatacattattattaattaaagtccaccctttatttagatttccttagtttttacccagtattctttttctcttccatgatcgcattcagaaaaccacattacatttagtcatcaggtctccttagccctcttagttgtgacagtttctcagaattcctttgattttgatcaccttcaccttagtttcctctttactttcccttgtatccaagctgtatggagggcctggagattctgataggactgtaagattcggggacggtgatatgtgtgcaactaaggcacctcggtgtcgcttttagaatatagttgtggaaatgagaatagctctggtagctccaggggcttaggagaacagaaagagcccaggaaaggagaaagaccttattgctgaacgccacacccttgcccccacgccacacccttgccgcacctactaactaggggctaacgaatgaaagggtgtcggaatatgatggagaagcccggtcgacagtgacgtcgtgggcgacgccgggttgtgagcggcctttcgagctccctcgagtccctgagtctctgtagtgcctcagctcctggatgtcctcccttaaaggagaagaacaatgcgggccgactagacgagtcccttagtttcctcgccggcgcagacaaatacggtttcagtccaaggaactaccattcccagaagacagcggggcgttccttgctgcatttctattggttggcgtttgttactcccagccaatagaaagtgagcttcttgacaagtgccaaaatggcgatgcctaccacctagaactggattgtgcggtaggcttaaatttggggaggtggtggatgaaaaggaaattgggaggtatagttacagggctggagaaggtggaggaaatgagggagcaaatctggacttggaatggtggtggccaagggacgcttttagagctaagggcgtaattaggcaaccaggactgccttaactccttgatgccctgtttaatctattagtccctttgatacttctttattcatttatttgagagacggagttttgctcttgttgcccaggctggagtgcaatggtgcgatctcggctcaccccaacaacctccgcctcccgggttcaagcgattctactgcctcagcctcccgagtagctgggattacaggcatgcaccaccaagcccggctaattttgtatttttagtggagacgaggtttctccatgttggtcaggctagtctcgaactcctgacctccggtgattcgcccgcctctgcctcccgaagtgctgggattacaggtgcgagccactgcgctcggccgatactttcttagtgccccagtttaaggaagggcggttcaggaggagagagtctgacaggatcttactttatccctttagctctttttctttcaaattcctctgtctcgcttaaatcttcccgcatcttctcctttctatttaattctgccttccccggttctccttagaacctc

SEQ ID NO: 17968 - DNA, 2300 bp, Homo sapien
agagactgaggagaagcagggtttgtggcagtctcaagtatgagtggagtggccgggggtcatctggaaggtgaggtgaggaatccgtatttccctccttcctgctttagaagctttggcaacatatatttggcagctgttttgtatacacactattccccaatggtgtcacttgggcaggcacaaagggagcctaagagaggggtgtggattgaatgtatggggaggaagaaaggccataggcagtaccaaccgcaggaggacatgatctgaccctccttcagccacactctcccctttggaacagaagttcttgactccctgtttagaccattctccagacacccagggcgctgtaattctctgcccaaatggccacagttttgcttccagagccttaagtgggctgctctcccagatttatcctcccgaggactgattttgccactcaaagggtgagcaaagaatggttgttggaggctaggcacggtggctcatgcctacagtcctagcactctgggaggccaaggtgggtggctgaggtcaggattttgagaccaccctggccgacatggcgaaaccctgtctctactaaaaatacaaaaattagtcggatgtggtggcacacgcctgtaatcccagctacttgggaggctgaggcaggagaattgcttaaacctgggaggcagaggttgcagtgagctgagactgcgccattgcactccagcctgggcaacagagcaagcctccatctcaaaaaaaaaaaaaaaaagaatctttgttgaggaatacagattgagcttgaacttgtgaactaggatattgggccctggctaaaggcctccatgtttatttatttatgtattttggtagagctgagagtctcattatgttgcccaggctggatttgaactcccgagctcaagtgatcctcctttctcagcctcccgagtaatttactcttattcctggttgtaaatgttagggatgaccagtccatagcatggggagggatgagggctatgcataagaaggctcagacattggagcctccagaggtgggtaacatttgctttcgggtttctcactgggggaaggaaaggctatggccaaagccctgggcataatttatatatggatctttgggataagcaagatttaaacaacaacaacaacaacaacaacaagaaacttaaaaaaacaagtttttaatttacaggaaaaaaatggaaggtaatagagggtccccacatattctgcacccaatttctctttttattaacatcttagcattagtattatgcatttgtaacaactaatgaactaatattgatacattattattaattaaagtccaccctttatttagatttccttagtttttacccagtattctttttctcttccatgatcgcattcagaaaaccacattacatttagtcatcaggtctccttagccctcttagttgtgacagtttctcagaattcctttgattttgatcaccttcaccttagtttcctctttactttcccttgtatccaagctgtatggagggcctggagattctgataggactgtaagattcggggacggtgatatgtgtgcaactaaggcacctcggtgtcgcttttagaatatagttgtggaaatgagaatagctctggtagctccaggggcttaggagaacagaaagagcccaggaaaggagaaagaccttattgctgaacgccacacccttgcccccacgccacacccttgccgcacctactaactaggggctaacgaatgaaagggtgtcggaatatgatggagaagcccggtcgacagtgacgtcgtgggcgacgccgggttgtgagcggcctttcgagctccctcgagtccctgagtctctgtagtgcctcagctcctggatgtcctcccttaaaggagaagaacaatgcgggccgactagacgagtcccttagtttcctcgccggcgcagacaaatacggtttcagtccaaggaactaccattcccagaagacagcggggcgttccttgctgcatttctattggttggcgtttgttactcccagccaatagaaagtgagcttcttgacaagtgccaaaatggcgatgcctaccacctagaactggattgtgcggtaggcttaaatttggggaggtggtggatgaaaaggaaattgggaggtatagttacagggctggagaaggtggaggaaatgagggagcaaatctggacttggaatggtggtggccaagggacgcttttagagctaagggcgtaattaggcaacca

SEQ ID NO: 17969 - DNA, 2300 bp, Homo sapien
gtggggggtttcatgacaaggacggaaaaggagctgaggatgaactcaatctgagaagagctagcagcttcaagaaatgggtgggcagggtgagtggggtgggaggacagatgaggcaacacagggacagtggctatacgcccagacacgggctggatcctggcacctggggagaggcctgctttgaaagcagtgtgcccttcactttgccctgcccagacctgtcaccagtccatactgggagcccaagaaaaagagagaggtaaaaagaagatgggggtggccggggacggtggttcatgcctgtaatcccagcactttgggaggccaaggcaggaggagcacttgaggccaggagttcaagactagcctggccaacatggtgaaaccccttctctaccaaaaaaacaaaacaaaacaaagcaaaaaaacaaaaattagctgggcatgctagcacatgcctacaatccccgctacttgggaggctaggacatgaaaatcccttgaacccaggagacggaggttgcagtgagccaagattgtgccactgcactccagcctgggcaaaagagcaagaccctgtctcaaataataataataataataaattttaagaaggagaagatgggactggtaaacccttgtctttgagtgctccactctgcccctcaggaaaaaaaaaaagtggaacaggaggcacttcattttctatggctctgggtttaggatttcagaaagtcgtcaccacccaacattatagggccttgcatcaaagagagatatggtggggaaagccagaatggaagagagacaaaaccgtagcaccttcctcctccccctctggacaccatcactcctgccctgatccagattaccgctggccctccccactgcctcctagttctgcctttgtgatgcagagtataaatgtatctcatgcattgggattccctcccagctccttgagcagcccaatcccaagggactagttccatacagggtagagtacagaccctgagcactacatactgcagccttgctccccagggttccggccaaacctgatcaccgaggaggtggcatcgactggcagacagccaccctcagtgcacctcattccactcactgcactgactctgcacactgcagcctcctgccccacactgcagctgttgcttgtctcctgtgagcccagactgaacacaggttcgcttactgcatggaggctccgtacgctgcagcctcaattccccattacagctgccactgcacaccacaggctcccttcacccatggcatgccctcaacaccaccactgcactctgcacgccataggtttcatcccagctgctcttctcatctccatggttccagggaccccaagagaggtaccctcccctccgccaagcattacgaactccagtaccccctgtgaaagaagtggttccaacagcactgaggatgcaggtggctgagactaagacatgagcaagggcagcccaacttgggtaagctgtggctcagaatcccacactcgccaagtgactctgcccagtataaactgggcgattagccgagcagctccccctaacacacacacacttacacacacacacactcacacacacacccctccccaagagcagactatgtagccagggccccaccctgagagccgtgggaaggctgtggcccccgctggtaaaactgggctaatgacagcaggggaaccggcggggccaggggggtgctggggtaattagggctcggcctggcgctaggagatcctgagatgaaaggtgctctggcgtcactgggttggttttatgtccatgaatgcaggtgtgtggtgtgtgtatgtgtgtgctgggggtggggctggcatggtggagacctctcctttgggttgggttagggggtccatttgtatgcagcccaccgtcttccttagattgactctggtaccatttggatttttgtgggagcaaacatggggggaaataccaccacccgggagctaggaattgagggggtatggcagatcttgtcccctccccgagctcaggagagggagcagattgttgggggaaatggctggtgacagagaatagaaagagcctatatggagaagggtgacgttggaaaagggaggcagtggatcggtattgatgttagaaatgagaggggagggaggtaacagggaatgaacccccacaaggatgaaaaacgtaagatgattgaagttaaaaggacatcaggggtcacctgcccagccctcgcagctgaagcttgaggaagct

SEQ ID NO: 17970 - DNA, 2300 bp, Homo sapien
taataataataataataaattttaagaaggagaagatgggactggtaaacccttgtctttgagtgctccactctgcccctcaggaaaaaaaaaaagtggaacaggaggcacttcattttctatggctctgggtttaggatttcagaaagtcgtcaccacccaacattatagggccttgcatcaaagagagatatggtggggaaagccagaatggaagagagacaaaaccgtagcaccttcctcctccccctctggacaccatcactcctgccctgatccagattaccgctggccctccccactgcctcctagttctgcctttgtgatgcagagtataaatgtatctcatgcattgggattccctcccagctccttgagcagcccaatcccaagggactagttccatacagggtagagtacagaccctgagcactacatactgcagccttgctccccagggttccggccaaacctgatcaccgaggaggtggcatcgactggcagacagccaccctcagtgcacctcattccactcactgcactgactctgcacactgcagcctcctgccccacactgcagctgttgcttgtctcctgtgagcccagactgaacacaggttcgcttactgcatggaggctccgtacgctgcagcctcaattccccattacagctgccactgcacaccacaggctcccttcacccatggcatgccctcaacaccaccactgcactctgcacgccataggtttcatcccagctgctcttctcatctccatggttccagggaccccaagagaggtaccctcccctccgccaagcattacgaactccagtaccccctgtgaaagaagtggttccaacagcactgaggatgcaggtggctgagactaagacatgagcaagggcagcccaacttgggtaagctgtggctcagaatcccacactcgccaagtgactctgcccagtataaactgggcgattagccgagcagctccccctaacacacacacacttacacacacacacactcacacacacacccctccccaagagcagactatgtagccagggccccaccctgagagccgtgggaaggctgtggcccccgctggtaaaactgggctaatgacagcaggggaaccggcggggccaggggggtgctggggtaattagggctcggcctggcgctaggagatcctgagatgaaaggtgctctggcgtcactgggttggttttatgtccatgaatgcaggtgtgtggtgtgtgtatgtgtgtgctgggggtggggctggcatggtggagacctctcctttgggttgggttagggggtccatttgtatgcagcccaccgtcttccttagattgactctggtaccatttggatttttgtgggagcaaacatggggggaaataccaccacccgggagctaggaattgagggggtatggcagatcttgtcccctccccgagctcaggagagggagcagattgttgggggaaatggctggtgacagagaatagaaagagcctatatggagaagggtgacgttggaaaagggaggcagtggatcggtattgatgttagaaatgagaggggagggaggtaacagggaatgaacccccacaaggatgaaaaacgtaagatgattgaagttaaaaggacatcaggggtcacctgcccagccctcgcagctgaagcttgaggaagctctgcccccgacagcagtggcgatttgtcaaggtcacacagtgagttaccggcggagaagggacccgaactcccaaacaaactacacctgcaagcgtttggtgtttagactttctccccgatgtataaggtgcaggctgctcgtcgatacttcctcctccaccctcacggtgcacacccgaaaaccccccaattctcccggcaagcaaaggctattttttaatgacatcttttccaaaatatgtcaccaagtacccactcctgcgggagccgcccgggctggggagggcgagtccgagcggggcggggcagaggcggccgaggggcggccggacctctggcgggggtcccggggcgcggcagggggcggggggcgggggcgggcggcggcgaggcggcctgcagggagcagccgcgagccggccgggcgcgccgagcccgagccccagccggagcggggcgggggagggaggagccagagcggccgccgcctctgccggaggagccgcggggccgccacactcgccccccgccccccccgcgctcactcgcactcacacccgggcgcaggaggcgggcggcccgggcccc

SEQ ID NO: 17971 - DNA, 2300 bp, Homo sapien
cgcgatctcaggtcactgcaacctctgcctcccgggttcaagcaattctcctgcctcagcctcccgagtagagtagctgggactacaggcgtgcgccaccacgcccagctaatttttgtatttttagtagagacgaggtttctccatgttggccaggctggtctcaaactcctgacctcgggtgatccacctgcctcggcctccccaagtgctgggattacaggtgtgagccaccaccacacttggccttttttttttttctttgagatggactctcaccctgttgcccaggctgttgtgcagtggcatgatctcggctcactgcaatctccatctcctgggttcaagcaattctcctgcctcagcctcccgagtggctgggactacaggcgtgcgccaccacgcccagctaatttttgtatttttagtagagatggggtttcaccatgttggccaggctggtctcgaactcctgacctcaggtgatctgcccacttcagcctcccaaaatgctgggattacaggtgtcagccaccacccccggactcccatattctttttctctaccttttcggtggctttcatgtttcccaggcatccatcaataccatcccaggagctgcctgtggagaagggcttcctatgtgaagaaaaccctctctagaagcactgggactggggaggaattagcgggagcagcaggtggctcaggctccctctcccttcgctgcctaagaagcttccatcccctccatgacccaagccctctaacatgatagatctcctctacttgagatctgttattactcatgggacagttgctgctctgaagcgaaatactggctgttttttgtttgtttgttttggagacagagtctcactctatcccccaggccggagtgcaatggcgatctcggctcactgcaacctccacctcccgggttctagcgattctcctgcctcagcctcctgactagctgggattacaggcacccaccaccacatccggctaatttttgtatttttagtagagacgtggtttcaccgtgttggtcaggctggtctcaaactcctgacctcaggtgatcaacccacctcagcctcacaaagtgctgggattacaggcatgagccaaagcacccggcaatgctggctgtttctaacccctgttcagtatttcacttgtacatctacccaccttcccattcggggtgggcagatgaaactagcaatggacgtctgaccttgggtcggtcacttctcctaagcttcctgttccccactagtaaaaagagggaggcttaagatgatctacatgttcccctctgagtagtaatcttctgtggaattcatattttatcctccagcaccgaggggcaggggtgtcactctgcccccaccccctgcctcacctcttccccattactttaggacctcaaagcactttcactattagttcccctctgttgtcctttttatttcccagacaaagggaaatgactcaccccaaagtcaactggagtgggtggaatggtgtcatacaagcaaacagggagtccctacagacatccctacctctgtgggaactccttcccctggaggtgttctccctaaggcgagtagaagggaaagggggtcacatttcctttccttctctggactttgccctgaagcagagggcagcctaagctcctgactccagggaaatctccctccccggcttctctctctcccggtcaccagtaacctcaggacgaggtcagtcctgcaatcacgtgaagccctcacgtttgcaaggtttgcagaaagggcctcttagctttgatctcccagacagcaaacaagcttgccagtccctccccagaaattcacatgcccctgccatacaggctttctaaacacgccaccctgactcttcagcgcaccccaccccaccccactctcagctcctcccaggtcccggcaagcgctttgccaggcagaaaggggaaaggcacgcagtccgcccactttgtcggtggactacaaatcccgacagtcttgtcgttgcgcaggcgcgcaagagctcaacgtgccggctgttggaaaagtgtgtcactggggcacgaggcgctccctgggatcacatggtacctgctccagtgccgcgtgcggcccgggaaccctgggctgctggcgcctgcgcagagccctctgtcccagggaaaggctcgggcaaaaggcggctgagattggcagagtgaaatattactgccgagggaacgtagcagggcacacgtctcgcctctttgcgactcggt

SEQ ID NO: 17972 - DNA, 2300 bp, Homo sapien
ctcggctcactgcaagctctgcctcctgggttcacgccattctcctgcctcagcctcccgagtagctgggactacaagcgcccgccaccatgcttggctaattttttgtatttttagtagagacggggtttcgccatgttagccaggatggtctcgatctcctgaccttgtgatccgcccacctcggcctcccagagtgctggggtaacaggcacgagccacgacgtccagccttggacatacattttgaaaggcaatggggtgacaaagagaggaagactgggctgggcgcggtggcttacgcctgtaatcccagctttgggtggctgaggtgagcggatcatgaggtcaggagtttgagaccagcctgaccaacatggtgaaaccccgtctctactaaaaatacaaaaattagctgggcatggtggtgcatgcctgtaatcccagctactctggaggctgaggcaggagaatcgcttgaacccgggaggtggagaggttgcagtgggctgagattgtgccactgcactccagcctgggcaacagagcaagactccgtctcaaaaaaaaaaaaaaaaaagagtaagactgtagaagtggtatttgggtgtttgggtgggaggaattcgggagcttgatttttagatgtaagtttgaaatacctaggccgggcgcggtggttcacacctgtaatcccagcactctgggaggccgaggcgggcagatcacgaggtcaggagatgagaccatcctgactaacacagtgaaaccacgtctctactaaaaaatacaaaaaattagccaggcgtagtggcaggcgcctgtagtcccagctactggggaggctgaggcagaatggcgtgaacccgggaggagctcgcagtgagccgagatcgtgccactgcactccagcactccagcctgggcaacagagcaagactccacctcaaaaaaaagaaatacctattagacatccaactgggtatgtatactagacagttggatatatgattctggagttaggggatgagtccagaaagaaatataaattacggagctgtcagcgtagagatggtgcagaaagtcttgacgctgaaggctgggcacagtggctcactcctataatcccagcactttgggacgcccaggtgggaggatcgcttgagcgagttcaataccagcctgggcaacaaaggctggtattacaaaggcccgtctctacaaaaaaataaaaagttagccaggtgtggcagcccaagcctgttgtcccagctacttaggagactgaggtgggaggatcacttgagccctggaggttgaggctgcagtgaaccataattgtgccactgtactctagccttggggacacagcaagaccccagtgccacaaacacacaagccttgacatggaaagagatcaccacattctatgtgccctctcatccctgctcactccattacttggtgtccctaagctcaatacttcccttgctgatctgaggccatacagtctggtgaaagagggccggactcttggcttcttaacacattcacatacgtttgtttaaaatttccagtgtttcatgctttcagcccacaaagcacagacacagttttaatgagaggttttcacatcaggccagagaatgtcagtcttctccatctccatagagattttaaaaagcacacctcagacaaaaaagaaaaacaagcaattaagactatttcagggctgggcacggtggctcacacctgtaatcccaccactttgggaggccgaggcgggcggatcacctgaagtcgggagttccagaccagcctgaccaaggagaaatcctgtctctactaaaaatacaaaattagctgggcgtggtggcgcgtgactgtaatcccagctactcgggaggctgaggcaggagaatcgcttgaaccccggaggcggaggttgcagtgagctgaatttcaccattgcactccagcctgggcgacagagtgagaatccgtctcaaaaaaaaaaaacgtttttttcacaaggaattctgaggacttgttggctcaattgcttggacataaagacacacatacatgaagctggagagataggaagaagcgctcaacacagaacaccctaagtatccctactccctttcaaggactaaatcccttcagagatttcctttgcttcagtccttcaggagcctcccgaagatgctaggagtcgtttaagaaggctggaagatggccgttgggaaggaactgttggtagctggcaatacttcatcccaaggaggcggtggcaa

SEQ ID NO: 17973 - DNA, 2300 bp, Homo sapien
gagctcgcagtgagccgagatcgtgccactgcactccagcactccagcctgggcaacagagcaagactccacctcaaaaaaaagaaatacctattagacatccaactgggtatgtatactagacagttggatatatgattctggagttaggggatgagtccagaaagaaatataaattacggagctgtcagcgtagagatggtgcagaaagtcttgacgctgaaggctgggcacagtggctcactcctataatcccagcactttgggacgcccaggtgggaggatcgcttgagcgagttcaataccagcctgggcaacaaaggctggtattacaaaggcccgtctctacaaaaaaataaaaagttagccaggtgtggcagcccaagcctgttgtcccagctacttaggagactgaggtgggaggatcacttgagccctggaggttgaggctgcagtgaaccataattgtgccactgtactctagccttggggacacagcaagaccccagtgccacaaacacacaagccttgacatggaaagagatcaccacattctatgtgccctctcatccctgctcactccattacttggtgtccctaagctcaatacttcccttgctgatctgaggccatacagtctggtgaaagagggccggactcttggcttcttaacacattcacatacgtttgtttaaaatttccagtgtttcatgctttcagcccacaaagcacagacacagttttaatgagaggttttcacatcaggccagagaatgtcagtcttctccatctccatagagattttaaaaagcacacctcagacaaaaaagaaaaacaagcaattaagactatttcagggctgggcacggtggctcacacctgtaatcccaccactttgggaggccgaggcgggcggatcacctgaagtcgggagttccagaccagcctgaccaaggagaaatcctgtctctactaaaaatacaaaattagctgggcgtggtggcgcgtgactgtaatcccagctactcgggaggctgaggcaggagaatcgcttgaaccccggaggcggaggttgcagtgagctgaatttcaccattgcactccagcctgggcgacagagtgagaatccgtctcaaaaaaaaaaaacgtttttttcacaaggaattctgaggacttgttggctcaattgcttggacataaagacacacatacatgaagctggagagataggaagaagcgctcaacacagaacaccctaagtatccctactccctttcaaggactaaatcccttcagagatttcctttgcttcagtccttcaggagcctcccgaagatgctaggagtcgtttaagaaggctggaagatggccgttgggaaggaactgttggtagctggcaatacttcatcccaaggaggcggtggcaatagctccctgggcagcagacatcatggattttcctccctctgggaaccagaggtccctccgtttctggtttgaatcccttagagacaaagaacttcattctctcccatacccgcgtgggactgctggggaggagagggggtggaggggttagacttctacccccatgaaacacccgcgggctcaaagaggagcctggatcctgactggtccaggaggcgtgcggggccgcggggcccctccggcttgggccaggcgcgttgccaagatgcccggggaaggggccgcccggcgcaggccggggacgtggagcgctcggggcgctcccacgtaggccacacattggccgcctgtatcctccttctttcctctcaactccattctctcgcgcttttttcccggggagcctccgctttccccttcttcccgcggccgccctcgcccttcttccccctccagaccctcccccggctcgcccctccctcggcagcccaccttcaccccgctcctccgcgcgctcctcggtcctcgcccctcagccccggcctcccctcgccggcccccggcccccgcggtcccctccctgcccccctcgaggcggcggcggcccctttcacaatagcgcggcccgcctccctcctctcggctcccggtgcactcccgcccgctcccctccccgcgcatgcgtcctccggttggcggcggctgcggcggtggcggctacgagcggctccgtttttttaaagggaaacgctgaggcgccgggggtgactgtgggggagggggaccccgagccgcggagacccccgggagaggcgacagaccccctctcccggagtaggagggctttgggcggacccagccctccaccccct

SEQ ID NO: 17974 - DNA, 2300 bp, Homo sapien
aggaaagtcgtttattatttctttacttctgaggagcttggacgacacaggcttgtttttactgcagcagtagttaagggcatctctgcgttaaaacatattccttcagatatgagggaagctggggtggggggtattactgtgctagcataccttacagctgcctaaaaataaacatggtttctacaattgttgtgttcaggctgcagcagtctctctctccctctctccctccctcttcctccctccctgtctctttccctttctctctctctctctctccctccctccccgccgtcctcatctctccctctctcctctttctctctggcgtcgtgtgcgctaagagctgagcaagggagcaagcggctattcattttgtttgctttccaaatgaatctcatcgggtggctgttttattggagaatgcattctgcaaggtggattgggagctggggcaggtctcattaaaatatctcatggtgttgatttgtggaagttactcaacatggaggtggcactgctcagactgtactgcagtctaggggtgtgatggtaccgtaattacaacacatcatatccttgtatggggggagtgggaagagaaggaccagtgaaggagaaaaaaatcaaggaaatgtcacccacaaatggtggttaagggctgtgaatcaaaacatatacaaggagatgaaatgagagtatggctgataggggggttctctgctgattgtggaggtttctgctcagttcctgaggtaatggcccctttgcaggctttcctagtcaggaaaagtggggtgagttaaggatagagtgtcagtctgaacttggtactcactgcttctgttgtgtattgcaatcttaatattgcttaagcttgtttcacttattccagttgttgtttggccttgtctgaaatctatgcaatgaatgtaatgaaggcagcgttaaacatcactgtctaacccagataaaattcttgtaatagagtataagtagcacaacaccttttctcaaaactaaactaacacaaagttttcaatactaatagagttccattttctgtttagttttttagtccttccttttaactaaaactaaaggaactttgattttaataaatatttagatgaataggtataattttttgtgttacctcaaattcaaaggaatgtgtttatgtcatgattgttggaattatgggtactgatttctattttccaaatgaaatgttcattgttttaaaagtaccccctcccacacatacccctttcaaataacactgccattcctggtggcactgtatgagctcttaattccttctcaatgtactgtttgcactttgctgttgtgtatagagctttggagtagaagtagagaggatagaatttggacaatctcagggcctcttaaaagatcatgtaggctgggcgcggtggctcacgcctgtaatcccagcactttgggaggcctacgcaggtggaccacgaggtcaagagatagagaccatcctggccaacatggtgaaaccctgtctctactaaaaatacaaaaattacccggtgtggtggcgggcgcctgaaataccagctactcgggaggctgaggcagggaggcggaggttgcagtgagccattgcaatccagcctgggcaacaagagcaaaactccgtctcaaaacaaaaacaaaaacaaacaaacaaaacatgtatacaattaattctggaaactcccgaaccaacttggagccacacaggtagcagtagcagagaccatgccattaaaaggcatgttacggcccttcccagtggagaggatctccctacagaagaatgaactacaaattaccccatgcctcttcccatctaggttagcccttaaaatttaacagtataccttctcttctctattttgtttaaggaaaactgttcagattaatgtctgcctatttaaaaagttgagttgatgtggtccatagaaagaggcagaagactatactgattcctaaatggggctaagtatctgtgtgtttaattttttatgtgttaagtctgcattttgctactctctcttttagctccttgctcggattgaacgtatggaaaggcggatgcagctggtaaagaaggataacgagaaagaaaggcacaagctgtttcagggctatgaaactgaagagagagaggaaacagagctatctgagaaaattaaactggagtgccagccggagctttccgagacatcccagactctgcctcccaagcccttctcatgtgggcggagtggaaagggacataa

SEQ ID NO: 17975 - DNA, 2300 bp, Homo sapien
ctactcaggaggctgagataggagaattgcttgaacccgggaggcagagattgcagtgagccgagatcatgccactgcactccagcttgggtgacagagcaagactctgtctcaaaaacaaaacaaaacaaaacaaaaaatttactatgggcctattttatatactgctaagcctgggctgttcctgctcatgactgctaaatgagcaccagacatttaggtacctgaatacttgtcattttggggcaaaagaaccagcttattcttttgctccagaatgtgttcaaattagattttattcaagtgtcaataaattttataatgttttcttccctatctaataggaaatccccatttggaagtacagaaagaaagactcctgttaaaaagctggctcctgaattttcaaaagtcaaaacaaaaactcctaagcactctcctattaaagaggaaccctgtggttccttatctgaaactgtttgtaaacgtgaattgaggagccaagaaaccccagaaaagccccggtcttcagtggacaccccaccaagactctccactccccaaaagggacccagcacccatcccaaggagaaagccttctcaagtgagatagaagatttgccgtacctttccaccacagaaatgtatttgtgtcgttggcaccagcctcccccatcaccgttaccattacgggaatcctctccaaagaaggaggagactgtagcaagtaaggcatagagaacacttgctcttataccctagtggtggcggtcaagctaacaagtgtgaaaatgcctttggcatttttaaaaaagtgcaatcaataaagcagagttctgtcaagaatgagtaagttaacagccagagacagacactgtgcaggcattgcaaatagatggaattacagcaaaatgtgctcaatgtatttgcctgcttacaacactgggagatgtgtttgccagtaagttgctcatcacaagagcaccagacttgggggtgtaatctccggcaacttgcatgccctctgaaagaagggttttctgtgctgtgaaatgcatagaactatactttgccatgcacgactgttcctgcaattgatattgtgtgaaatctgggagggtggtctttgggtgttctcaggggccaatggtaatttttgggttggggagccagcttggggtggggaattttcacctgggcctccgctctttaactatataaacatttatctgtatatctatgtccctgtctggggggcaggaggaatctgccaaagaccaacagtcttactttatcttactatacttcacaaaggttctaaaatgtgaagagtttacttggattgcagtagcccattggttgttcatatatttaaataaaatggtctacaaactatttttcaaacaataaggactatcttgggatatctgagctgcttggggagggtgtggggtgtgggaccttggtcttcattcccttttttttttctttatggcttccacacagagatgctcccctatcttctacatcaaccagtaactggaatgtgccttcaatcatgtaatattagtctatgtcagtcactgcggttactctggggtaatggttggggaggccttctaggatagagccgcagtcccaagtttctaccactgtgtcttgcctagcaggatggggatagaaatccattccagtgagacaagagcgttctccaggctttgtttggctgttctggtgacaaaattaagtgggaaagctagattagtcgtcttaatgatctaacctctattaggcctcacacttgagtacatgagatagatcaggatcctgatctaggttcagatttttgttggttcagtcagttgaacaggttcttccttaatggttaacctcttttgctgccatggcaatgctgcgtaacaacttaagagaaacgtgaagcaacttcccatccgggattgggtaatggcttggtccagagctgttctgtgtgactggctatttttgaaaatcctttcttccctagtacagacaatttcaaacacctctgagattgtgggcatagtgaaacaaaggagtctaattggggagatcccagccccttgaggagcctgagttgtgaataaacatgtgaatccttattcttgatgcccctatctcaagaggaaggctcaatggcttgttctaggggagccaaagtctttgtgcatgttgttcaggctggaccagcaaggtagtttgtttggagggaggagggagctgtttaagaagactacatatgtaagttttgagaacactga

SEQ ID NO: 17976 - DNA, 2300 bp, Homo sapien
ttgggggtgtaatctccggcaacttgcatgccctctgaaagaagggttttctgtgctgtgaaatgcatagaactatactttgccatgcacgactgttcctgcaattgatattgtgtgaaatctgggagggtggtctttgggtgttctcaggggccaatggtaatttttgggttggggagccagcttggggtggggaattttcacctgggcctccgctctttaactatataaacatttatctgtatatctatgtccctgtctggggggcaggaggaatctgccaaagaccaacagtcttactttatcttactatacttcacaaaggttctaaaatgtgaagagtttacttggattgcagtagcccattggttgttcatatatttaaataaaatggtctacaaactatttttcaaacaataaggactatcttgggatatctgagctgcttggggagggtgtggggtgtgggaccttggtcttcattcccttttttttttctttatggcttccacacagagatgctcccctatcttctacatcaaccagtaactggaatgtgccttcaatcatgtaatattagtctatgtcagtcactgcggttactctggggtaatggttggggaggccttctaggatagagccgcagtcccaagtttctaccactgtgtcttgcctagcaggatggggatagaaatccattccagtgagacaagagcgttctccaggctttgtttggctgttctggtgacaaaattaagtgggaaagctagattagtcgtcttaatgatctaacctctattaggcctcacacttgagtacatgagatagatcaggatcctgatctaggttcagatttttgttggttcagtcagttgaacaggttcttccttaatggttaacctcttttgctgccatggcaatgctgcgtaacaacttaagagaaacgtgaagcaacttcccatccgggattgggtaatggcttggtccagagctgttctgtgtgactggctatttttgaaaatcctttcttccctagtacagacaatttcaaacacctctgagattgtgggcatagtgaaacaaaggagtctaattggggagatcccagccccttgaggagcctgagttgtgaataaacatgtgaatccttattcttgatgcccctatctcaagaggaaggctcaatggcttgttctaggggagccaaagtctttgtgcatgttgttcaggctggaccagcaaggtagtttgtttggagggaggagggagctgtttaagaagactacatatgtaagttttgagaacactgatcttttatttgaaaaatagggtcaacttttactcacctgccatgttctgagtttaaggtttgatatccttggccatcaactgttgcagggaaaccaccctaaataatgaagaaaagaagtcgtctcagtgtaaaaaaaaaaagtggtgggcttattttcttttcttttgtctgttgttccctcttcccctcccccagagagaaattctcaaaagaacaactcaaaaaacaaaatggcttcctagtgagaacttcagtgatgatcctttcctccatttggggtatgggctttttttctttttacactgagattattcttctttcctgcattatttagggtgtctgatgccatcaagtgttgcaggagaaacttcagtcttggctggtgagtagaataggaattgtgctggctgggcctggggtgggggttggtgggatggtggatggttgggagctgcattccccatccactggatgtgggagactgagatttcttggtgtatgattgattacactactatagacttcaaaatgacaacaaatttcagttgtttttcaggaactgctatagcatcattatatgaattgtcaggtattggtttagggtttttgtgatcctgagtttggcagactgcaatggcattttaggttcttttataccatagcaaggacactgaatatggcttcagggaggccatagaatggattcctatcacttggtaactttgtctcttctggggagagacctcttatcctagtgaatagttgtgcaactttggatttaagggtggttccacccctcctccctttctttttctctctcttttttttcagttccttcttggagggaccactcagtagagcctctaagggacccaaatccttcagaccttttggaggtaggtaaccaagagcactcaattgaagagagtaagagattaaatagaatgtgagggtataactggaaaatgtcatagtactatggatgaat

SEQ ID NO: 17977 - DNA, 2300 bp, Homo sapien
ccgtccccctcaaaaaaaaaaaaaaaaactggacccagactaaacaactgaaggacaaagtggcagactatcactttccttatttagacactaaacttggcagccttatttgcaccaatttagtctgtgatcgataagatcctccaggttctttttctttaacacttattaaatcatattatcctccattttgaactcaggcagttggcttttggagctggacttataagttgtcacgtttggccacttgtctaattagctgagattgtttgaattttctttttttcttttttttgaaacagaatctctttgtctcccaggctggagtgcagtggcgcgatctcggctcactgcaagctccgcctaccgggttcacgccattctgcctcagcctcccgaatagctgggactacaggcgcctgccaccacgcccgtctatttttttttatttttagtagagacggggtttcaccgtgttagccaggatggtcttgatctcctgacctcgtgatctgcccgcctcggcctcccaaagtgctaggattacaggcgtgagccaccgcgcccggccttgaattttcctttcatctctgaaggcattcataattacttccagtttcatgttatctataaatttgataaacatcaggatccttaaccatgtcatttataaaaattttactcaggaaaggccgggcgcggtggctcacgcctgtaatcccagcactttgggaggccaagaacggcggatcacgaggtcaggagatcgagaccatcctggctaacacggtgaaacctcatctctactaaaaacataaaaagttagtcgggcctggcggcagacacctgtagtcccagctactcgggaggctgaggcaggagaatggcgtgaacccgggagacggagctttcagtgggccgagatcaccccactgcaccccagcctgggcgacagacagagtgagactccctctcaaaaaaaaaaaaaatattttactcagggaagaattctatgccatggtggcctttgtttgataacatacattattaacgtgcactcctgtaggtgcactaaaaacttagctcatgcactttgtatatccttataatggtccaaagaaaacacactgattcttttcaatggtggccaatgccttgccaaaatgaaataatttccataaaccttaagaaggaaataatgtcaggattttgaatcaacatctgtttctactgaccatttatttttaaataggttctaaaatcctgacaagggcagtagctcatgcctgtagtcccagcactttgggaggctgagacgaaaggatcgcttgatcccagccaggagacaagcctgggcaagagcgagaccccatctctacaaaaaacagaaaaattagccgggtgtggtagtgtgtgcccgttgtcccaactactaaggaagctaaggcaaggaggtcacctgtgcctgggaggtcaaggctgcagtgagccgcgctactgcactccagcctgggcaacagagtgagaccctgcctcgaaaaagccaaaacaaaaccggtaatactggcatcataccagcctgcactttgggacaggtgatggctggggtgggaagaaacgtgaagaggaaatgagaacacagagaaaacgctgcaacaagaagtcctctggcttcactgcagacaactggtttctccttcgcccgttatcttaaacaaggctggtgcagcaaatctgacgcagcactacagcttttaagatttaccttgattcgtgattttaccaagcaaaggaatgcagtaaattgacctgcttcaaacgtaggtagaagtgagaaatggaaacagaaaaccatgaaacagccctagtgttgcagtgaagctgtgacaggttgactccttccactcgggaagcccaagatggccgggccaggaacccgggaggctgctgaagtctcaattcccctcgccctaggcctgcccaagggaagtcaggagccgcgccacgcccccttacatcaccgatagacgtaatccgggtcggccgcaaacgtgccgcaggcctaggccccgcccagtgccccgcccctcccccaacacacacacacacacacacacacacacacaccccaacacacacacacacaccccaacacacacacacacacacacacacacacacacacacacacacacacacacacacacagcgggatggccgagcgccgcacgcgtagcacgccgggactagctatccagcctcccagcagcctctgcgacgggcgcggtgcgtaagtacct

SEQ ID NO: 17978 - DNA, 2300 bp, Homo sapien
gaggagaatctcctttcaaacttccaacccagacccctgtgaatggatataatcaagtagatttacaaagcatccctcccttgtccagctgttgctcagaaactcttgggctgagatttttcaatatgttggataatgtaatgtgctaattataatctctcagggattctatgcagggaacaatttgataggaaaaaatttgaatttgattttcttcactgaagtcattttatttttcattttcaagggctttattgctatattaagatggcagacagtggggacaaatttctaaatgctggtgttgacagaaagcagagatagtttatagagaattttattagttaaaagaaaaaaggcattccttatgttgacacttaaacctgtctcttgatagtatctttgagtcccactcacgtatgtctgatctgcagaagtgacttttttggtgtattacaggtatgcccaaccatatacacatgggagcaggacctccacctcagtttaaccggatggaagaaatggtacagaaggggaaaggggtagatgggggagggagctgcctgttacacagcttgttcattgtttaaaccaagataaggtcttttttttttttcttttctttctttctttttttttgagacagagtctcgctctgttgcccaggctagagtgcagtgacgggatcacggctcactgcaagctctgcctcctgggtcccagttcaagcaattctgcctcagcctcccgagtagctggcattacaggcacgtgccatcatgcccagctaatttttgtatttttagtaaagacagggtttcaccatgttggccaggctggtcctgactcctgacctcatgatccacccaccctggcctcccaaagtattgggattacaggcatgagccaccacgcccggccaagataaagtcagtttttccattgattatgcatgtttcttttaatttggatctcctaaatgtaaggtagaaggtttaggttcaaatcttgatatcttttcattatttttcagctcactttgcaaatatccattaaatacctgccatgtaccaagtgtttttcaacacctaaaggaaggtaggacttgatatgagagccctctagaattcttattgtttaggcctctttctttgtctcagggtgtccagggtggtcgagccaaacgctattcatcccagcggcaaagacctgtgccagagccccccgcccctccagtgcatatcagtatcatggagggacattactatgatccacgtgagttttttcttactgttggggtacttttcttggcagggtgaagtgaagtaagataccaggctcctggctcctgaatttctcttctgacctcttatagtggttatcaaacattgtctggttgctgttttcttcgcatggaatattgagaacatcttttaaagggcttggggaacaaggagacttgtccatgtgaagagtaagggtttatgagagtcccaatgtgatatcttacagtgcagttccagggaccaatctatacccatggtgacagccctgccccgctgcctccacagggcatgcttgtgcagccaggaatgaaccttccccacccaggtaagctttgtgtctctgcttatatgcttccagtacctgaggatatatgttgggagtgccacaaaacccatcctcctgagctttgtgctgctagcctgggagtctggccatcctggctgcttgggcaacaagttcctcttgtgtccatcctgaggacttccattctgagcctgattatactgagcagtccagccgggccatcctgtgaaaatgatgttactttatttttcagtttttttcttctccttatccaggtttacatccccaccagacaccagctcctctgcccaatccaggcctctatcccccaccagtgtccatgtctccaggacagccaccacctcagcagttgcttgctcctacttacttttctgctccaggcgtcatgaactttggtaatcccagttacccttatgctccaggggcactgcctcccccaccaccgcctcatctgtatcctaatacacaggtgagatggctaatgatcatgtttttctagatacacattctttaattcagacaggaatgtggtatggggagaatgctaaaggaatttgagagaacattttcagtgccactgatttgtatgtgacaccaagacgcctcttagtggtcaggagctggaaatgcagcttatgtaatgcccatcatctttattcttttcagtttttttctccgttgcccaggct

SEQ ID NO: 17979 - DNA, 2300 bp, Homo sapien
agcaaatgtttgtatttttagtagagacagggtttcactatgttggccagactggtctcgaacttctgacctcatgttgcacccttctcggcctcccaaagtaccgggattataggcgtgagctgttgcacttggccagtattttttttttttttttaatatggagtctctcacccaggctggagtgcagtggcatgataacagctcactgcaaccttcacctcccaggttcaagcaatccttctacctcagcctccaaagtagcttggattacaggtgtgtgccaccatgcccggctaattttttttgtatttttagaagtggggtttcaccatgttggtcaggctggtcttgaactcatgacctcaagtgatctgcccgccttggcttcccaaagtgttgagattacaggcgtgagccaccaagcccagccagcatcagtatttctgagaagcttccctgtgattccagtgtgtagtcagggtgaaaaccactgccactccaggaggaccatgacttgatgctggctctcctcactgattcaaaatgttgaacttagtctctgcctgacatccttgagcatttgggggagtactggggtcctgtgtcccaagcttctagcttccagaagtctctcagtctgttttattttcaaccccctacacccttcacactccccaattcgcccttcctaaccaacaattcccaaatcctgcccagagagaaggttaccaaggcaaccggcttaatctggtaactgtggcatgtgctgggagagaagcccttccctcttcctattcagttcataaaatgctacctggggagctccaacccattccagccactttcccctttcaagccaggggatattggagtgtccaataaggggagcacaggaagctgatactcagacctctaatacagcttcttagccaaaattgtgcgctgtcttctttttactgtttccaaatccacaaacagatgggtgtgcaaagctttatttctgtgaacacatgctctagcacacatgggaacagatatgcacatacattgatacgtatgtcatacacaccctgttcagttttactaccactcccagccattagcattcctgtctctgcctggttggtgctcggtaaacaggggtggggcattgtccagagagcctcaacccatcgagaacctgctgccactcccacaccttgtaagtctaacctggatgttctcacacttagcatggctttacgatgcacccccctcctcccccacactccttctggggcagcatatccttaaggacagaatgctcctggtgtgggcatcaggagtaaggattacttggagtgctaattggcaccacttttcccactccatggccatgtacacttgggctctgtgcttgatgatagtcggcagttctggggcttgtcacctgtctccatggccctgcttccttctgctgccagctgggctcaggtgcccttgtgctcctggtctcctccccactgcctattatcccctcctcaccccagctagacctgccacaacctgctgctccctgcctggctcctacctgcctgccagtacctgcccacagaccaggcccacaccacctattgtgccctaccagagaggacagatgggcaccgcctccagtggcaatgctaattcacccaagaggccttcccagctcttctcacagaaggaagataaactccacatatttctgtgagtatgagaaaggtgcacactcttgggttcagcaatctgtaggcctgacttgggtacacaggtaggtgagtgaaggtgtccaggccacagacctgtcctgactctttgaaatgatgctgagacccggttatcccttgagccaggaatccttccccattggtaaatctctgacttacctttgcccttaatttcttctgcttagaacccaagtcccttactgtttccctcgcggtcaaccccagcgcgcgagttcaagcctcgtgcggcgcgggggcgagccgaggaagggtaggggcggggactgggcggggactggaggagggggcgcggtctcggttctgccaccttccccctcttcacggccaggagcgcagccgccgccgccgccgccgccgcgtcctctcagccttgcgctccgcccgctgcctctgccgccgcagcgcagagccgggcgcaccggccccgcagcctgcccactcttcgggccgcgtgccggctgcagccggcatggggggttgctgagagcgagcactcctttcctctggcacctcccccggctactggccact

SEQ ID NO: 17980 - DNA, 2300 bp, Homo sapien
gatattggagtgtccaataaggggagcacaggaagctgatactcagacctctaatacagcttcttagccaaaattgtgcgctgtcttctttttactgtttccaaatccacaaacagatgggtgtgcaaagctttatttctgtgaacacatgctctagcacacatgggaacagatatgcacatacattgatacgtatgtcatacacaccctgttcagttttactaccactcccagccattagcattcctgtctctgcctggttggtgctcggtaaacaggggtggggcattgtccagagagcctcaacccatcgagaacctgctgccactcccacaccttgtaagtctaacctggatgttctcacacttagcatggctttacgatgcacccccctcctcccccacactccttctggggcagcatatccttaaggacagaatgctcctggtgtgggcatcaggagtaaggattacttggagtgctaattggcaccacttttcccactccatggccatgtacacttgggctctgtgcttgatgatagtcggcagttctggggcttgtcacctgtctccatggccctgcttccttctgctgccagctgggctcaggtgcccttgtgctcctggtctcctccccactgcctattatcccctcctcaccccagctagacctgccacaacctgctgctccctgcctggctcctacctgcctgccagtacctgcccacagaccaggcccacaccacctattgtgccctaccagagaggacagatgggcaccgcctccagtggcaatgctaattcacccaagaggccttcccagctcttctcacagaaggaagataaactccacatatttctgtgagtatgagaaaggtgcacactcttgggttcagcaatctgtaggcctgacttgggtacacaggtaggtgagtgaaggtgtccaggccacagacctgtcctgactctttgaaatgatgctgagacccggttatcccttgagccaggaatccttccccattggtaaatctctgacttacctttgcccttaatttcttctgcttagaacccaagtcccttactgtttccctcgcggtcaaccccagcgcgcgagttcaagcctcgtgcggcgcgggggcgagccgaggaagggtaggggcggggactgggcggggactggaggagggggcgcggtctcggttctgccaccttccccctcttcacggccaggagcgcagccgccgccgccgccgccgccgcgtcctctcagccttgcgctccgcccgctgcctctgccgccgcagcgcagagccgggcgcaccggccccgcagcctgcccactcttcgggccgcgtgccggctgcagccggcatggggggttgctgagagcgagcactcctttcctctggcacctcccccggctactggccactggactctggccagcgaggctcggcccctctggcccccagtctggcgcctggcacggccctctactctgctcctccagctctgagcatcgtgtcttcgccgccccccccgcccgcgcctgggatacctgggtcccccggcgacccctaggagaggggcgggggggggcatgaagccgctggagaaatttctgaagaagcagacgtcgcagctggcgggccgaacggtggcgggaggtcccggcgggggtctggggagctgcggtgggcctggagggggtgggggacccggcgggggcggcggtccagccgggggacagcggtcgttgcagcggcgtcagagcgtgtctcgcctgctgctccccgctttcctccgggagccccccgccgagccggggctggagccgccccctgagaggaaggaggagagccggcgggggtcgcggaggagccgggcagcggggggccctgctggctgcagctggaggaggtgccggggcccgggcctctcgggggaggggggcccctgcgctccccttcctcctactcatctgacgagctgtccccaggcgagcccttgacttcgccgccctgggcccctctgggcgcccccgagcggcccgagcatcttctgaaccgggttctggagcggcttgctggaggggctaccagggacagcgccgcctcaggtaaggagccggtgggctcgaacacccagagcaggggctggccccggctcctcttccttgcccttggagcgtaggggtggcgccgtgccggggcttggttatagggttgagtggtccgcggaagccggctaggggcctagcggaggtacagaccctcccgcggaagaggagagcagtac

SEQ ID NO: 17981 - DNA, 2300 bp, Homo sapien
ctgggttcaagcgattctcctgcctcagcatcccaagtagctgggattacaggcatgtgccaacacacctggctaattttgtatttgtagtagagacggggtttcaccatgttggtcaggttggtctcgaactccccacctcaggtgatctgcccgccttggcctcccaaagtgctgggattacgggcgtgagccaccgtgcccggttatatccgggtaatttttgtagtaacaagatttcaccatgtttcccaggctggtcttgaacttctgggctcaagcgatcccccctgtcagcctcccaaagtgctgggattacaggcatgagccactgcacttgggccatttacctttttcatgaagcctatatcactatttccccaagtctgggtgagatgtccctatattcatcccagcggctgcccttatcacagagtgtgtgatagagcatggggctttacattagctacagtgggcagtgaatgccctctgaggacgaagcatttgcagtaaggcttgaaaaatgaggaagaggcggaggatagccagtacacagtccctgaggtgggaactgctgaatggggtacattgcagtgatagaaatcaggtcctcataatgtagagtgagtgaggaggggacaggcaggggatgaggttgaagagttgggaggctctggtaaggtgtttggacccaccatctccctggctccatcgccccacgtatggccatgcaggatgtagacagctgaaaatctttacctcgtgtccttgatccctatgcctgctgtgttccctgccttctctgattaataataaaattccattcatccttcaaggcccagctccaaaccatttaggaaacctccttccattctttagcaggaattaattgctcccttgtctgacgtcccacagcactaatcacacgctgacttgtatctcagctagctgtttatgccagtctgcccaccaacgtagtgagttccctgagggcagaggctctgtcttagtcacctctgtagccatctcctggtgtttagcaggtactcaatgtgacatttacttgactagtgggtggtgcctagtactactcatggcagaatagaaggaaaacaaaaataataacaacttatgctctatcacgttttcccattcattaactgatttcagctttgcaacaactctatgagacagacgggacaggcactattagacccattttacagatagggtagctaaggcccaatggcacacagcttgtaagtaatggggactaagtcccaatcttgcccccttacttcggattctgtgctgggaatggaattaaaccaagagtattttgaagctataatggaaagcgcttttctgggtggactagggagagatacttagtcagctgtcagggtttaacagcagctccatcaaagagggcacaggatttctctctctggcccaagcagctggaggggtccacagcaccatcctatagccctggaagctggaggaaaccccagcccgagaaagaagagacggtgttcgagtcaggtgggtaagatgacgtaaatgatgacttgtgagcagtggcctgcctctgttgccatgacaaccggagcttgactacttggcctttgcaaggttggccgaggcgggttcttcgttaactcgagattaaggaaggatatttaggggggagggtgtgtgtgtgtgcggcggattaaagacgaaaggagtatattcaacaatgactgtttagctcagtggttctccaccttggcaacacgttagaatcacctgcaacaatttcctgatgcctaggctgcaccccagaattaaattataatttccaggggtgggaaccaggcatcatagtatttaaatcttgccaggtgattccaattgcagctaaagttgcaaacccagcttttagctggtaagcggaattcctgtgaccttcctaagatggcgtccactcaaccgcttccgcctttacgtgggccggcagggggcgggcttcccaggggcgcatgcgtctcgcatctctccgctccctgctctctcctcctttttcccccgcctccattttgttcgcggacgctggggacggtgggagcagatccatttccgggttggcaaaaggggcggtggcggcggcggcggcggcggcggcggcggcgacggcgagaaagagcttgccggggggcgagcaggacaggacgaagccggagtgtaggcggcagaggattcgctcccagagcagctgcggccaggtcggaaagaggccggggcggctgggtcagtcg

SEQ ID NO: 17982 - DNA, 2300 bp, Homo sapien
gagatcgcgccactgcactccagcctggatgacagagcgagactctgtctcaaaaaaataaagcagagcttgtatggtgatgttgggggtagaaagaggaggcagtcaatgaaggcttttaggtaggtggtgatacttgagctgagtcttaagccatgagtagagtttagccagaaagagaggagggagggagggcacttgaagttgaggaagtagaatgtggaaagatactgatttggtattaattaattaattaatgagacagagtctcactctgttacccaggctggagtgcagtggttgtgatcataactcactgcagcctctaattcctgggctcaagtgatccgcttgcttcagcctcctaagtagaggggactacatgtgcatgacactgcatatagctaatataaaaaaaaattttttaggccgggtgcagtggctcacacctgtaatcccagcacttgaaactctgtctcaaaaaaaaaaaaaaaaaaaaaaagataagttttttttttttgtaaaggcagagtctcactttgttgcctagactagtcttgaactcctggcttcaagtgatccttttgcctgggcctcccaaagtgctgggattacaggtgtgagccactgtgccggccggcctcgtgctgatttttaggaaagcatatagaggtttagattattgcttgaggggatgtggtagcagatgcagctggagatgtaagctgagggtttagatttttcttctggcgatcatgaggagttcttgaaatatttcccagctactgggggcgctgaggcaggagaatggtgggaacccaggaggtggagcttgcagtgagccgagatcgcaccactgtgctccagcctggatggtagaatctaagactctgtcttaaaaaaaaaaaaaagcaaaaagcaaaaaaagcaatcagagggtggaaaaggcctggggctttgaggcaatcagagcattcacatcttggctgtttgtttattaatgatgtgacgttaactgtcctaaacctttgttttctcatctttggaatgggaataatatagtttactgtataactttatttagaggttaaattgaagtaatagggagacagtagggtatgttagttgagataggatatgagtttttagtgtcactgttggagtttggactcttgttttattgtttactagttgcatgaccttagatagctattcagcttctggcccaccctttccaaatggcgacaatgataataatacctttctcatgggaaggtttagagatttaaatgagctaaggcaaatattgtgcttaccacagtgcctaagtcatagtagggactcactaaatgtttgccttgatggtgatgatacgcattaaatgtctaacatacatagtgtcttaacatgcagactagcacaaagataactaagtattactgcaggcctcccatcagaagcttctgaataagaaggaaatggagttccttcacagaagatagaacaggaggggaaaaactgagaaggataatgcacattgatattgctctttggcatgtatatctaatgaggttagatagacatctcatggaatccagtttgctttaagtcatttatcccaagcttgtgataaagggaactttttttttttttttttttttttttgcaggcacattctcgccctgttgcccaggctgcagtgcagtggtgtgatctcggctcactgcaacctccacctcctgggttcaagcgattctcctgtctcagcctcctgagtagctgggatacagcatgtgccaccatgcctagctaagtttttgtatttttagtagagatggggtttcaccatgttggccaggatggtctggaactcctgacttcaagtgatccacctgccttggcctcccaaagtgttgggattacaggcgtgagccaccgcacccggccgataaagggaactctttagggtgaacttatatttctcttatcctccaggcaaacacagagcagcccaagctgagtagagatgagcagcggggtcgaggcgccctcttacaggacatttgcaaagggaccaagctgaagaaggtgaccaacattaatgatcggagtgctcccatcctcgagagtgagtccgagcttcatttcctagtgaactggcaggatcccaggagtgacttggagacttggctgggttcttatttttattgggccttgagtgggagagttttgtcctgggatgtgctttggctctcttcttattcattcttctgaaccttagaagtttcttcttgactctt

SEQ ID NO: 17983 - DNA, 2300 bp, Homo sapien
ggaaacttctgtcatttctgataatatggatgaacttggaggacattatactaagtgaaataagccaggcacaaaaacacaaatactgcatgatctcatttatatgtgggatctgaaacagttgaactcactcgtagaagtagagagtgaaatgttggttactagaggctgggggcagtaggcgttgggattgggaaaggggagatgttggtcaaagggtacaaagtttcagttagacaggaggggtaagttttagtgatctattgcagcagtccccagtttttttggcaccagggactggtttcatggaagacaatttttccatagatggtgggcgggggatggtttcaggatgaaactgttccaccttagatcatcaggcattagttagagtctcataaggggcatgcaacctagatccctcacatgcacggttcacaatggggttcgccctcctatgagaatctaatgctgctgctggtctgacagtaggcgttgctcaggcagtaatgcttgctcgctcaccttctgtgtgccctgttcctaacaggccactgacctgtacaggtgcatggccccaggggttggcgaccccttattatacttaatgtatatttcaaaattgctaaaagagtatattttattttattttattttatttattcgtcccccccccccccgcaaatggagtcttgctctgtcgcccaggctggagtgcagtggtgccatcttggctcactgcaacttccgcctcctgggttcaagccattctcctgcctcagcctcccaagtagctgggattacaggcacaggccaccacacctggctaatttttgtagttttagtagagacggggtttcaccatgttggccaggctggtctcaaacttctgacctcaagtgatctgtccaccttggcctcccaaagtgctgggattacaggcatgagccactgcgcctgttgtagagtagattttaagtgttttcaccattaaaaaaaatatgtgaggtgatggatatgttagtttgatttaatcattccacaacgtatacatataacgagacattgtaccccataaatacataaaattattacttgtcaaaaataaagtaacatttaaaataaataacagtgtatcctgagcctgaaaccgtattaaaacccagaactaggccggacgtggtggctcacgcctgtaatcccatcactttgggaagccgaggtgggcagatcacctgaggttgggatttcgagaccagcctgtccaacgtggtgaaaccccatctctactaaaaatacaaaaatcagccaggtgtggtggcgcacacctgtaatcccagctactcgggaggctgaggcaggagaatcacttgaacccagaggttgcagtgagctgagattgcaccattgcactccagcctaggcaacaacagcgaaacttcgtctcaaaaaaaaaaaaaaaaaaaaaaaaaaagaaaaacaaaaaacccagaattattcaattcctttccctgctgccatgcaggttgcactaaggagccgagtgaagtagggatactgaccaatatctgtccagctctgttgaccctgtgttgtctatgtatttgtagagaacctagctggtaagccagccctgcaaatccccagttctcgagctgctgccccaaggcctccagtatctgccgccagcgggcgtcctcaggatgatacagacagcagccgggcctcactcccagaactgccccggatgcagagaccctctttaccggacctctctcggcctaataccaccagcagtacgggcatgaagcacagctcctctgcccctcccccaccacccccagggcggcgtgccaacgcaccccccacacctctgcctatgcacagcagcaaagcccccgcctacaacagagagaaacccttgccaccgacgcctggacaaaggcttcaccctggtcgagagggacctcctgctccacccccagtcaaaccacctccttcccctgtgaatatcagaacaggaccaagtggccagtctctggctcctcctcctccgccttaccgccagcctcctggggtccccaatggaccctctagccccactaatgagtcagcccctgagctgccacagagacacaattctttgcataggaagacaccagggcctgtcagaggcctagcacctcctccacccacctcggcctccccatctttactgagtaataggccacctcccccagcccgagaccctcccagtcggggagcaggtaagtgcttggaagcacctttttccctatcat

SEQ ID NO: 17984 - DNA, 2300 bp, Homo sapien
ctggtctgaaactcctgacctcaggtgatccgcccgcctcggcctcccaaagtgctgggattacaggcgtgagccaccttgcctggccactcatcttcattttcttaggcaaaacaataataacacgtagtccccagattttaaaggttagcttaaagagcctgtctctcattttaggaatgtgtgggttgttcagattctggtgggtgacctgtatgtgtgtggtctttattttgttttttttcagctgcccgtggagccccacctctgccacccattctcaggtgaagcctggcttggtcccgttcctcaggaaaaggatggaccttctcttcttctcagatggtcccttccattcccctgaaacctgcatgagagctcctaacatgtttctccaatgcaatcaagccctagactccaaatgtcctcccagctcacctccatctatgcatctcatctctggatttggtgatcagactctatattgacagtaggatctcaaaccctgcatccatccttcctccagcaagccctgctagccacatgaggaacaagtttccgtgtcttctgccttcctcttggggaaaggtgccttgttgtgatgaattaactcactgttagggcagggtggagaatggtactccttccttctcctgtccactgtgggggaagcttggcaggtatattatatttcatcatttaggaggctggcatgaccaggacttatgggtgggaggggagcatttttagtgaagcaagaaaggagtttgccaagaagtgatctgttttaaaggtcatatttggagaaagggcaaggaattgggtctgctttatttttgggggtattttgtttttgttctcacctgctgcccccccaccccaccaccccagggataaattggatataaacactaaatactaatcagttgaacttaacatttaataaaaagaaagggtgaaataaactgaagaccattttagaactagtcagttctctgcagcaaagggaacaggagccatttgaaccctctgggacccctcaccccactgcttcagggtgctaggctgagggatgtttttcctcccccttaccgcccatgcccttgaaagaaaagtcactttttgtggagggcatcattcattcctgattcacaaaccccaaaaacctctggtgggagataggaagatagggcgtgggcctgggccttaacctcaatcttgtgtctgcctcagtcttttctgactggccctgaagttgtcagtggctctttctgtccttcagcccctggaaggtgctccaggataacaaagaagggcaggttgaagcccctcatggaaggagctggctttgtggggctgcaaaggacttttaagtcctgcctgtactgaagttcacagcccacctgactgagcagactcttcctgttcctttctctaccacccttgccttcccaggactgcacggtttaacacagcagagtacagaagggtgaagaagtgagcagaggcttatgaagatattcagatactcttctatgccaggaagcacaaagactttgttgagatttgcctcagttcagtagatcttccttggcagccagccataggttgtttctttgtcttccgggtcctaaagagcacagagaaaatggaggtccccagtctaggtaggaagctgattggatgaggacttctttttttccgacagcaggatggggctcttgggctccacacaccagatgctttggttttctacaactgttgctatgtgtagagggtgctcagagcgtggcatgagagcaaggagaccatggctactctttgaaatggatggggaaaattagcttaaaaatttaatcacgagattgcgccactgcactccagcctgggcgacagagccagactccgtctcaaaaaaaaaaaaaaaaaaaaaatttaatcacacacatcacaggcttaaactgtcttagagacctttccagttgattggatcacaggctagggatctgtgcatggtgccaggtgaaacccaagtctccccagtgctaggtgagggagggctcaacgggggtaatgtgtatggggtctgctgtcctttgccatcccctggaccatattaactctgggacagaccatgattaggtctgtcaccaaacttttcctaatcattttttatgtatcattcttctttctaatctgttagcagttatctcccagaagtatccctagcatcctgaagcaaacagaactgccgggcgctgtggcttatgcctgtaatctcagcaatttgggaggccgag

SEQ ID NO: 17985 - DNA, 2300 bp, Homo sapien
gttagccaggatggtctcgatttcctgacctcgtgatccacccgcctcagcctcccaaagtgctgggattacaggcgtgagccaccgcacccagccatttcctggtgttttcataggttccaatatgcatgctaagtactcatagcttcctaggttgtttaccataaccaccccttacagctggctgggcacacattaccatttcaggttattaagggcaattcttaggtgcccatgttataaaaatacgaacagtgaaggttgcttcctgagttctactatcctactaagacatcagaaataccatctagtccttttaaaagcttccactgtggccaagagcggtggttcatgcctgtaatcccagcactgtgggaggctgaggtgggtggatcatgaagtcaggagtttgagaccaacctggccaacatggtgaaacccctctactaaaaattcaaatattagccaggcgtggtgacgcgtgcctgtagtcccggctactcaggaggctgaggcaggagaatggcttgaacccaggtggtggagattgcagtgagccgagatcatggcacggcactcaagcctgggtgataaaatgagacttgtctcaaaaataaaaaaaaaaaaagcttccattgtgtggtaactttctccattcatggcagcccattctcttcacttttgtagttttcagctgctaaaaagccttcacgaaatgtactccaccatctcttcctgtttagaacctgaatctgtctaatcatccccctatgataaagtggtcaagagtttgattttctgtcagagttcagagttcaaattctagctcttccacttactagttgtgtgaccttgggcaagtttactcaactcccctctactgtagttccctcatttgtaaagtgaaataacaccaggttcatgggggtgcttgtgaagattaataaggtgatgtaggtaaaatactgagcacagcccctggcatacacttaagcactcaatattggctctcttcatgaactaggtaccaattcactgatgatcgtaatattgttgcttccctctttctaggctttatggctctattttgtttgttactgaggggtaaaagataaatgtttaccatcacctagaattgggttctggcctctaaaggaacctgaggcttagatgaattattggctttggaagctggccttcaaattactgcgctaatttatatttttcattaaaaactcagcttgcctcttctatatagctgtcttccctggccctgaaaccctagtgtttcgccataaaagattttaaaattaaggggtcataattccctccccatgatgtgtggattaatggtaagaagatgcacagaacataatattcttaggttgaacgaaataaaagtaaagagttggctctgtttctcacctttgaagcacaaatcaagagatactatgatgaagcatagtttttctttatataggtgtgtagaactttaccataaaaatcactagttcagccatcaggagatctggatcctaggctcttcactgtcaccaagatgctgtgacctctaaccttgtatagaagtttgctttgtactttgcgaggttgagcattagagaggtaaggaaagtgcctagcatcatacctggcgcacagaacccaaaacggtaggtatcatgtagcagttctgaaaatctagcccatcaggatgatgcaaatgggtactttaggcagtgagaaggggaaccacatcttgacacttccagtcgaaggaagagtgcgactgcgcggcagcaaagactacgcctcccagcgtgctttgcggcgggccggcccgctttacccagagtcgccctgccgcaatcgcgcgtctttccaccgaggccccggatgtagattccctcccccgttcagtggtcgtggcctcacagcgactctaagacttggggctctctcattggctgtaactcttccactggattggtagcaaaaaaagaggcggtgcccaaggcgaaaggctctgtgactacagccaatcagaatcgaggccgggctttggcgggaggtgggaacgctgtggccattcggatttggcgcgagcgcggctggagtttgctgctgccgctgtgcagtttgttcaggggcttgtggtggtgagtccgagaggctgcgtgtgagagacgtgagaaggatcctgcactgaggaggtggaaagaagaggattgctcgaggaggcctggggtctgtgaggcagcggagctgggtgaaggctgcgggttccggcgaggcctgaggtg

SEQ ID NO: 17986 - DNA, 2300 bp, Homo sapien
acaagggtgcgcctgctccccgcaccgccccccgctcctgacgctctctgctgccgccatccactgcttgtctccttcagttaagataatgaagatgctgagagataaaatgtgtatttaataagggtgggggtagggaggcggaaaggggcaaccagggccttccctagtttggggcctcgccaagacttaagctgaaagcaaagctagagtaagacttggccccagggtgtgggggtttctgggcctcaatccagctgacttcactgcctgctgtttgccctaaattcccccacctccaccctctcacccccacactgctttcttcttgctcccaatgggaaaaaggactcttgcttcaactttcttttcagctggtaacttggcctttggtgcggtgccccccaccccagtgtcagctgcaaggtcgggctagggcagccccctctagcctaggcctgtagaagctgtgggttcacagtggggggtgaaaaagctggagttaatgaagaccagctgctagtctgggttctgcctacagctagctggaggccagcctttggtggtggttgatgggggggtggggtgacctccatccatgggcacaaggatatcctgtggcagctaggcttgtgcttctctctgagcttagttttatccttagtttataagagagtatctgtttccttcccctactcctctcctccccaaataacactcagctcttattgaactttataactgtagtggtggcccagctgagatctgaggatctccaaacccttttgtaaacactcattaactgcctgggaagaacgaagagccctgtttaacagctgggagagaactgaggcacattagggtgaaaggtttgacctaaactcaccccatggactccaccctggggccttccatccttagtccagctcctttactcagttcttcctgcaagacagaggtggaggcattgctggtgtcttctccccttctagggagaggccatgccctctcccctcaagtctgtcgctgacttcctctggcccttcccctcatgacgttttccctgctctgctgctagagatatgtgcaactctccttgcaaaatgttctcaatccacaacttcagaattcttatccagctttctcttgcccatctagcccaccaaacctgaattctcccttttgagctactgagaagactggctatactaaactgaatcagtgaccttgaagttgatctgttgtattgaggtccctctgcccctatatttatcctaaatggtatctaggaaaatattctctctttaacttgtttattctggtcataaagattcgggacattactgagggctgggtaggggcactagttgacctctaggttctacgtcctgttcttccactgacaattaccatttccagtaataggtgtaacccaaagttcttttttgtttttttctccttccctaaccccacctgtttatactcttgcctatatatgtgtatttgcagaccccacacattcccagatacacatacattggtcctacatgtttcccctgtttccagctgccatctaagtgagcctgcactttttacatgctgaaaatcttttttcaccctctatggcctcctaggtccttgggaataattgggagggatgaagggactcctgcagtccatgaggaagaggacagaagtgagcgcccaaccaaaatgaatgctccctttccaaaatctctagctgaatgccttagcaggagtggcagggaaagagatcttaaccccacctccagcaccaaaacctaaatccatctgctcagggcaggcaggaagaaatgtctattttctcctgtttcaggtcatcctatcctcgagttatccatatgctgtgtatttgagacagggaactgttcctgtccccagccgatgaccagacgcccatctttcttccagtgggttacttctcccccatcagtccttcgctctgcgcccgctgacccagtcggggctggctggtggaagagggcggggagagccttctagttggcgagtgggctttaggacccaacgggaacccgtgcctcttgcagcagcctaacccagaagcaggggggaatcctgaatcgagctgagagggcttccccggttctcctgggaaccccatcggccccctgccagcacacacctgagcaggtaggaccatgcacaccccttcccaattctttggccgcctttgaccccggcctctgcttctgatctagccatttccttctcgccagttctggctttccccatccctc

SEQ ID NO: 17987 - DNA, 2300 bp, Homo sapien
cgggtgctggtcttgtttgagtgtctgacccctgcggggggtgggtttgtgtgtatgaatttcttccctcatccacacatggggctacttctgtgtctgtgcagaagtgtgccccaccctctgcttcatgcccttgtctgtgcacaaatgtgtttggatgtacttgttcatgcgtggatgtgcatacatgcgtcggggatgtacacatccctgccctgaatgtgcacgtggaaatgcatttgtaccaggatgcctgaccctatgatggcaggtgtacctgaaggtcgtcccacttgggaggcagtgtagctgtgtgcatgcatgcttgcattcttgtgtccatgagccttcccctccagcctcaaggaaggaagacaggtaggatctaggttgggaggtgtccgtgggcactaggggcgggctggcgctgactccagtcctgggctggttctcacctgggcagagctccctgctgttggcggggctcaggctggaaggcccttgggggagcgcggctggggggtaaggggttaagcggtggcgtccacatctgggagccattggcgcattcctgccggctgagcgcatgtttgcggatgaatctggacaggacagggcgggaggggctgggcgggaggttcgcaccggcggacggaaatccagacgggagcgggagacagctccggcccagcaggcgggaaggggcctggggaagcgcggcccagcactgctggggcagtttcccgtgcgccggccctcagggcaaagggtcccgccatcctggcttgtcctaccttaccatggctcttgggctaaagccagggacaatcagatacttcaattctagacccggctctgcaaccggtgcgactgtgcacaaaacccagtgcctgctcttggactctctttccttgtttgtaaagcggggtccgtcggaccagtgggtttgagagctctgccaccgggtcaggctgagagtctcctcactgggctggaggcctgggagtgcagcacttccccttccagtgggaagttctgtgggggcacttgtggccacttctctgcctgggaacagggcgagaggggagtattctaagcaattctgcttccccctaagcccgccagtggactgctagcgatggggacaggatcctcccaaacagagctgcaggctgggaggggggtcatgactgtattggggactgggggtctctcagatggagggtgattcagatcctgtccagctggaacatgaaaaagagctttcctggcttctccagacttgttcgggagagagaagcttgagtgtgagtctttgagcacggaggggtgctcctgggcgcccctactggaagatccaaaagtcttgccctttgaggagaagagtactttaagggggctgggagggttgggttgagccagggttcctaggacccactggagctgcagaggtgtttggggaaagaagagatatacttgcgggagatctactcctggactctttttttttttttctttttcttgcagctgagataattaagatccagggaagggaagtgacttggtcaaggtcacacagctctcagttccagctggtccctagaagaggattataattataggattcaggggcttgacagctagggcaggagtcaccgcactcacttccatattacgccgccgcctcacttctcagatttaggtgtgggtgtgtgtgtggttggggggaaaggagtgtaggataccacacgctgcggtcttctccaccgagcgctattttcattctttccgcagaacctcaccccgttcttgctctgaatcttcggttctgggtctgagggagggattctcccggattcccacggtccagtcttcaactaggagtggctcctttaagactcgcccttcccgaggtctattaaggagaggcgggggcgggcgtgagcctgtagatccgcccctgactggtgattggtcggtgggcgggcaggggcgggcctgagggacagggcctccccctacctctgctccgtaccctccgccccttcagtctggggctccgggtaaagtttcagcctccgcacgtgactcgctatggccgctgccatcgccccgcgcccctgagccgcggccccctggacggctcctctcccgggaccccgcaccctgatgccgagcagcaccagggcgccgggttagggcagacgctgtgctcgctggcaccccgaacgggttgcttcccccgctgcgaggtaattcctcccctggggattttggggagcccctggttcccgcaggcg

SEQ ID NO: 17988 - DNA, 2300 bp, Homo sapien
tacattcccaccagcaatatatgaggattccaatttctccacatcctcgccagtacttgttattatctgtctttcttattagagctagcctagtgggtatgaagtggtatctcattgtgctttttttttttttgagatggagtctcactctgttgcccaggctgaagtgcagtgacacaatctcggctcactgcctcccaggttcaagcaattctcgtgcatcagcctcctgagtagctgggattacaggcatgtgccaccacgcctggataacttttgtatttgtgtgtgtgtttttttttttttggagacggagtcttgctctgttacccatgctggagtgcaatggtgtgatctcagctcactgcaacctccacctccctggttcaagcgattctcctgcctcagcctcccaagtagctgggattacaggcacctgccaccatgcgcagctaattttttagtagatttttgtattttttagtagagatggggtttcggcatgttggtcaggctggtctcaaactcctgacctcaggtgatccacctgcctcagcctcccaaagtgctgggattataggtgtgagccaccgcacccaactgactttcgtatttttagtagagacaggattttgccatgttggccaggctggtcttgaactcctgacttaggtgatctacctgccttagcctcccaaagtggtgggattacaggcgtgagccaccgcccccagcctcattgtgcttttgattggccatgtttctttttgtctgtctcttttcttttgtctttcatatatgtatttttcatatataaatacatgcatatgtatttatatataacctgtacccaaaatggatttgaaacatcctcttgtcctcgtatggatatgttcttcgtgttctctctctttgctcttgttgctgcctatctgtctcactgtgttatggaatctctgggttcatctctgtctctgtctctaccccatggtattatctgtgcatatcctctggtgccagctgttcaaacagggtgtggatctgtattcacactggtgaagggggcatctggcctttcatcttctgcccacctcccaccccagttcatgtgttttgcttctgcagacagaagtatgtgggtgaaccttgagatcaatctctccttcattgcctgggggtaggaggcttcctgggcggtccttgccctcctacacatcgcctacccctggaccatccatgctgttaagcattggaggtgatacctaggagtccttggttcccattttcctattagtgtgtacgtaaatgggcctcctcccagggcctgtgggacaaacccgtctggggtgctggggcttggatctgggggggaagtggtgtaagaggggccccctggcttaggagtcatttttctgagaagtgccaatgctttagggaagcggcttttcctccccctccctcttcccccccagcacacgttctctgcatcttgacctcaggtaaccctcactgggggaaggagggccagctgcccgtttctgctgcagtgatcccttgaggtggcactgtggaccctttcccctcaggactgtgggtgagaggccctccaaggttctgggctctgtccctgtctccccagcctggctgtgctatctgccacccccagcagtgtctgggccctgcttccaggtcatctctgccagccaggcatggtgccagctgtctgctcagctgggtgccacgggaaaatctccggcagcccaggttggggagctccacggggaatgcctgtgtgcctgttcttcagtgcccactcacctgtctttcttttttctgcagcatcacaggacatggccccctcagccacctagctggggcccatctaggagtggcatcttttttggtgccctgaaggccagctctggaccttcccaggaaaagtgccagctcacagaactgcttgaccaaaggaccggctcttgagacatcccccaacccacctggcccccagctagggtgggggctccaggagactgagattagcctgccctctttggacagcagctccaggacagggcgggtgggctgaccacccaaaccccatctgggcccaggccccatgccccgaggaggggtggtctgaagcccaccagagccccctgccagactgtctgcctcccttctgactgtggccgcttggcatggccagcaacagcagctcctgcccgacacctgggggcgggcacctcaatgggtacccggtgcctccctacgccttcttcttcccccctatgctgggt

SEQ ID NO: 17989 - DNA, 2300 bp, Homo sapien
tgattccggaaggcggaagttgcagtgagccgagatcgcaccactgcactccagcctcggtgacagagcaagactctgtctcaaaaaaataaataaataaataaaaataaaaccctaccctgtcaggaagcagacagtcttctagttccagtgatccaagtccagaatgtaaatcacagtccctttaaatgcagtgaatattctacaaagatacaccaatgcattccctagtagccccaaaccccagaggctggcctctccccatcactaacacagactataggaccagaccagaatcagagtccccagactccatccatcccatactcctatatgaggtggagagaagagacagcagaaacagaagatgaaggtttgataaggggtggcaggagaaactgaggcagcacctgcctgccccctggccccagggcataaagggcggggaacacaaagaaacacagacatagagtccctgctcctggtggctggtggagcctgggagggagggggccacagctaagccagaggaggcgatccaggaagcagtggtggtggtgggcacccagccagtgcgggcagtgaggcgcccagccagggcctgccccagggacaaagagactccctggctccggggagagagcgctgcccccacactgagaagggggcactgacccagcccagccaggcacatagggcagtggtgccaggcagcttgccagcagccgtgagaggggtggtgggtgcacagggcaaggtgtgcagtccctgctggccaggagaggtggggacacgtttcccaggtcagcagctgaccagccggccagccagcagcccatggcccattctgctgcttccaccctctcccgtcccaggccaggccccggctccctcctccccccagccctggcctggcgcccagctgggccctgggggccagagttactgtaagcggcctggcaggccccagccctggactctgccagctggccagagctgccgccacctcccactacctggctcggccagccggcgaagggtactgagacccctgcccagccaacaagtgacctccatggcagagggtggaggcaaggaaaacacaggccctgccaagaccatgcatgcgtccgaggccagagtccaggccaagtgtcccctcctgggacactcaccctatccacccagctagaccgtgggcccctccctctcatcctccccacaaagggaagcacatcctagcatggccgggggtggagctggcagggggagaggtggggttccagccagccttcctcggtctgctccttcaagccctttccctcagaggcactgagtgggggtggggcgtaggtggtgtgctgctctcactctaggtagagctgccatttccatcaaatgtcaagaggtttgtttacccacctccaacctgtgtgtccagtccttggagctatttataaggccccaacagcagagcacagaagaggggtgcgagggccactgcaggccagaacagcatggtttcatctccccctctgccacccccaacttcaaacacaaccaccatgatcagcctataggccatagggctttcatttttaagacctcaaatgatggtcaccccaactggagaagaccttgtcgctcaccgtgccttccactcacagcagaacagacgtgcccagagcccaagctctgaggcctgccaccctccacagtcccttcccaccccagcccccacacccagacttactggctggggatggtgtgctatatccactaactggaagctggtgctggagagtggtcagagcgcctggcggggagagtccacccagcataggggggaagaagaaggcgtagggaggcaccgggtacccattgaggtgcccgcccccaggtgtcgggcaggagctgctgttgctggccatgccaagcggccacagtcagaagggaggcagacagtctggcagggggctctggtgggcttcagaccacccctcctcggggcatggggcctgggcccagatggggtttgggtggtcagcccacccgccctgtcctggagctgctgtccaaagagggcaggctaatctcagtctcctggagcccccaccctagctgggggccaggtgggttgggggatgtctcaagagccggtcctttggtcaagcagttctgtgagctggcacttttcctgggaaggtccagagctggccttcagggcaccaaaaaagatgccactcctagatgggccccagctaggtggctgagggggccatgtcctgtgatgctgcaga

SEQ ID NO: 17990 - DNA, 2300 bp, Homo sapien
ggggccctgcctggcacaagtgggggccagtttggcctgcacctgctgagggcttactaaacgcaaagccctgagaaggagctgagggagggataaggctgagcaggatggggccccaggcctgcagacagctgccgctggaggccccccagccccagctgcgggccagagccttccttgtttcccacttctcccactgccccaggacactgtgttctgctctgacctgccccatgaccttgctgttgcccagaacgggcctcttgccctagcttctcctctccagctccggaaatcctatctatccttcaaggaacatcttgaatgccgcctcttcccagaaatcttcacagatgttcccccttgcttgccacactctgcctccctacttagaatgcctgtgggtccttatttattttttaacaacactcatctcgctacccagaagttgcttctcccctgttcctgccatgagctgtaaccatttgggacatcttttcctgaccacaaggtctttgatggcagggacagagtctcaggtcccttagcgccttgcagctgtgagcgcagagccttgctccatcatttgaaagatcccgaaggcatggaagcactctgtcctcttcgccattagtctcatccactgtcaagatttgcatacctgcccccagaccccagcattccatctgtagccctgactgcacttcagggccccacatccacctgtccagcagcccagtggacttctctgctttgcagtctcaggaacttcactgatgcgtaagtcacacacaagtctctttgctacctcttttcccataccccttacccccacccccccacgttatttgtacctttaaaatgtttattgaatccaccttcctctgtccatcagcacttccagtttcctaggccaagccacccttgtctgatgcctggactgctgcagtagcttttacctggtctctcttgccctcctataatccattcttcacacaactactggaaagatctttttacactgtaaatctgatctttcctttgcttggaacctttctatggcttttccttgcatttaggataaaatccaaaagccttactgaggcctataagcccccctggtctggcctgagcccacctctctagcctggtcttgtgtaccttttccttttgaattttgtgccccatgattctagccttctgccagttccttcaatgaactcatcaactgctgtaaccccagggcctttgcacagactcgccctttaactggaactacactcctttctactctttgcctgattaacttacaaactttctcttatggtaggtctgttttatttgagttcttccctaatttagttaaacctaaattaggtacctatgttaattcttcagagcataatagcatttatctcagtttgcaattgtgtgtgcatacagtgattatttgcttaatggctgttgctccctaaggtctacaagggcaggttccccagggtgtccacatagaaggtgctcagaaaaataccttgaattggcctagcttggtaagaacatgggctttggcagcaggaagttcaaatacctgctctactctttattattagtaatgtgatcttggacaacccacatagccttgctgagacctgttttatttgtaaaacatctcttggagttgctgtgaggataaaatgacaacatatataaagagccaggcttcttctagaagaatgtccttgggtagcatgtacatttccatccttccttttagagagtgggggtaataggataccccctcctccaggggtatcccctctttctagggacctacccaagctaggcctttcttccagtgaaacgtgcatcccgagggcttctaggatgaagtagtccactggaaggcaccagctcttccttttatctctccagagctggacagtgcaccaggggccggtactggttccccagctaggagacaccttgggcggggctttgctcgccggaagcacgcagagcgtggggaggagggccccctctgcctgtgtttgtgccaacagcacccgcgctgccgcgtcgggttccggcggccggagtcacacatgatgtcacagacaatgacacaagccggtgtctcattccgacacagcgtccgagctgcacaatgtcacacccgggtgccaaacacttggccccgcgcgacccggccctacgcctcctgccgccgctctccgcgtctccgggggaggtggcccggttcggccgggcagggggctggcgggcgagccccgcgggcgggc

SEQ ID NO: 17991 - DNA, 2300 bp, Homo sapien
tcctataatccattcttcacacaactactggaaagatctttttacactgtaaatctgatctttcctttgcttggaacctttctatggcttttccttgcatttaggataaaatccaaaagccttactgaggcctataagcccccctggtctggcctgagcccacctctctagcctggtcttgtgtaccttttccttttgaattttgtgccccatgattctagccttctgccagttccttcaatgaactcatcaactgctgtaaccccagggcctttgcacagactcgccctttaactggaactacactcctttctactctttgcctgattaacttacaaactttctcttatggtaggtctgttttatttgagttcttccctaatttagttaaacctaaattaggtacctatgttaattcttcagagcataatagcatttatctcagtttgcaattgtgtgtgcatacagtgattatttgcttaatggctgttgctccctaaggtctacaagggcaggttccccagggtgtccacatagaaggtgctcagaaaaataccttgaattggcctagcttggtaagaacatgggctttggcagcaggaagttcaaatacctgctctactctttattattagtaatgtgatcttggacaacccacatagccttgctgagacctgttttatttgtaaaacatctcttggagttgctgtgaggataaaatgacaacatatataaagagccaggcttcttctagaagaatgtccttgggtagcatgtacatttccatccttccttttagagagtgggggtaataggataccccctcctccaggggtatcccctctttctagggacctacccaagctaggcctttcttccagtgaaacgtgcatcccgagggcttctaggatgaagtagtccactggaaggcaccagctcttccttttatctctccagagctggacagtgcaccaggggccggtactggttccccagctaggagacaccttgggcggggctttgctcgccggaagcacgcagagcgtggggaggagggccccctctgcctgtgtttgtgccaacagcacccgcgctgccgcgtcgggttccggcggccggagtcacacatgatgtcacagacaatgacacaagccggtgtctcattccgacacagcgtccgagctgcacaatgtcacacccgggtgccaaacacttggccccgcgcgacccggccctacgcctcctgccgccgctctccgcgtctccgggggaggtggcccggttcggccgggcagggggctggcgggcgagccccgcgggcgggctggcgagcgggtgatgtcacgggcagcggtgggtgggtcactcggaggtgaggcgccgccaggcgagttcagcgagagttcagccgcattgcattaggcaaatgaggcccggcctgggtgggggtgtgtgttaaggggaggacaccgggaccacccccctcttccccgccccaccacctcctccaccacggcttcgctcggccagggactgaccaaaccttgggggagcctgggagccggaactggtacaagggaggacgcccgcccctcttccgtccttgtcccctcgcagccccctcctctccctgtactcggcgtccctctgtactctgtgtactcctcatctggagcctttcccccttcctgcttctctcctctcctcccccttcccaggctgcccccacttgcctgtccacatgccgcctctccctctcggttccctgcgtttctcccgctgcagccggacgcgccgggaatgggttaagccaggggcggtgcctggacggggcggggcggtggaaagggggtggtgcccggaggggagggggcgcgcagagctggggtgggggggccgtggcgcgtaccaccagagaccgagcgagtcgccagctgcccctggcctggcgggggcggaaccgcgcgggatccccacccccacccggaatcctcgccacggagaatccctggagaagccccggatccccggctgggaggaggaagtgctcgttgacccccagccccgcgctgatcccgcccccggcctgcggacttggggagccgctgtactctgcctcggacgccacgagactctagacgggagtcccctcgaggtgaagccgctgagttcccgggccccgccaggcttccctgggagagccgacggaccccccctcccagcacacacaacttccctgcttttcaccgggactggcggagcggccggcggacttagacgcggggacttcagggcagggg

SEQ ID NO: 17992 - DNA, 2300 bp, Homo sapien
cgcctgataagcgtctccccctcccccaactacgggcatccacgtgcttcacattcttggacgtctgggagcgggcggaggtgtgagtggcggagattggtgggagacagatggggagccacatcctgtgcaccccccttgtcctctaatgcaccgaaatgagggctctggggagggaggcaatgtccctagggccctgcagaacccaggccacctcctcccagagccaacctgctcttcccaccttcagtggcagtaaaggggagagtggagaattccccaagagggggctggaggcagctccagtcaccagcggacttccacacacccaaggggacccttccaaggtggtggcattggccccacatattctagactgagtctagttgccaccctcagactccgggtccttcctgtgcctcaaggcaagcccccagacccccatcactcccaacctcacagcctcaggacccgagtccactgacacctcactcacttatatatgcacacccacgctcagactacgggaactggaaacccaggcctctaggtctactaccccaccccagaatggatgtggggacaggtctccacttccccatgtccagtggtttaggggaagggctcaccaatacactgcctgtcctactctctgtgatcctcctccctctccagttctgggccaggaagagctgagctgtccccatgggctaagaagagacaggggctggagaccaaggtctcagatcccagcttctctccagccctctggagaaggtggccaaggcagtggaaggggtgactctggcagccctgctccaactatccccctaggggaggggggtcttgctccagcactgggagaatgagaaaaagggtcctagagtcatcctctcactctctcttcttccaaagtcaagggtgataccttccctcttgtgtctacagccacacagcagattcggccctagaggaaatggtcgggggcaggacaataggaaaagctgggatagaagtggctctgggagggcagaggtgggctgtctgtccatctcaggtctctcttctcccagcaagaggggtggggtaagtcctttgcccttcaaccttctccaatctgccagggcccccccgagacccactccacccctcctccctggcaggcaggagggaggcagcaggtccaggaaggtgggagatcctccacggaagagcttcccctccagcaaagagcccaaagcccaggaggggaagaaacctgagccatctaacaataacccccttgcgcctgctcccgcccacccagtgtacactgcctcacagctgcgcaggaaaatgcccaggtgtacaccctggtgctccgagctcctgagtgtgcacagagcccttcctcccagaggagcctgcacccaggcagggggcaacaaggagagaaagtgaccaggctgccaggatgctaggattctcatcagtgcccctcttaggaaggcacagcccaggacctggccctatccccaagtgaagtcagggtaacaaaaggactcggtggcggagctgggaagggatgcagtcctcatttccagagcagccccagacccacaaaaacaaactcattccccagagaacaaaccggattaggattagggggagagggattcttctcaccagagcagcttctcccctccactcctggggatgaaagcctcaaagatgacagccaagtgtctggggccaggacaacaaccccataaggacccagtgccccttgccaagatggaaggttaggatggcagacgggtgtctgatgaagttgcccctttctgccacaccccactgtcaataccaaagacactgagtgctcccctgacacccactctaatgacgcaagagcaagggctgggggcagcagctgtcgcacaggaaggggctctccctcgggctttggcaagtgggatctggcgggggggccttcccccgggagcagacaaacccacacagacaggacctttaccccaccctccagcctgctgtgaagctgttggattccaggcaagaagatataaactgggggcaaggggcttgggcttcatttctcctggaagaagtgaaacaagagatgaaggaatgttgcttgaaagaaggaactctcaaagttcctcagccctaatctaacacaaattgcacttagggttactggggggagggtgcggccgggagggttcaattgtccagcaagggcaacacgggttaagtgaaaggtagagacaggacctccactacaccccgggactctcaccccc

SEQ ID NO: 17993 - DNA, 2300 bp, Homo sapien
gcccgctcccagacgtccaagaatgtgaagcacgtggatgcccgtagttgggggagggggagacgcttatcaggcggccgctgggctaggggccttcttccgctgccgcggtacacccagagctacccccgcctctccccgggaggaggaaggacggtacagagggccctacgccccctccccaaccatccccaggggctgcgaggggagctgcggaggagcgggcgccagctggattgggaggggagccgctggccgggggcccggctgatttcctgctgatctcctccaggaaaccggccccttgtgcgagcctgcgaacggctcgggggcgtggggaatccggagtggagcgctctgcgccgcccgccctgccaggatggggagcgagggaggggcaccctggcagcgtcggcgggaggggacgcctggcttcctgggtcagttccagtcctctgttgggcgctggaactttgagctgagaaggtgtggtccttctctagcccgagtccttctgcaggaagaggagagattggtgggctgggcctctggggagggaggttagcagggatgggccaggcccgggcagtccctcccccgttggtgtccctccccactccacctgtgtgtgcagggagttatggccgtgtcctaactcttgcagaggctgtgaggattccggagttccccacacctccggccttggtccttgtacctcacctccttggactgctggctggaggcctggggaggtggggcatcgagctctgggttcaaagggcagagcagggaaacctcagagctgggttacctgggtgacaggtggggatgtgctggaggtagggggcaggctatgttacagcctccaaggcagtcaagctgccgttgggtgggctaaaaggaggccttgcccagcctaaactgtagtccttgcctctggtcatctctcccattctgccaaaaaataattttaaaaagcacattctctcagttccgtaaacaccctctgttggactttgctttagctccatgtttttatggctttttgccctctagtctgtcccaggccttagagctgtttacctctcatcctggtatcccccatgactccccataccctagctcccctcgtgacatcccgctctgtacccccaaagctccctcagtcctttctccctctccagtctggttcattttagaagtggggccttgggagaggcggggcccagggcaaacggtggattaggaggggtggggaggtcagtgccttcttcctctgcttgtcggaatgctgaccaagattctaggccatggtccccccaaccctccacatacccccttgcccttgatctcccctccccccaccagtctggattgtctattgttactgcttttacgtcttggaaaaagttagcacaacaaagggctgctttgtggctcaccccctctgcctcctggcctcacccaggccccccaaccccgcccccccagcagctgttctcaggcctctcagcctgtctgatttgcttgtctggcctggggagaatgaggtgggagaaaaccaggccagggcagttggtgttggagtgaagagcagacggcggtggggaggtcaggagagaatctgctgggctggggatggtgtgggcatcaactgtcccattgctgcaggctggtcttggggcagggaaggggatggggggccatagcagtgctggtcagccaggctggcctgggaagtggtgcccaggcactactaagagccaggaaagccctgccaaggttgttggcctagttccctgtcatcagccgcctagcagcccccactgtgtctgcaggtaaggggggagggtggtagcacatagtcagcccctggtgttcccatgcttccttcctctgtgccccaattttagggccatgtgatttggggctatgtgactcatgtctgtaaggtgcttgggccaggagctgtgggcacctttaaatgccagccagtctcatgtgccggagtttggggtagggctaggtaggattgtggaatatgggaggaggcagggatctgtctacctagggaggcatcctcatccatccttggccctggacaagagaacttgaacgttggtaggggcctcaggacgatgctgcgtggccccttgggaatctgggattgtcctggtcatagttcttatcttgcacccaacacccttagctgcccaggctttggacatggatagcccctacccaacccagccctgttctgcctacagtgatgggcatggagccagacactggggaggatt

SEQ ID NO: 17994 - DNA, 2300 bp, Homo sapien
attcagaaacacctcccactgctgtgtggggcacaggagagctgagaaagacgccaggaactcagaaggacagggtggggtgatggcggggaacgcacagcctggtaggcaggatgcggtgaggcccgcaaggtgcagtccgatgacggcccctggatttctcgcttaggtcctgggtgatcttatggagagcagcccactggctggtgaagggggagggcagacgggaggggagacacaggagggggatgcgctgcataggcagcagctcttcgaatgcccgcaagtaggaagaagggggtggttggaagggaaggcagggccgggagcgcgtgtgttttgggagctttctcctgaggacagaagggactttcccgtttatagcctgggggagcagtagcggcggggaggatgaagatggaggagggaggcataacacacgtctgggttgccctctggcccgccgcccacccccaccccacctccatgaaagcgcccagcccccgcctcgccacaaggggtactgtgaggatgttgctcataggctcccgaggattgaggcctgcccggggaaagggagcctctcctcctcttccctccctgggcggggtctcttgggagggggggacagacctcctgtgatgccctggcaggtgggctgggttagggtggtagggagggagccattgtggctgcagctggcatcggatcctggccacccccgcagtgcatatcagagatcacacacacacgcgtgcacacacagaggtcacgccggatgtacacatgcacacatagcgcacaaggatgtttctgtgtacaggtgtgcacacgcagcccacacagaatggacatgtgcgtgtgtgcacaatgcactcacacaaagctcacagggatgtgagtacacagctctcaaggggcatatgtttctgtgtgcatgtgcacacagctcacccgggagggttacgtgtgtctgtgtgcacaagtgggcctcacgcagggtgtacacatgcgcgcacatgcacagcgctcacacagggtgtacaggtgcgcgtgcacacagctcacagtgcttatgtgtccgtgtatgcacactcgcagagagcccacagggggaccactctctctctgaacacagagagtgcctgagaatgctggcatcacagttgtttttgtccccagtaaaacaaccactctccaccttccgctctgttctccccctcgggtccactctctctcagggtcctggtctccttcctttccacctgggtggtggcatccaggacctgcctgagttcattctccgcccccagcccggcctgccccaggtgccgccggcagccactgggaggcagtacgaggcaagtgcgatgccgcccgcgggccgtccccacaacgcgtctcctgccggggcaggtcccgcgacagctctggtggaagcagcttccggcttctgcggtgcgggcggaggtggcggggtccggccctcgccgtccagtccgcgcgaggcggtgcccgcccctagatggccagatctcggcggccggtggccggtgacgccttgccgcggccgctgccgcactcgcggaggctggccggcgccgggtgcgcataggccggcggggcgcacggctcggggccggggcgccgggagggcagggccggtggcggaggtggcggcggcggcggcgggagcagcttctgcgcctcttcgtgtgcacggttgcagcggttgtcacgctccccggcgcgcgggcggcccttccagagcaggtggcccagctcggctacgctgagcagcgccgacagcagccccaccgcgaaatagaagagcacgaagacggtcttctcggtgggccggctcacgaagcagtcgaccgtgtgcgggcagggcggaccggcgcacgcgaagtgcggggccacgcggaagccgtagagcagcgcctggccgcccaggaaggtcagctcggccagcaggcgcagcgccacgctcagcaggtagcagcggcgcgcgcggcgggcgcgcagggcgcacggcgcgcactgggcctcgggcagtccgggggcgcactgcgccgccgcctcagcgccgcccgcctccttgcctgcccggtgcatggagtagacgacgaacagcaccgggggcgccgagagcagcaggatgtggaagagccagaagcggtagtgggagaccgggaaggcgcggtcgtagcaggtctggcgacagcccggctgcagcgtgttgcacacgaactcctcttgctcgtcctcgaacacggcgccgcccaccgtggccagca

SEQ ID NO: 17995 - DNA, 2300 bp, Homo sapien
ggcacccatggctgatagggagaggaactgtgaccaaggaggtgagtcctgctgcccttcttcagaggggcaggcatgacctccctccagtgcctgcacccaccagccccacacaaggctggcatagaggcaacccctcctggggactgtcaggccctgggacagcacctgggaagcccagccaggctggatggaggacagttccatgaaaggctcaagagcttgggctcaagaactagttgggcctcgcataggcctggatctgctatttaccggctgcgcgacagcaggcaagtggcttagaccctctgagtctcagtttcccctggtgtaaatagtgccctcatgccaccattgacagagaatcgaatgagctcattggcatatggagctaacggggttccacacggggactggcccagcaggtgcataggtgaagcgggttttgctatgcactcaggcggacccctaggaaggcagagcagacaaccaaacatctcagcctggagtgtcccctccctgaccactcagatcaccgtcggtcacccttactcccttctccataaaacagcttcccccgccacccagggcagtaggagggaactctcaattcagagccttctggggggaaaaagtcctatttttcacattataaaataacatgaggccgggcgcggtgactcaagcctgtaatcccagcactttgggaggccgaggcaggtggatcacctgaggtcaggatttcgagaccagcctgaccaacatggagagatcctgtctctattaaaaatacaaaattagctgggcatggtggcacatgcctgtaatcccagctattcaggaggctgaggcaggagaatcgcttgaacccgggaggaggaggttgcggtgagctgagatcacaccactgcactccagcctgggcaacaagagcaaaactctgtctcaataaataaataaataaataaataataaaataacatgttaggccgggtgtggtagctcacgcctgtaatcccggcactttgggaggctgagataggcggattgtttgaggtcaagagttcgagatcagcctggtcaacatggcgaaaccccacctctactaaaaatacaaaaattagccgggcgtggtggcgcacacctgtaatcccagctactggggaggctgaggcaggagaatcgcttgaacccgggaggcggaggttgcattcagccaagatcatgccactgcactccagcctgggcgacagagctagactccatctcaaaacaaacaaattaaaaataaataaataaataacatgttcattatagtaaagctggaaataacagaaaagtgggaaggaaaccaaagattttatttaactatcaaagccaggcacttgggatattttaatggttttccatatgggatttttttttttttttttttttttgcaggcacaagggtttttttggttctctgtaatatggttgggaattcaatattaagaagtagagaatcccagctactcaggaggctaaggtgtgaggatcacttgaagccaggagttcaagatcgacctgggctatgtagagagaccccgttccaaaaaagatgtaaagctggaaggaaacttgggggtcagctggactggccgcctttgttgacaaggcaggaaagcctggctcagtaccgccgaatgatttgtccaaggtgagcggtggcagagctggaaccagaagctgttagatgtttgctgccccttaaactccagcaccaaacctccctctgtccccgaagaccatcttcacagggcatggttagtgcgtagtggatctaggctccagactgagggtctgtctgggaagggcttctaggaatcccccagcttcctcgataaaggatgtggctctggttacccccctcccccatttccagatggaaatttagctaaagagtgagggccacagagcccagcaaggggcgtggtccgtgcctgttcccaagggcggagccagccagcagggtcaccctgttcctttaagagaagggggagcgctagcccctctcagccatcctgtcctgtcctccatcctggccaaatccgaaagggaaaatgaaagagggagcaggaggcgccggtcccagccacctcccaaggtccctggctcagctctgacaccccagtcccggccccagggtgagtggggttgggtggcggtttaggggcaccaggggcgtgtggggacctgtgtaagtgtggggtggggaggatctcaggagatgtggaggctggaggcacaggaggccaggg

SEQ ID NO: 17996 - DNA, 2300 bp, Homo sapien
gtttggtaccaggctacatggtggcaaggattctgctagtccacgatacatctttacaatgctcaggtaggtatgctttcactttctagtgacttgccatttccagttttgaaacaatgtgagatttagttcaccaaaaatacaaaaactcagttaatcagaagatactggcatctagtggcagaggccaggggtgaggcttatacaggaaagcccccccataacaattatccagtgcaacatgtcaattatgctaaggttgagaaatcctgatgtagagcttgggactgagtaaaggagactttgattcttcctaaatatcacaattgaaattttactcctttacaagcctatggaaagtatattatgaatggtcaattttcagctgtcatcccagtcaccctttcagtggcattcaaacagttactaattgctccatccttcttgaaactctttatttggcctctatgactgtagactcttctggttctcttctaccttattagctttctctgctgggtccttctcaccttcccaacctctaaatactggcccattccagggctccttcatcagatctctttccaatgcctacactcaattcccaaatgatctcccattcatccgttctatacctttaaatctccagtcttggtctctcccctgaactcccaacttttatgtctgactgccctcttaacatttcccacttggatatctagttaagtatctcaaacataagtctaaaaccaaatccttagttttcctgtctcagtaaatggaatgccatgccatccttctaattgctcaggctaaaaaccttgtcacccttgactcctttgcttgatacttaacatccagttcctcagccaatcctataggatctgcattggaaaaatactaagccacccccatctcatctaaactattgtaacatatcatcttttcttaaagcagccaattattttttaaaaaataagtcactctgattcagaaccttcaactgctcagagtaaaatctaaagacctattttagctaaccagacattatgtgatccgtgtccccaccttccatgtcttttgattccttctcataccatctcctctccagccacactgtccttggcctatactcaaatataccgagcacatttcctcttcagggccttttacttactggttcctttgcctgcaacactctttctctagatatccacatggttcagtccctcagtttgttttttgttgtttttttttcttttgagatggagttttgctctttttgcccaggctggagtgcagtggcgcaatttcggctcattgcaacctctgcctcctgggttcaagtgattctcctgcctcagcctcccgtgttgctgggattacaggtacacgccaccatgctcagctaattttatatttttagtagagatgaggtttcaccatgttggccaggttggtcttgaactcctgacctcaggtgatctgcctccctcagcctcccaaagtgctgggattacaggcgcgagttactgcacctggcgccctcagtgtcttttctctgctcaaatgttttcctatcagaaacggcttaactttccttagcacctcttcagtcactttcccactttttcttctcttgtttatcccaccacctaacaaaatatgtgttaattgcaaacttctactggactgtgagctccttgaggattgagactttatgtccatgtgcgtgacacatagcaagtgctcaataaatattgttaaatgtatattagtcagcaagtaaaaccaagataattttcatgtataatacatgtcctttccataaaagttaagtgtgaaattcagtatttttgtaaaataacattctttgtttcttttctttagctctttggctcgattgttatttccaccaaaagatgatcacacgttgaagtttttatatgatgacaaccagcgtgttgagcctgaatggtacattcctattattcccatggtgctgataaatggtgctgaaggaatcggtactgggtggtcctgcaaaatccccaactttgatgtgcgtgaaattgtaaataacatcaggcgtttgatggatggagaagaacctttgccaatggtaagtattctgtgtgtgttaagagccttaacttttccttgggtttcagttgaatagattgtatgattaaagatgatgcaaacataaaatttaatttcatactttagatttattgttaaacgctgttgtgatttccgtctagtatcacatttagaaaacatactgtttttttaaatgc

SEQ ID NO: 17997 - DNA, 2300 bp, Homo sapien
gctggaggccagggagccaaaggtcaagagagcagaacaatgccgaagcaccatgcctatggtttccgagtgcccctagcccatgggcaacttccatccttggcttcctgccacatcatacggctccccattggccctcccttgacacactgtggttatgtaacaatggttgacctctggtttcttttagaagaagaaaaaaaaaattacatccacaattgtcacaccagcctaaggaaaattcctgctacctaatactgtcagcccactgtttaccttacacttctctcatgtaaccctcacactactctgagatcatagttaattattctttttaggagaggaaacggaagcaccgagaggcttcctccatcgaaatgacacgaatggcaaattgctgagttgggactgaaacccaggtagaggaaggaagcaatgaatggaaagaggtggctcagctggaattagtaggcactcaaattgtgcagtttttttttttctggcttcttgtaagggtaataactttgtttaatccactcaaacatttatatgtaagagtaattttaaaacttcagtcttcgccgggcacagtgactcacacctgtaatcccagcactttgagaggctgaggcgggcagatcacttgaggtcagaagtttgaaaccaacctggtcaacatggcaaaaccctgtctctactaaaaaaatacaaaaattagccaggcgtggtggcaggcgcctgtaattctagctacacgggaggctgaggcaggagaatcgcttgaacccgcgaggtgaaggttgcagtgagcctagatcgcgccattgcactccagcctgggcgacagagtgagattccatctcaaaaaaaaaaaaagcaacaaaaaaacaagcaaacaaaaaagcttcagtcttggcatttccttgtcaaattggaacagctgttctggactgcagggttcacggaggtgagcaaaagtagccagtcggagggtatctggccagctggctgcggaaaaggtttcagccccggacggctgagcccaccctcagctcaagaggctaccaccacaagttatccctttcgatttaccagttgcagtccagcgctgctctactggggacctgaatgctgccctccattttgcaaagcctttctacatccttccactatatggaacccccaaaccacaactgtggcacttttattttaattatttttattatttatttatttatgtatttatctcttgaggtggcctcgctctgtcactcaggctggagtgcagtggagcaatcacggttcaaggcgcctcgatctccgatccccggggctcaagcgatcctccctcctcagcctccggagctggagttacaggtgtgcgatgcctcgcctggctattttttttcctttttgggtagagacggggtctcgctatgttgcccaggctggtctccaactcctaggctccagcgatcctcccgcctcggcctcccaatgtgctgcgaatacagactccagccaccgcacacagcctacttttatttctttgaaaaatgaattcgagggtaaagggggcggggttgaggcagatgccagaatctgttcgcttcaaccaagcagccaggctgcctgtccagaaagccggcactcagtttcctcaggaaaacgaagctaaggctcccattcccctcgctaacaacgtcagaacagaggacagtttttagatttcagggatcttaaatagattggcagttcctggagaataaacatcctttgcttttctcctgcacacttttgcctcaggccaccccttcccgcttccaaagcccatctcttccaagctttccgcacgagaaaacaagtgagcccttctcattggccagattccctgtcaatctctccgctatgacgccgagtggtgccttttgaagcctctctagtcccgcctccctaacctgattggtttattcaaacaaaccccggccaactcagccgttcataggtggatataaaaggcaagctacgattggttcttctggacggagacggtgagagcgagtcagggattggctggtctgcttcgggcgggctaaaggaaggttcaagtggagctctcctaaccgacgcgcgtctgtggagaagcggcttggtcgggggtggtctcgtggggtcctgcctgtttagtcgctttcagggttcttgagccccttcacgaccgtcaccatggaagtgtcaccattgcaggtacggctcgcgggggggactggcggtggagcctccgcgcggcccgggcatct

SEQ ID NO: 17998 - DNA, 2300 bp, Homo sapien
tcagcttggctgacctgcagctttctaggccgagacaaaaaaaaaaaaaaatccacagtgggttactgattattcctggacaggtacgcttaacctgaaaccagctccagtacagcagaagcctttgtagggaagaatgggtgggaattagcgggggcctgagagggaacctaggagatggatctttgctccaaatgccactccagggctcttctcaatttgggcaggattgggcaaggctgggggaatagggatcaataggattttacagagggtcaagccaggcccaacactagcccaagtagcaacactgggtgaattaaaaaagcatcccttccttaaaattcttttttttttttttttttgagacagagtcttgctctgtcacctggactggagtgcagtggtatgatcttggatcactgtaacctcctcctcctggggttcaagcgattcttctgcctcagcctcccaagtagctgggattacaggcatgcgccaccacgcccggctaatttttgtatttttagtagagatggggtttcaccgtgttggccagactggtctcaaactcctgacctcaggtgatctgcccaccttggcctcccaaagtgctaggattacaggcatgagccactacgcctggccttcttttttctctttctttctttttttttttgagatggagtctcgctctgtcgcccaggttggagtgcagtggcgcaatctcagctcactgcaagctccacctcccgggatcatgccattctcctgcctcagcctccctagtagctgggactacaggcacccgccaccacgcccggctaactttttgtatttttagtagagagggggtttcaccgtgctagccaggatggtctcgatttcctgacctcgtgatctgcccgcctcggcctcccaaagtgctgggattacaggcgtgagccaccgcgcccggccttctttctttctttcttttttagacagagtttccttctttcacctaggctggtgtgcagtggtacaattctagctcactgcagcctccaactcctgggctcaagtgatcctcttgcctcaggctcccgagtacctgggaccacaggtgaacgccaccacacctggctaattttaaaatttttttgtagagacaaggtctcactacgttgcccagactggtcttgaactcctgggctcaagtgatcctcccgcctcagcctccaaaagtgctgacattacaggtgtgagtcactgctgcaggcccctcaaatccttcactgccatctgggaaatgatcacaacagctctacaaatacacaatgattacaaggaatggtgccccactggagttgttcaacgcaaaacttgcacattgcaagtggcaatctcccaggcctgcctccctccacgagtgggtctgaatgggcctgagaggcaaacatccaagaaggaggaagaggctcggcggcacctccctccccgggagttctgctgattccatcttggggaagcagggtggaccagggcccaaatgcgccctggggagattgcgggggcgggagaggttgcaaggggcaagtggcaagagcctgttaacgtcttagggcctccaggcctttctgtgcccctagctgtgcctgtacgctttaccccacctcaggaggcttggtctccagcggttgaggctggaagcaccggggtgcggtggaaagggctctgtccaggaagaccggatccgcagagccgggagtccgggctaggaagtccctttctcggtgggagactgaggccgccttggcggggcgggacgagactcctccgaggtcgggaaagggggccccgcagcagccccttggcttcccttctcccttgcctcccctccggggctccggttcagaggcactctgggcgcctgctacagcttccaaactgcgccgcttccttcttcggcagaaaaggactttcagatgcggcggcggcggcggcggcgactcaggacagcgccccctccccctaacggccgcctctccctctccccctcgcccgccccggctcccccacctctgggaaggcgctgggggtgtggccagggaccggtataaagtccgggggagccggtcccgggcagccgctcagccccctgcccctcgccgcccgccgcctgcctgggccgggccgaggatgcggcgcagcgcctcggcggccaggcttgctcccctccggcacgcctgctaacttcccccgctacgtccccgttcgcccgccgggccgccccgtctccccgcgccctccgggtcggg

SEQ ID NO: 17999 - DNA, 2300 bp, Homo sapien
tctgtctaaaaaaaaaaaaaaatccctgataactcttgaccagcagaaaggtttccccaccccacccccaaaaaaagaagaagagaaaggtttcctgaagagggtgtggctggagccattgagcagatgtgttggcacctcctctgtgggagggagaggcagggggatggacaaggtggaattttttttttttccggtgagacagagtctcactgtgtcacccaggctggagtgcagtagcacaatctcggctcactgcaacctctgcctcccaggttcaagcaattctcctgcctcagcctcccgggtagctgggactacaggcatgtgaaccacgcccggctttgtgtgtgtgactgtgtgtgtgtgtgtgtgtgtgtgtgtgtgtgtctttagtagagatagggttttaccatgtgggtcaggctgatctcgaactcctgacctcaagtgatctgcccacctcggcctcccaaagtgctgggattacaggcgtgagccaccgcgcccggccacaaggtggaattctatccgaatgcactctttcttctctgtccaggtgaggacagcaatgacctcatccgacacttcctcatcgagtcgtctgccaaaggagtgcatctcaaaggagcagatgaggagccctactttggtgagactccccagcctccaggctcccccgggatggggggccagcgaagtctccgttgtgagctgaggggtgggttggggaagctctactcatgcagggctgcttgcttcctttcagggagcctctctgccttcgtgtgccagcattccatcatggccctggccctgccctgcaaactcaccatcccacagagaggtgggtctgggccccaaagaggcaatgccaaggtgggggacctgtttgttctcattagaaatggggttcactcctaccttgttggtggattattttagtgtcacggttaaaactgtgtgcactggagtcgctcaacatctccacctcctagctgtgaaaatttgagaatgttgacctctctgagcctcagtttcctcatcatacctacttataggattgctgtgcagaccgaaagagatagcccgggcaaggctcttagcgcaatgcctggcatagaatggatgttggataaatagcagcctgctttgagagggtgaaagagcctaaatcaaatagtttggagaggttttctctttccaggtccagcatttgttgagcactcactcacccattcatgcttcactacaagcttgtgaagtagactttgctgttatcatccccatttcacagataagaaaataagggctgggcgtggtgactcacgcctgtaatcccagcacttcgggaggccaaggcgggcagatcacttgaggtcaggagttcgaaaccagcctggccaacatggtgaaaccccgtctctactaaaaatacaaaaatttagctgggcgtggtggtgggcgcctgtaatcccagctactcaggaggctgaggcaggagaatcacttgagccggggaggcagaggttgcagtgagctaagatcgcaccactgcactctagcctgggtgacagagcgacagagcaagacttcatctaagaaagaaagaaagagagaaagagagaaagaaggaaggaaaggaaggaaaagaaaacgagggttctagatgttacgtaatttgcccaaaggcccacagagtcagaccttgaacccagatcagcatgccctatccagagcatacagccaggtaggggggcagctcagatgaaatagatcatctcaggggtgtgcaggagaagctcgagaagggctgtttctggaagggcatcaaggcaagggagccccagaggagcgatggtgagagcctcctcgctttctgcaaagacaggtcaggggttgagacagggtccaaaagaagtgaggaggtcaggggcctgtgaggacaagatcatggcagccatctaagaggtgggggggcgaggaggggatgaagagatcaaaagggttgcaaactaagcatttagggagcccaaagtggcctgtttgcctaattacggtaatcacacctggtttgagtcacttcctggagatgggggtggaggtgggagatcttcaaagggattcatgaggcctgttcctgtgagaggggtccattcactccacccccgcccctttggggggcctgtttctttgccttggctcagaactgggaggtgcagatggggcctcggactctacagacagcccagcctcctgccagaagaaatctgcgggtgagtggtacaggaagggaggcg

SEQ ID NO: 18000 - DNA, 2300 bp, Homo sapien
gcagtcatctttctaagcagagagatccccaccttagccagaaaagggctccatttggccaatactgtccccaaaaagcaggcaggtaggaaatgctcctctctcgagcctcaccatgggccaggctcccggctattgtatttcatcctcatcacaaccttggaagactggtttcagatcctcactttgcagataaggaaactgaggctcagagaggttaggaaagttgcacaatgcccttggctgaaaagcagcaaagccaggactcaccccaggtttgttttgctacaaagctaggctcttcctccacccgctgagcagcaagtcccagtcagctgccagcccttgctcatctgatgtaactccccacccccaccgtggcccaagcaagctcagacagaggcagtaactgtgagcagggccagatggccctacccaggagcgggctggggcaggctggggctccacagtcataatggggaggaacagtgcatgtgccagggccccaggcaggtgggagctgagggtgcacgttctccccaatttccccagcctccatcccaggaagctagaggcaagactcacactcttcagaaaggagcggctcattaacccccaccttcctccagctttgctggaacagcaccaaggacaattcccttcccccaggtcaggaggaagggtgttcatcctcaccttggggagaacctcagagcagcccactgcaaggccgacctcgggagaggaacaaggcctcagaatcccaagagtcctggatgccccgaccagggagtggaaagagcgctggagcgcgtcggcagcctggggtgtgttgggtgacccctgtgtaccagctaccatccccaggagatccatagctcaagaatgcagcaagccctgtgctcagggagtgcctgctccaaagcagggttctcagactccactgcatattcacatgccctgggtggcctcgctaaaatgcagattatgtttctgtaggggtggagcccaggtgatgtggtcctgctgagccattcatggtctactggactcacctgaaaaactggaaaacaaacaaaactgaggcctgggttcaccccctggagagtttaatctaattggcacaaggcgcagcctggggtgagtctagtgtgtaaccaagcttgagaatccctgctttcactgcaggtacagagaaaccacttcctttttttttttttttttggagatggggcttcactcttgtcactcaggctggagtgcagtggcgcaatctcggctcactgcaacctctgcctcccgggttcaagcgattcttgtacctcagcctcccaagtagctgggattacaggtgcccggctaatttttgtatttttggtagagatggggtttgccatgttggccaggctggtcttgaactcctgacctcaggtgatccacccgcctaggcctcccaaagtgctgggattccaggtgtgagccaccgcgcccagcctcagagaaaccactttcacacatcctgagtagcagaggcatcagaaagtgtcactggtacaacccatcaagtggccatttcaacctaggaacagggcacagacaaaggagagagttgcccagtttttaagcacctggtctgtgccgggaacagtgctgtgctgcctacatgagtttcacttcatcctttttgtatcaccaaaaggctgaatgcagttgccccactttacaggtgtggaaactgaggccctgggtggtgaagtcttttggccaaactctctcagaaaataagtggcagagccagatctgaagcctgggtctgtctgattccaaggcctgggtcccctactgcatctcctcacccaagggaagttgtcacagggagggtgactggaactgggccctgaaggtggagttgggctctcctctctgggcctcagtgtcctcgtctctataaaagaggggggacagaatgaccttgaggatacttccagcctctctgttctatgagtccaggctcctgcatttcaccaatgctctgcttttctcccccaaagacataaagtacatcgaggtgacctccgccagatcaaggtgccacgatggcccccagcactgctccagcccctctgtcaccccgcccttcggctcccttcgcagtggtggcctcctcctttccagagacgtcccccgagagacacgaagcagcagtgagagcctcatcttctctgggaaccagggcagggggcaccagcgccctctgcccccctcagagggtctctcccctcgacccccaaattccccca

SEQ ID NO: 18001 - DNA, 2300 bp, Homo sapien
acgagaagaaagagagttggggggtgttggtgggggctggggaccagcagcaaagctcagagcaggcaatgggagtgtaaccagcacattgcagctctgtacagttttcttggcagcctcagtcccagaacttcttacctccttaccaagccccacctacaagaaactagcatgtggcattaaggttagacaatggaaaggacttttcacagtaaggaaaatgaggaggttgagacatctctttcccaaatgagccccaaggaaatgaatatcatctgatgatgtcactccccagctcaaaacttttcagagcctccctgttgccctcagggttgagctggcagtcctgagcccagcctgcaaggccctacgggatctggccagcctgcctcccccgccccatctcctccacccaccccaggtgctctgttactcaggtgctcaatagggtcttgtgagcttccctgctggccagacttttgcacaaatggtcccctctactttgtttatttatttgtttatttgtttagttagagacagagtcttgctctgtcatccaggctgcagtgcattggctcgatctcggctcactgcaacctctgcctcccagcttcaagcaatcctcctgccccagtctcctgagtagctggaattacaggcacgtgccatcatgccagctaatttttatatttttagtagagatggggtttcaccatgttcaccaggctggtctcgaactcctgacctcaagggatcagcccacctcagactcccaaagtgctgggattacaggtgtgagccatcacgcccagctcatcccctctaacttaaatcttcctctctgcctcctcatccctactcaacttgcgcagctacctcttgcttttccttcttatctccctttgcgtgtcccttcctccaggaagacctccctaacctccccactgaactagaaaagtgcactgtcccttccctcctctctcgtgacactgcttacagttgttcacccacttacttgtctgtttcaccaaccggcccaagtgcaggtgctcagacatcaggcagccgagggcccagtccttctctacacttgttggcagtgtgacccttgggcaagttacctacctctctgtgcctcagttctctccctgtaaaatgggataataatacctaccttatacagttgttataaggatttttaaagcctttatctaaaaataccagagcttatgtggataataattactcagcaaacgttaggtagtatttacttaataaacacacctgggatgtagtagatgttcaataaacatctactgaagttattttatttaatgatcacttacataatgcttattatgtgccaggcactgttctaagcacattacaatgattaacttgttttatagacgagggaactgaggcacagagaagtcaattaacttgcccaaggttatacagctagtaggtggtggagccaggctgcaaactcaggtggtctggctccagcatccatgcttttaaatgaatgaataacttagcctttgtacggagggtgggaggcaggggcttcacctacagaaattactccgttcccactcttggactctttcagatcctgggagctcctggttagcaagtgagatctctgggatgtcagtgaggctggttgaagaccagaggtaaactgcagaggtcaccacccccaccatgtcccaggtgatgtccagcccactgctggcaggaggccatgctgtcagcttggcgccttgtgatgagcccaggaggaccctgcacccagcacccagccccagcctgccaccccagtgttcttactacaccacggaaggctggggagcccaggccctgatggcccccgtgccctgcatggggccccctggccgactccagcaagccccacaggtggaggccaaagccacctgcttcctgccgtcccctggtgagaaggccttggggaccccagaggaccttgactcctacattgacttctcactggagagcctcaatcagatgatcctggaactggaccccaccttccagctgcttcccccagggactgggggctcccaggctgagctggcccagagcaccatgtcaatgagaaagaaggaggaatctgaagccttgggtaaggatttggggcacagtaccaggaggggggcttggtgccagacctcatgaggaagaaggattttcctatgtacagagaaggggaccctgtcctgttgggaggtgctgtgcaaacctaaccaagttactaacccctctgttttctgtgc

SEQ ID NO: 18002 - DNA, 2300 bp, Homo sapien
accaggaccagacagttttactggtgaaatctaccaaacatttgaggaagaaataggaccacttctctacaacctctttcagaagatagaagcagaaggaacacttcccaactcattttatgaggccagcattgctgaaaccagagatacaaaagaaaactagacaccaatatcactcatgaacatagatgcaaaaatcctccacaaaatgttagcaaattgaacccaacaatgtattagaagaattatacagacccaggcatagtggtacatgtctgtaatcccagctactccaaagtctgaagtgggaagatcacttgagtccgggaggttgagaccagcctgggcaacatagcaagaccccatcacaaaaaaaaaaagaattatataccatgaccagggggttcatcccaggtatgcaaggagggttcaaaattcaaaagtaaattaatgtaatctatcacatccataggctaaagaaaaaatgtcatatctatagatgtataaagaaatgccactccatccatcccttgatgatcacggcaaagggcagtgatgtggtgttgggcagggtttgtgaggcagctggggctgaaatcactgttctgagaccatcttaagctaaaggaagcagctgggtgtgaaacaaaagagccaatctgccaagaaagaccataacccccaggtatgggtctgtaaggctggaggaccccctggccctgaagaaccactgcagaggctatccataccagccccaggggagatggccagggttaccccggagttgccacagtctctgcccaacacttcgccctactgtaacctgccccttccactcaagaaactcacgagtcgcccctcccactctcccacaatcatgagccacagcctcatgggggaagccgccatgtgcagtgacatccactccagggcaggagcaccacatttttcatccaaagacataattgctcatcaagccatgtgccaacaaggctgcatggacacctagggacaccttttatgtcaccatcaggaaggggcaccttatataactttccatagctttgctcaccggcctcccatgcactagttcaccatgcctcagtgaaaccccagggcatcaaaaactgtaaggccagaagcccttccactgggcataatgggggcatggggcaacccacccctgagattagcctactgggatcaccatgagtccctgggctggagacttcgccagctccctcacttcagaccgctcccagaccaggctctgccatcagcaccctcccctcaccatgtctgaacacctccttacaacattctaggacccctgcccctctagaacagggagagagttggaaccatggagaaggagctaccagaccagacttctgggcttcctgatctcaccctccaatgtcctcccctcagggaacttccaccctggggcacagaccagacgagggacagagatagcccatgagtgaaggaacagctataagccccttctcaaagccctccagacacttcagcctcctttccttgagttagaggccccatcccaagctagagtcattactgtaaaaggagagaaagaagaaaagacaagctcgtgcctagccttacttccagtgggcccttaccctgtgcctgtcccagtgtgacccagcacaaagggggactgcagagggtctcctgcccactggcatcctgctttgtcaaggccctcactctctgccagctctgccaacccatggcctctgccccagccagcacctgaggagtgcccactgcacaccttgattctagctatgccctgtccaagcaaggactccctggccatgtggtgccacgagaagcccaagcaggaacttgggagcccctcacacacacccagacccaaaacccaccacccagtgcttcccttcctgctgcctgtgccagccccacctgagctcactggatccagcaggggtggggcctactgctgtcagggccacgtgcagggcccgcccggaggggaggagagaaggcgggcaagctgcttttaaggcaggtctggaggtgaactggcgcctctcctgactcttcacctggactctgagtcgtcttggtcccaggagccagtagtgaaggcaacagtctgcccacctgtggacaccaggtaggtgcctttattctttaagaagagaggaacacggagcacctttgctggccctgattcatttaaacatttttttttttttttttgagatggagtcttgctctgtcacccaagctggagtgcagtggcgcgatct

SEQ ID NO: 18003 - DNA, 2300 bp, Homo sapien
atgatttgaggtgctcatgggacatccaaagtgagatgtctgagggagagctgatataaagatttggaggccaaataaaagttagggctgtagtttgatatttggggctcatcatcctacatcaaatacagatgagttaaggggccacagaatgctctggaagctgcacaggatgactttggtgccctgtgcatccaccgttggcattcgctgttcccctgcatgctgaggcttctgcctgcatccctgcagttctgccagaggccttctctgcagacagaagcaggctgtctgtcctgtgcatgggacaggttaggagtgttgtggagttgatgaccccaggagcagccttcagccagtgacagatgcgaactggatgatgaaaaccatctttacttcctgtaggtgtgttctgccatctctcaggggcttccagtgggattgcgtttgagttcccagttgcccacaggggcttgtcagtcctcctccattggcttcctccccctttctgtgtcactcttccatttccctacagtgcttcctgggatcacctgccaagtcaatgaatctcatgctcatccttgtctcagagtctgcttctggggaacccgttctaaaacactggtttccttcagtaggatgtgcgtctgcattgactgcttcctgtcttgattgcttcttcatgtttccagcatgtcttgactctcaactggcctggaagtggcttcagggtgttttcatctctgtgtctccagcaccaggatgccaggggaagggattcctcagcaagcggttgttggatatatgaatgaataaacccaccagtggcttctcattgcttttaggatcgagacccaactgttcaataagcttcacaaggctccttcccacctctccacctccacgtcccgccaccctcccccaccctctgatggtgcgtgtggcacatgccggtctctgcctgactgctccttcgccaagccatcctcttgacacagtactagttcacacctcctcccccatccttcccttagcactcctccatttcccactccccgcccccttctcagagaactcaggcatcctctctgcagcaaagatgtccctgaccaccgtccccagcccagaccagttggggccctactgttctaacctcctgtagcactctgtgtatttcttcatgctccctatcattgacttcggttatgaatttttttttttttttttgagacggagtttcgctcttgttgcccaggctggaatgcagtggcgcgatctcggctcactgcaacttccgcctcctgggttcaagcgattctcctacctcagcctcctgagtagctgggattaccggcatgcaccaccacgcctggctaatttttttttgtatttttagtagagatggggtttcaccatgttggtcaggcttgcctcgtactactgacctcaggtgatccacctgcctcggcctcccaaagtgctgggattacaggtgtgagccaccatgcccggccttggaattatttaaataatgcttagaatgatgtttctcaaacttttctgattatgaaccacaggaagaaatacattttatgccaggacccagttcacgtaatacatgtataactgaatgcttatcctcactgcttgggctacactaatattttctatcccattctgtattgcatttaaaaaaatgctggctgtgactcactaaatggactataggctggcagttgggaaaaaggtctagacaacaagatagatgcctgcaaattcaggagagtagggacttaattcacttgtactcactgctgtcccccagggcactgcacagtgtctggcacccagaaaggtgctcaatcaatatttgttgaatgaccatatgataggaacaaatatgtatgaatgagtgaatgaattgcctgccccacccagacaggaaactgtggcttctatcagattttgctgttaccgaaaaataccagcccacttcctgtggctttgatctgcagccttaattctaaactgccctgcctcagccaacagctatctgcagctcatttcctgctttctggccatcttatctctgtcttcaagcattcctcagctttctctttccaggtaagtatacccagagccccagttcttcctcttgcaactttggcagcacagggtggggctgcccttttgggccaagtactatcccagatctcaggctcctggggtgtggggcctttctgggtcaggcgtgtccttctgattccagcctcctggggggcaggtgctagggctgggcc

SEQ ID NO: 18004 - DNA, 2300 bp, Homo sapien
accatatgcaacaattagctcaaaatggatcagatctaaatgttgcagctaaaactataaaagtcttaaaagaacatatacgaataaatctttgtatacttgaattatgcaatggtttcttagatatggcaccaaagacacaattgacaaaagaaaaataaatcaattgaacctccacatttaaaactttgcgcttcttttgccagagattcaggttttaaaaaacaaaaagcctttgtgcttcaaaggacgctatcaagaaagtgaaaagatgatccatagtaagggagaaaatatttacagatatgtatcagataagggattgtaaccagaatatataaagaagtcttacaactcaataataaaaaataaataacccaattttttaaatgggcaaaggatttgaatagaaatttctcaaaaaataatacaaatggtcaataagagcatgaaaagatgctcagcataggtagtcattaggaaaacgcatatcaaaactacaaagaggccgggcatggtggctcatgcctgcaatcccagcactttgggaggccgaggctggcagatcaccttaggttaggagtttgagaccagcttggccaacatggtgaaaccccgtttctactaaaaatacaaaaattagccaggcatggtggcacgtgcctgtagtcccagctacttgggaggctgaggcaggagaatcacttgaacccaggaggtggagactgcagtaagccaagatcgtgccactgcactccagcctgtgcaacagagtaagactccatctccaaaaaaaaaaaagaaaaaagaaaaaaaacacaatgagataccactttacagccactaggatggctagaatcaaaagaatggacaatagtaagttttgttgacaatgtggaaccctcacgcattgttgatgggaacaaaatggtgtagtcactttggaaaacagtttgatagttcgtcaaaatgttaaatatataattaccatatgactcaacaatttcacttctaggtatatacccaagagaaataaagcatatgtccacacaaacacttgcacataaatatttatagcagcatcattcataatagctaaaagggaaaacagcccaaacatccaactgatgacagacaaacaaaatgtggcatatccatacaatggaatgttattcagccataaaaaggaatggggaatggatccataccaccacataggtaaccttgaaaacactaactgaaagaagccagatgtgaaggtcacatattgatacttctatttatgtgaaatgttcagaataggaaaatctatagagccagaaagtagatttgtggttgccaggggctttcgatgacaggaggggaggggagcagtcattgctagtgattacagggttcttgagagggagtgagaaaaaatgttctaaaatgtattgtggtgatggttgcataactctgtgaacatacaaaaaccattgaattctatactttaaaaaggtaaattttatgggatgtggattatagctcaataaagctgtcattaagaaaggaaaaggaagggaggggagaagagggaaaggggagggaggggaggggaggggaaggggggagaaaaaagatacatcgtggcatatctcttcccttttacctgtcattatgtgtcagtgcctcccattggcctaaactacccagaagccagagggaaagccatttgggactatattccactgtgacactgagcagagcaagggaaggatggggacacttctctcacacatctctgactccccaacatctaacccatggcctggcatgtgatattcatgctataaatatttgttgaatcagtaaatggcccctcatctagattctgccaggcagcgcagggggctttttgaatgtaaatgacctaatgattcaggatcctatgaccagcgactgtcaccctctgtcacctttcttctgcccctttatctctgaaggcattgaaggggccctgcatgagtcagggagggctggggggaggagcaagggtgggaggggcagggaagagggtggcttctccgacaacttaaaaggggcttgaaccacttcctccccagacaggggtagtgcgaggccgggcacagccttcctgtgtggttttaccgcccagagagcgtcatggacctgggtgagtgagcctcttcatgtgagaaggaacagtaccagggtcttggacacccagactgaccctgtggaatgggggtggaggatgcgggtggagcgcataggggtgcttcctggagaaatcagttctg

SEQ ID NO: 18005 - DNA, 2300 bp, Homo sapien
ctagaccccgagttcccgggggttgctggggttcagccttggccgtggggccagagccaggagccggttgaggcctccttgaggcctagcagagcgagggttgggagggagtcccatctggggccccctccttggaggcaaggccagtcccccgaaattggtcaaagcacctgtgaataccccgttttaggggagttgctagtaaagtacattctccaagacaaagagagcgacctcaggaagccgtgggcaaggcaggtccgtggttcaccccccacccgggcagaaggttcccccattggttcaggcagcgacttgaggacgagcagagctctgaaatagtttggcctgggtttgaaacccaactttggcacttcctggctgcatatggcttcagacaagttgtttaaactttccgagactcccttgtttcatctgtaaaatggggatagctgtacatataaagtacttgtgagtgttaagcgaaatagtgtcataagcgtaccccgtataaagtatttcttgaacaaatatttatcgggtatttatttttatgccaggcaccaaagatggatccaacggtggacaaatgtacaagcccactcttaaattttgtattctagcaaaagagagcaataattttaaagtattaacaatgaagtataacgtacagggagcttatgttagttgtcagggtcccctgcagcgaggcctgctggatgttgacagctcccttaatgtgagcagaaaggaaatctacaccagagtcaaaggtttctggctgttctttaagagggaaagactcaggttggaccattgagaaaatgagctgtttctttccacaccaggactcattccttatgctccagggaatttccttaaaattaataatagaagcgaaaaatcagatctattccacatgtttggttgcaaatacctccaatagtcatagaagtttatttgccttctttccaaagatgaatttttgtctttttgtacctcactatttgtgatgtatgttgatgtaaagaacaagctcacatgtgcctggttatgttgtgagctggtaatactaggaaaaaatttcctaagaattgagctaggtcctgacatggtccctctttccaagtagcatacaatctagccatattgataagttaaaaaaaagttataataatatagatctgtgtaaactgtataggaatacagatgggggagcagttaattctgcccaggtaatgtatcaagaaagttcccttgaggagaaaaattttgaaatgggctgtgaatgatgaataaaagtttttcaggtagactctcaaaatttattcccagcatttatgaagctatttaccattataagagaatgtgaagttcattgtcataccaattaccttttgcactgcttccaggaataaaatgctgcctaattttaataaaaattgttatcccaaaagcatgatacagttgctgatcagggagctgtcagtatctggtaggccttgttgcgttggaccctgataatacatcactttctattctcatccttgtatcagtctgatgaaatgtttacatggcgtcagcaaaatgttttccatacaagaggtagcttagtatcacaagaaaaaacctgaaagtacatttctaaatatccccagtactttattttagtcatttaattctaatcaaccaaatgacctataagaactagttaaaatacacaaaaggcttaattactaggaattaaggtgaagtaattttactcagaaataccaattaaattaccctattcattaggaaaacattctcgtatgcttgctgagttttgattctcttttttttttccttttttttttattttagtgtctcagattcattcttaaggaactgagaacttaatcttccaaaatgtcaagtaagtttcaatttttatatttatcaatctatgttaataagagactaatgccctagcaagtgggaattccaaaatactctcatttttttttcttcaaaacaggaccattggtagttttgttgcatagtattatatctcagttgtttacaagaagttatttattttctttcaaacagaaagaccatcttatgccccacctcccaccccagctcctgcaacagtaagttttaattttcttgttaatgtaatagccaactctggccttgatacaaaaacccagatgtcttccagtgacagtcactcaatcatcacagcaacaggatgaaattcagcttaaaagaaaaaaaaaaaagcacttcctactaaataaaataattatttgcat

SEQ ID NO: 18006 - DNA, 2300 bp, Homo sapien
ttcacagcccatttcaaaatttttctcctcaagggaactttcttgatacattacctgggcagaattaactgctcccccatctgtattcctatacagtttacacagatctatattattataacttttttttaacttatcaatatggctagattgtatgctacttggaaagagggaccatgtcaggacctagctcaattcttaggaaattttttcctagtattaccagctcacaacataaccaggcacatgtgagcttgttctttacatcaacatacatcacaaatagtgaggtacaaaaagacaaaaattcatctttggaaagaaggcaaataaacttctatgactattggaggtatttgcaaccaaacatgtggaatagatctgatttttcgcttctattattaattttaaggaaattccctggagcataaggaatgagtcctggtgtggaaagaaacagctcattttctcaatggtccaacctgagtctttccctcttaaagaacagccagaaacctttgactctggtgtagatttcctttctgctcacattaagggagctgtcaacatccagcaggcctcgctgcaggggaccctgacaactaacataagctccctgtacgttatacttcattgttaatactttaaaattattgctctcttttgctagaatacaaaatttaagagtgggcttgtacatttgtccaccgttggatccatctttggtgcctggcataaaaataaatacccgataaatatttgttcaagaaatactttatacggggtacgcttatgacactatttcgcttaacactcacaagtactttatatgtacagctatccccattttacagatgaaacaagggagtctcggaaagtttaaacaacttgtctgaagccatatgcagccaggaagtgccaaagttgggtttcaaacccaggccaaactatttcagagctctgctcgtcctcaagtcgctgcctgaaccaatgggggaaccttctgcccgggtggggggtgaaccacggacctgccttgcccacggcttcctgaggtcgctctctttgtcttggagaatgtactttactagcaactcccctaaaacggggtattcacaggtgctttgaccaatttcgggggactggccttgcctccaaggagggggccccagatgggactccctcccaaccctcgctctgctaggcctcaaggaggcctcaaccggctcctggctctggccccacggccaaggctgaaccccagcaacccccgggaactcggggtctagccaagcggggacaccacgacttgcacccaccgacccggtccgtcccacttggaaacactcacccgcgggcagaaaaagcgcccgcagctccggcttcgcttccctttgtcccgcgctcgccccgcccctcgcgtccggagcttccgcactcgcactttccacactcttcttaatttttttttttttccgggccccacccgaccctctttagaaaaactaaccttctagtgaagatgcggtgatgcttagcacactcagggatttttttcaggacccattggatcctcaaaactccccgaattttgatactttcccagccgggcgctgattcgtcacggcgaagagggccgaggaggcccgacctaacacagaataggcctgggtttagcggctgtgaggagccggagccgccgcagcgaccgaggaagtggcgggaggtgccgagccttgcggaggggcggtgggggccgcggtgggagacggcggatggcgctcagcgcgaggccgcggaaccactgtggcagcaagcagttcggccagactcccgctgagcccgctcctggaggggccctccccgactccggtcttgctttcctttaggctgtgggtcagagtctacacttcactaaacctgggatggaggcgtggaggacttgcttcgcggcgtttgcgtcctcgcaggcgcctcgcagggcttcctgccctcacggcgggggagtagctttggcgaaaatcagcacgagttctgcagtttttccaagcgcttttagggtgtaatcgtcccaggtttctaagccaaggcccggagagttgaccccctcgcaacagcttgtgtgtccttgcagcgccgcgggtgccacctggtctccgcctcagcgctgcctcggctccttcggttcccaccagcgggaacgaccgtccccactttcagcttaaactcatctgtccttctggatccagctcagaggtctctttgtgatgccctcctggaacttcccccctagtaatcct

SEQ ID NO: 18007 - DNA, 2300 bp, Homo sapien
cctttccctttttgccgtttttgggccacccctttcctactatagggtgctttattcttaacatccaaaacctgcagtttttcttcagaggactgcctagagacaacacacagcgcctccccagcactgcactcgcccaatcctcccaccataatcccaaaggcagggaagaaaccaggctggagttgctggacgaagccagaaaaagaatgtactgaaatcccttctgaggcctttgtgtatcgtactttaatcctttacatgtctctgatggatatatacatatatatatatataatttttttttttttgagacagagtctcgctctctcgcccaggctggagtgcagtggcgccatctccgttcactgcaagctccgcctcccgggttcacgccattctcctgcctcagcctccccaatagctgggaccacaggcgcccgccgccacgcccggctaattttgtttttgtatttttagtagggacggggtttcaccgtgttagccaggatggtctcgatctcctgacctagtaatctgcccgcctcggcctcccaaaagagctgggattacaggcgtgaatattttttaacaagcaatttcatgtacattttctcaagcaccactcaagctgcctgtccacggggcagacgacttctcctttagtctttctcttgaatatgctcttcaatttcattaatctctattcatgagtataacaatattggaaaaattggacagagtatcacttgttcctcgctttgcagactagagatgcttctagtccctgttggcacactcaggatgggggctacgggaagcccaagaattcagcctctctctaaatgtcaactgttttccagtaaccacaggtcagggatcccatacgttcattctccctccacagtgacccacaatatccatcgggtgtttatgtatccaaagaagaggctactcattccatctggtaaaccaacatactcatgatttagtggaaagagccctggagtggcacagagggctgcctcaatacacacttactgagcgtctaacaatgaatgggtcaagcccttcgtaggcactggcaatgggaagatgaccaatacagacggctgaaccttgctttcaaggccttcataaagcactggagatgacaaacacggtccgatacaaagggtcgggttcaggactccaaccattattatcaaagagccacgggaatacaaaggaaggattactaggggggaagttccaggagggcatcacaaagagacctctgagctggatccagaaggacagatgagtttaagctgaaagtggggacggtcgttcccgctggtgggaaccgaaggagccgaggcagcgctgaggcggagaccaggtggcacccgcggcgctgcaaggacacacaagctgttgcgagggggtcaactctccgggccttggcttagaaacctgggacgattacaccctaaaagcgcttggaaaaactgcagaactcgtgctgattttcgccaaagctactcccccgccgtgagggcaggaagccctgcgaggcgcctgcgaggacgcaaacgccgcgaagcaagtcctccacgcctccatcccaggtttagtgaagtgtagactctgacccacagcctaaaggaaagcaagaccggagtcggggagggcccctccaggagcgggctcagcgggagtctggccgaactgcttgctgccacagtggttccgcggcctcgcgctgagcgccatccgccgtctcccaccgcggcccccaccgcccctccgcaaggctcggcacctcccgccacttcctcggtcgctgcggcggctccggctcctcacagccgctaaacccaggcctattctgtgttaggtcgggcctcctcggccctcttcgccgtgacgaatcagcgcccggctgggaaagtatcaaaattcggggagttttgaggatccaatgggtcctgaaaaaaatccctgagtgtgctaagcatcaccgcatcttcactagaaggttagtttttctaaagagggtcgggtggggcccggaaaaaaaaaaaaattaagaagagtgtggaaagtgcgagtgcggaagctccggacgcgaggggcggggcgagcgcgggacaaagggaagcgaagccggagctgcgggcgctttttctgcccgcgggtgagtgtttccaagtgggacggaccgggtcggtgggtgcaagtcgtggtgtccccgcttggctagaccccgagttcccgggggttgctggggttcagccttggccgtggggccagagcca

SEQ ID NO: 18008 - DNA, 2300 bp, Homo sapien
caaatctttggtagagaaagaaccaagcgaagaaaatgagtcattcatttatttactccacaagtattgagcatctaaatgtgctgtgtactgttccagatgtcaaaatctccaccctgatgggaaaaaaaagacggctgggtgcggtggctcatgcctgtaatccagcactttgggaggccgaggcggtggatcacttgaggtcaggagtccaagaccagcctgaccaacatggtgaaacctcgtctctactaaaaatacaaaattagcagggtgtggtggcacatgccgtaatcccagctacttgggaggctgaggcaggagaatcacttgaactcgggagacggaggtcgtagtgagccaagatcgcgccattgcactccagcctgggcaataagagcgaaactccgtctcaaaaaaaaaaagaaaagaagaagaaaaagacaaaacaaaataaattcataagaagtatagtatgttaggtagcgacaagtgctacagaaaaagtaaagcacaggccatgaacagacaccgggggttggggaatgagatgcaattttaaaaaggtcaggaaacacctactaagaaggtgacatctgagcagaaacccagtgagaaagtgtatcagacaatgtcactgctccacttaggtcccctcctttccctttttgccgtttttgggccacccctttcctactatagggtgctttattcttaacatccaaaacctgcagtttttcttcagaggactgcctagagacaacacacagcgcctccccagcactgcactcgcccaatcctcccaccataatcccaaaggcagggaagaaaccaggctggagttgctggacgaagccagaaaaagaatgtactgaaatcccttctgaggcctttgtgtatcgtactttaatcctttacatgtctctgatggatatatacatatatatatatataatttttttttttttgagacagagtctcgctctctcgcccaggctggagtgcagtggcgccatctccgttcactgcaagctccgcctcccgggttcacgccattctcctgcctcagcctccccaatagctgggaccacaggcgcccgccgccacgcccggctaattttgtttttgtatttttagtagggacggggtttcaccgtgttagccaggatggtctcgatctcctgacctagtaatctgcccgcctcggcctcccaaaagagctgggattacaggcgtgaatattttttaacaagcaatttcatgtacattttctcaagcaccactcaagctgcctgtccacggggcagacgacttctcctttagtctttctcttgaatatgctcttcaatttcattaatctctattcatgagtataacaatattggaaaaattggacagagtatcacttgttcctcgctttgcagactagagatgcttctagtccctgttggcacactcaggatgggggctacgggaagcccaagaattcagcctctctctaaatgtcaactgttttccagtaaccacaggtcagggatcccatacgttcattctccctccacagtgacccacaatatccatcgggtgtttatgtatccaaagaagaggctactcattccatctggtaaaccaacatactcatgatttagtggaaagagccctggagtggcacagagggctgcctcaatacacacttactgagcgtctaacaatgaatgggtcaagcccttcgtaggcactggcaatgggaagatgaccaatacagacggctgaaccttgctttcaaggccttcataaagcactggagatgacaaacacggtccgatacaaagggtcgggttcaggactccaaccattattatcaaagagccacgggaatacaaaggaaggattactaggggggaagttccaggagggcatcacaaagagacctctgagctggatccagaaggacagatgagtttaagctgaaagtggggacggtcgttcccgctggtgggaaccgaaggagccgaggcagcgctgaggcggagaccaggtggcacccgcggcgctgcaaggacacacaagctgttgcgagggggtcaactctccgggccttggcttagaaacctgggacgattacaccctaaaagcgcttggaaaaactgcagaactcgtgctgattttcgccaaagctactcccccgccgtgagggcaggaagccctgcgaggcgcctgcgaggacgcaaacgccgcgaagcaagtcctccacgcctccatcccaggtttagtgaagtgtagactctgacccacagcct

SEQ ID NO: 18009 - DNA, 2300 bp, Homo sapien
cccaggcttgtcttgaactcctgagctcaagccatcctcccgcctcagcctcccaaagtgctgggattacaggggtgagccactgtgcccagctattgagcactttaaatgtggctgttccaagctgagatgcgatgtaagtataaaatacacttggatttcaaagacagtatcaagaataatgtaaaagatctcattaacattttatatgggttgctgcattttggatatatcaagttaaataaaatatagtcgtaaaattaatttcacttctttttgtttcaatcttttgatatggctactagaaagtttggaaggacatctgtggtttgcatttgtggtttgtgttatatttccactggacagtgctgctttatttagggtgcataagaaatgctggcagacctatttaaaatgcagattgccaggactgaccctccagggaatctagttcagctctctgtgtttcaggcggatattagcaggagctacctaaagtagcaggaagcatttaattcattgctccctgaatttaatttaggaatttaattcattgctttcttctctctcctccactcccaagcctaattctcttcatatttctcagtcccagttaccaagaaagagaatcagtttggcctagataatcattaatgactctctttagtcagagctttctgtctcagcctactccaaaggtctctgaccaatctatagataatcaagttgtgactgatggggaaggtgcaggaggtagggaggggtgggtcagaaataacctggaacctctcctctcaccaggagctgtgggtaggacagctttgtttggagagggctgtgagaatgcccagcatagactggcctggccagatgtgagttaattcagaaattaaaagagcaggacatgcatgcaaaggccctgtaagggctagaacccaggtctgattatctcctgaactgtgctccagatacaattcagccaaagccactccacaaataacaataatgatagatccactctcacgacatatttctgtcacatctagcaaccagctggcaagattaaaccaggaatttagaaggggagagagagaacgcagaggcagatatgcaggggtaatacatggaacacaagcaagttgtcaaagagccagtcccagtgatgtcatacatcactgagcaaccttgggcaagatgcctcaacctctctggcctcagtcttttcatctttacaggttagaaaatgtcagggattgcaaggattggatggaatgatacgccaaatacaccctccgaagggctcaagtgattgcaacgattggatggaatggtacactgactacaccctccaaaggactcaagggttcttttggtgaatacaccaaaaggtctatttcttcatccttgttaaaactttggaaatgttaactcacaactctcatagtctaccagcacttatctgcaacattttgagaaaactaaatataattttcttttttttttttttttttttttttggagatggagtctcactctgtcacccaggctggagtgcagtggctcaatctcggctcactgcaacctccacctcctgggttcaagcaattctcctgcctcagcctcccgagtagctgggattacaggcacccaccaccacgcccagctaatttttgtatttttagtaaagacagggtttcatcatgttggccaggctgatctcgaactcccgacctcaggtgatccacccacctcaacctcctaaagtgctgggattacaggcatgagccaccatgcccggcaattttcttatgttatgccccatttccttttcacaaaaatgaactccccctcccctcaaagtgctcaatttttacagggaaccagtacaggtttttgaaattttcctttccttcatgaagaatctgacatttctactataccaataacaataggagcaaagagtttaccctgtatttgcataattagttagaaagatgagaatttccgtggcctccgaaaaaggagctctgcatctttaaaactctgcgaggctccctgccttccgcgcagaccgagcagactgccgcagcgactcatcctatcgataaggttcagttagccaaggtggaggatgggaaaagaatggaactgtcccagctactcaatgagatcagggcaaactatgaaaagatcctcaccagaaatcagatagagacggtgctctcaacaaggatccaggtaatgatttcatacagacaggcaccttccagaataaggagacagtccatgtctacccaatt

SEQ ID NO: 18010 - DNA, 2300 bp, Homo sapien
tatatcacacttttgtctgaagtccacagctgctagttttacgctgacgatctgtagcatgaagttgcattgtcagtgtttgcatctgaaatctggaaacgcaggacacaaaaagttgtgtctgatacacttgcattctgaacctctgtatgctggtgttgaggcatgtcaatttcaggtctttcaaacaaattttatatgtatacggttctttaatggaaaatagcatatacctctgcttttgagaataaaagaactgtaaggaatttagtttactttttcttaagtattttggaaacatttctagaattctttccgtaaaatgaactatacaaaagtaaacaaattaggaaaaaaaacatagctaagaagtatattctgttgcttgttaaatttcttccttaatctgccaaattgagaaaagtacaggtatatgtggaagatattgccaatcttttcaaattttgtcatttttagtgtggttctttgtctagcaaaacgtcttaccttgtttttaagttctgtaattatctggtaatacttcttgttgtcctgtttttctccttgatcattagcccaggctcaaatttcttattccattctttgattttatattcaagtgtactctttgcctgcaccagagttgagaccttgtccagggaaactgcaacatggtcatctagattttacactgcatccttcttcttaccagagaagaacccacccacctcctcccaagttggtagaaaatctccatctgggttacatttctgcctataattctttctttccaatgatcagtatctaattgccatagagtagattttggggctgcgtgtgacttgatggaagagcttagctctacaaagcccaacagagagagtggtaagggaatcatcaattagtaattcctcttatggttgataatgtggctgtttcatctctgctataattgttttaaatatttttaatgaaatatataatagtgttattattttgttaattattattattatttttattttttatactgtaagttttagggtacatgtgcacaatgtgcaggtttgttacatatgtatacatgtgccatgttggtgtgctgcacccattaacttgtcatttagcattaggtatatctcctaatgctctccctcccaccttcccccactccacaacaggccccggtgtgtgatgttccccttccagtgtccatgtgttctcattgttcagttcccacctataagtgagaacatgcagtgtttggttttctgtccttgcaatagtttgctgagaatgatggttcccagcttcatccatgtgcctacaaaggacatgaactcatcattttttatggctgcgtagtattccatggtgtatatgtgccacattttcttaatccagtctatcattgttggacatttgggttggttccaagtctttgctattgtgaatagtgccgcaataattatttgttaaactcaatagactatctttttattaaaaggcgcagaaaatgcctttaggtatttatttcatattggagggacaaagcagataatatttacatgatatcagcccaattaaatttgtgttttcccttatggaatttctgcacaaaggaaaatacctttttataggcacaatgcttataacacaaagtcctttggaatgatatgataaatattacttattttcagatgaagttatttgaaactaattttagggatttctggagaagtaacagaaaggggcagatccttaatttctgtatcctgtatattaaatatttgaagtatttaagaataaaatttaggaaaataatatgaaaataaatgacattcttctatttttttcttgaatttgattgattctaagaaaataaaaatttaaatttattaaagcctgtcttggaattttgaaatagctaatgatgtctaactttttccccttatcttatgaaagtatatgacctctcccctgcccaagagagttaaagaagaatggaggaactgacataatagagttttgtgggtggatttaatgttaaatagcaaacttgtaagtttctccaggttcttgtaaacctctgcagtggctgtgtcttgctccttttgcggttccttttgcaatcataggaaaaaaaaaaaacatgatttcttttttttttttttttgagacagaatctcgtgctgttgcccaggctggagtacaatggtgtgatctcagctcactgcaacctctgcctccggagttctcctgcctcagactccctagtagctgggactgcaggcacccgc

SEQ ID NO: 18011 - DNA, 2300 bp, Homo sapien
tcccattgccagcatttgcataccatttaatcattagggtttagttttctttggtttcacagctttagggatgggcgaggcaggatgaccaacacattatgtgtggtgcattttttagctactttagaagggcgttataaaaattactcccagcttaacaatttaaaattttgtacaccatgtaccccttggagatatgtcaccctaaatatgaagaagagtaacatcatactcctgtgaaaacagtacaggtagatcataaaagccacataagagctacatagtaaagtgaatgattacctatttaatcatgtgtcccaataaaatgcaatttaaggaaaaatttaaagcagaacattgtttaacaaataattgaatataaagattaaggtgtgaacatagtttaacagagactggcaaaagaaggaagaaattcttaaataaacaaaagtcagctacttaagtttaaagctaaggaggatacaaactatttctggaagcacctgttttttaagactttttaaaaattgtggtaaaatacatataacataaacttatcatcttcatcatttataagtttacagttcagtagtcttaagtgtactgacattgttgtgcaaccaatctcccaaactcttttcttttttttttttttagacgagtctcactctgtctctgaggctggagtccagtggcacaatcttggctcactgcaacctctgcctcccgggttcaagcaattctctgcctcagcctcccaagtagctaggatttcaggcgcctgccaccatgcctggctaattttttgtatttttagtagagacgggatttcaccatcttggccaggctggtctcgaactcctgacctcaggtgatccacctgcctcggcctcccaaagagctgggattacaggtgtgagccaccacgcctggccccaaactcttttcatattgcaaaattaaaattctatgcccagtaagcaacaactgtctatccccaacccttcggccactggcaactaccattctactttctgtctctgtgaatttgactactctaggcacctcatagtactggaattatacagtatctgtctttcaaaaagacactattaaaccggtgaagtgactagaagacatgaatggaaacagtctaaaatacaaagggacaaaaagccatgaagcacaaagggagctcaggagggttcagaatctataaaataactccaattgtaacactagttatcagaagtagatacaaatcctcttttatctttaaaacgaaggcaggagatatctgcatcatctcttcatttcttgaaatttgactcaaaaaggaagttgctgtctttatatcagactagaattcaaccagaaagaaaatcgtattaaaacaatctgcctaaaagcttttcaatctttcttagacattagctacttgaataaacatgttgctgagatgtaataatacttacctagaaaactattatttatgtttttcttatgaactataaaacataattgttacaaattatatgcttttttgtatattatacaaaatacaaaaaaagaaagcaataacttaaaatcacaaacttcaacaaccttaaaaaacacgctgattgaaataatcaaagagatggatgcttaatcaaatctgaaattattgctgatgtgaaagctaatttcaacttttgagaacaatatgaacaaaaaagttacatgattgatgggaaatttttattctcatcatattaagtattttaattacatttgttaacctggagatattctctgcaaatgtgaaatcatgaagcaaatttaatagaactacacttccagagaaaagttaccaatcatcaaaacctctgaaagattaaaactgtaattctgaaaatttttttgttttgctccactttattctttttttattgatatagtaaatgtcccagggctctgacctagcttcagagaagtgttcaagaaacagaaattatccaattacggattaccaaaactgtaacagggattaagaagtgacagagaaaaggaacaccctcgaagtgtgtatataaaggccaaaaaggcagccttgaatacactcttcgtcatcacctctcctattcgcctggacaagctcatgtttgcaggagcaccatgtcttgctcgtctcgcgcctcctcctccagggctggaggcagcagctcagccagggtgtctgctggtggaagcagcttcagcagtggaagcagatgtggtctggggggcagctcggcccagggcttccgaggaggagccag

SEQ ID NO: 18012 - DNA, 2300 bp, Homo sapien
atgtgacccaacaatcccactactgagtattgaaaggaaacgaaatcagtatgtcaaggagatatctgcattccatgcacattgtagcatgattcacaatagccaagaaagggattcaacctaagcatccatcaacaaatgaagtaataaagaaaatatagtatatatacccaatgggatactattcagcctttaaaaagggaaattctgtcatttgtgacaacatggatgaacctgttggatgaaatgctatgaaccatacatctgatcaaggcttaatatccaaaatatataagtaattcaaacaactcaataacaagaaaagaatgtgattaaaaagacatttgtcagccagggacagtggttcacgcctgtaatcccagcactttgggaggccgaggtgggaggatcacgaggtcaggagatcgagaccatcctggctaacacagtgaaaccccatctctactaaaaatacaaaaagaaattagccgggtgtggtggcggatgcctgtagtcccagctactcaggaggctgaggcaggagaatggcttgaacccaggaggcggagcttgcagtgggcccagatcgcaccactgcactccagccttggcgacagagtgaggctccgtctcaaacaaaaaaaaaaaagacatttctcaaaagacatacaaatagccaataggtttatgaaaaggtgctcaacatcactaatcatcagggaagtgcactagggaaattttggtcaaagaatacaaaatttcatttaggtgggaagaataagttcaggataactattgtacaatatggtgactatagttaataacaataagaaagtagattttaaatgttcttaccacaaaataggtatgtgaggtaatagatatgttaattagcttgatttggtcattacacaatatattcatatatcaaaaaatcatgtcgtgcaccataaatatatacaatttttatttctcatttttttttttttgaggcagagtctcattctgtcactctggctggagtgcagtgacacaatcttagctcactgtaacctctgcctcccaggttcaattgattctcttgcctcagcctcccgagtagctgggattacaggcacctcgccatgatgcctggctaatttttgtatttttagtagagatggggtttcaccatgttggtgaggctggtctcaaatgcctgacctcaagtgatccacctgcctcagcctcccaaagtgctaggattacaggcgtaagccactgtgcctggccttatttgtcaattttttatatttccataataggtagagttttcagtaaatatatgtgaattcccaccgactaaataccttactgatgactttcatctgagctaaaccacaataaattaagacagaaaaaatagttcctaccaggtttgcttcagattttgcagggtcaggaaataagttaatgtctttccaaactcccacaaaacataacaccaattaggggtgtgctcctaattaccaaaatggataaggtaagacaactctcctcagtcataagtgtcaacagaatatgatgctcatgtcagccagaatggaagttaacttcccatgggaaagagtggcaagaggaatttaaaaataaaaacaaaaacctattggttgaagaaccaggttggggaaatgattacagttctattctctacttatgtggaaaaacttgtgaaaataaaagcagaaaaagcctcagaaacatcacaatctgccttggcataatagcccaaaaccatgatgctaaatttctatcctgtaatgagctgatgaggtttacttccaaggatggaagtgaagaatgactcactcagcatttaaaaacgtaataatgaacctgacattgctccacccagacccatttctcagataaccaccaacctgagggcaactgccctcctacaggaatgagcccagcaaagtgagttactaattagaaaaaatcacccaattatgccaacttgctgagactggcaagccatgttttactctgtgtaggcagaatttcattcagaacacacttgggacttgcctataaaaaggcaaaccaaaccttttagacaagaaggcactccattctggctttcacaaatacagctctgcaacgcgtttgccctgataccatgtctcttcgactttccagtgcatccaggaggtcctgtcctcgtcccaccactggatcactcagactctatggtgggggaaccagctttggtactggaaattcttgtggcatttcagggattggaagtggcttctcta

SEQ ID NO: 18013 - DNA, 2300 bp, Homo sapien
tgatctattatgtacatccattcttgccatggataaaataatcaatcccggggaagaaatgtatagactgaagtggtccagagaatgtgttaaatctgtctccacttccagaaagaactagagcatacctaaatttttaaaataagtattagtttagaggaaaatctatgattaaaataatttaaaagacctactcacgtgagtaaataggcgacaacatttcaagaaggagttaagcatcatatattccagtcctgctttgatatagaaatgctttgtaatctgtgtggccacttagcttcagagacaactcatctccaaaatagtcctaataatatgtgtttaacttgtttcacaaaagataatttgtatttataaagtatctagagataaatagattatgttaataatactttgaaatctcataataactcacctaagaaactcaagccttataaatcattaaactgacaatactctctgtttttcttgttttatttctgggaaaaattagcaaaagattaaaaatttgaccaggtcacaacaaaatcagtaaaaagtctctaaacaggaactgtatctaggttatcatgcactgttctaaacataagctgatggtccagttatagctctgtatttattatttatttttaaatatttttgatttagaaaatccatgcagtccactaaatgttccatacgatttagtgacaataatgttggatgttttccaaaggattcactatccacaacattgaaaaatatcattcggaagaaaattactgtttcaaaactaaacccataattagttaaccaatcaatttgtatcattataggtgatagagacccgaccctgtctgacatgtccactttattataataatttaaataattaacatttaaaaatgtttgtgcctttcaaactgtcttatcgtcattcatgattggaactgctcaacattcatttgagactctttgatgctattattttcatttgcccagtagggaaatgatccaagcctggataacttcccaagagcatcaaggcaagagaataaagagtacttccctgtgacaacttatcttctctctagggtactataagtactggttttctaggtaatgatgaaaacacctccctccttatatattttactccttgctaatcaatatgatgctcacttctcaaaataattcctaatgtcttaaatacatacatttaaactaaaagacagtaaacactatttaggggtagggaagtgaacaatttggagactgttagttgaattgatgtcctgctcctggaccaaaccaagaaatctcaatcgaattaattctccaccatcatcacatattcatgaattatattgaaattaacaataagcaggactgcaggatttctattacttcagttttcaattcaagaaatggtagatttcttttaaaatctcccactaccaaaagatcaatagatgctgagattttctggttttgataagaaggaaaacacacacccagacacccagggcagtggctcacacctgtaatgctggccacaggaggctgagctgggtgctgaggctgaggatcactggaggccaggagttcgagaccagcctgggaaacatagcgagaccacatatctttaaaaaaaggaaaaaagaaaaagaaacgaaaggaagaaaggaagcactcaatgaagtgggaatactagaaatactctatgagcgttaacaggacaaaagtaggagacatttctcattggaattattaattctttgttatatgtggcagggggagaatctagattctattaatattccagtggccaaaaagatgcacatttagtcatatttaattttggcctttgaggctatgatttagttttacttcacctggcaccatttttatatataaaaaatatccttggggcacctttccacctacagactggacgctgttaaaaattacccaattgtgaaaaacaacaattaggatgcaagtaaattttattacagactggcatagtcaagactgaaatgacccagtgaatactataaaaggccaagggagctaacaagtgtggaaggtgaaccctggctttgctcctctttctgggaaggggttgcccggctgtgctgccaccatgtcttttcgactttctggtggatccaggaggatctgctcgcgaactgggtctggtaggctgtccggtggaggaacaggcttcgtggctgggaatgtgtgtgttggatcgggagcaagaagcagcttttcttgtactcttgagggcatctctt

SEQ ID NO: 18014 - DNA, 2300 bp, Homo sapien
ctcctgttgaaaagtcagaaaaaaagttcagttagaaatattaaaataggtccagcgcggtggctcaagtctataatcccaacactttgggagaccaaggtgggtggtctgaggtcaggagtttgagaccagcctggccaacatggtgaaaccccgtctttactaaaaatacaaaaattagccgggcatggtggcaggcacctgtaatcccacctacttgggaggctgaggcaggagaatcacttgaactcgggaggcagaggttgcagtgagccgagatggcaccactgcactccagcctgggcgacagagcgagactccatctcaaaaaaaaaaaaaaagaaatagtaaaatataaatctttttcttctaaaaagtcttattatttataacatgtaatgaggtaacgggtacacatatataacagcataaactacaaacagcaaagaaataatgttttggtgtcctaattttatgtaaaacaataaaccataatactttaataatgtattaaattgattgacaaatctttctggctttttttccgcaagctcatttattaagtcatgaaaatttatatttttgccaacttcattttcaatctaggtaattgaaagtgatgtcaatcattcttggcaaatgcaagatctcaaatgatttgttataatttttagtctgaagaagaaaaccaggtggaaagaataacatgaacaaaggcaaagagatgggaaagagggaagtagtaaaacagaacggacaagtcagtgcgggaaaatttacattaagacagtgaggtggctcctgcctataatcccagcactttgggaggccaaggtgggaggatctgtcgagcccaggcattcaagaccagcctggacaacatggcaaaccccaactctacaaaaaaatacacagattagccaggcatagtggcgtgtgcctgtagtcccagatatttggtaggctgaggtgggaggatcacttgagcctgggaggttgaggctgcagtgagctgtgatcatgtcactgcactctggcctgggtgacaaaacgagaccctgtcaaaaaaaaaaaaaaaagagagagagtcgtaaataccaagcacaaaactataagaaatgacaaaggtagggcacaggagctataagtggaagagaaaaggggagcaacatgagatgtagaaaatttcttagaaagcaactgtctgaaactcgatcagactcatcagactgaggttgtcagtattgaatgtaaccaagagggtataggggaaaaaataaaagaaatgatgattagagatgtgcagtgatgtctgagaggttaatttcagtaaaatagtgggaccacaattcagaaataagaggtgaaaagtacaagaagcaatgcagaaaagtgctatggaaatggacagccaatagaaggaatgcagaaatatgagcaatctacagacagaaagtgaatatagagaccacagtctagacccttcactttacagatgtggaaactgaggcccgaggaggtgaccaattcctttacttaacctggttagcaatggaacttagacagaaaaccagtacagatgaaatggtaattcaggaaggataaggatcaaaggaacactttctgtctccaaagaagattccctttaatgcctcagttttcctttaggacctcccctccttcttctgatactatgatacttcattgctgaagaaaatgcaatgctgatttgagcaagggaaagagaaatctgtctatcatacttttttattcttataggtattatgcattcctgaagcctggaagacaggaagagttactcatactaaatttgaaatgcatcactataataatcctgataatactccaccctgtccaactccagagataacaaataaccccacaataactatccacctacagaaatggacacagtatggtaaagccattcattaaaaaaaaaaaaaaatcaccccattatggataattcacaatgagctggcaaacatcatttggctatgagcaaagctcatcaagaaacaccctaataatgtgtatataaaggcaaaccaagctgtttgagtaggccgttcaccatcagagcatcaccgcagaaacaaaggctccagcctccggacaccatgtctgtgcgcttttcttctacctccaggagacttggctcttgcgggggcactggctctgtgaggctctctagtgggggagcaggctttggggctggaaacacatgcggtgtgccaggcattggaagtggcttctcttgtgcttttgggggcagctca

SEQ ID NO: 18015 - DNA, 2300 bp, Homo sapien
gaaatgattctttaatagcattaaccactttctgctgaattgtcctaacaactttttctatcagaaacttatccttcatcctcgatctccattcccatctctctcccctttcctctcattttctcccacatcttttcctctcattttctcccacatcttttcttgtcatctcctctccatcctccttcttcacttccatctcctcttctgctcccacttccacacacctaacataaggacttcaaggcagagtctgtgttctctagatccccaatgccacatctagctttgtgccacttaattcttatgctaagactcctcttttgaggcaaatgccatccaatggcccctcaccacatacactcccctctgcctcatcatccaaaaaccttgacaatggctcacagcccacttccctcctgtctcctgccatcatgagaaacttcacgcctttatagatggtacatttaatgtcacagacagatagttcctgacctcctactctcttgcctttcaggtccaatccacttctgacttcttgttccagtgactgttggtccactcccatgactactctgtggactttggtgacacctggagttgtgcctactttaaaattctaaattctggtttccactatccaattttagcctgtcatccttcacctttatcaatctcctcctcacactccgcctgctccatgacctcataaggatacccaatgactcaccctctgcccttttcttcagtccatctgtccctctggttttactttcttcttgctatatgatcatacagtcaatcgcctcaattgttttctcaagaacaccagaaatttctttgccactatttccttcttctggacctgtcttcaaatcccaaaacccacatcaatctgatcatcatcctttctattcctgcaccaggattacttccaaatatgcagttgaacatcattataaatgagagctggaccctccaattttcttttactcattgctagtcaagtatttttccagttcagtatacatattctaaacagtcattcttgctatcagtcaccttcatctggaacattctggcaacccctcaaatccagttggtccaaacctaaactcagtgtcttcctcctcctctattccccatctcagtgaatattatgagttcccagaatctaaaattaattacctaagagttatccccaattctgccttattccctactctccaaattcaatcatattaccatatgctctcaaagccatcttctctgcatccccactgccttcatccttctcacctggaccattattccaaccttgtaattgaccaccttgtttcatttcaacctgatcattttgccctctgctttttacttaggattcattacaaactctttagaccagcacagaaagctaaccatgatccagcccctgtctggacctgacaatagatttcttaaagattgtaatcacgcatttttcacttctgcatttagttaacactatgtctttcattttagcacttagcatagagcaccaaacatcataaccatgctattttaaacaaaataataggtcaatatttgtgtcattgtccaagataataaatagatgttataatcatggtaagaacagagatgtcactagcctctgttttctaaataacacatttttttctggtgggataaaatatctgtttctgtaattagcagtcctttatacccctccatggtaattgagaccctactgtacctcacagaactctatcataatcttacttaactttataaaaaatttgataatacctggcgccagataatgacagtatatgcctagggtctagatgaaaggaaaggattactcactcaaaattagaagttaaattaataaacttaatatagaacaaaccctattatatttaagataagaaatagcccaaagcaacaccgagggatgttagacattaattatttttaaaatcacccaattatacataattttatgctaatctaagtgatgccattttgcttttggcatgtataactcaaataggaacgccccaataatgatatataaaaacccaaagaaattatcagtgcatgatattctgttctcttgggacattacagttttgcatagacaaggtgaacatttctcaaaacaccatgtctctccaattttctaatggatccaggcatgtttgcttaaggtctggagctggatctgtcagacccctcaatggaggtgcaggctttgcaggcagcagtgcatgtggtggctctgttgctggaagtgaatt

SEQ ID NO: 18016 - DNA, 2300 bp, Homo sapien
gaggcgtgttgggacttcaatagtggatctgagaagactggctcccaaggttagctggtacaaatatccagaggcatgtgagcatttagacatttaggcatttagaggcacaggaacgaaaatggagagcctctgggctgtgctaatatttggtgctaagcaggttatgaagccttgactatagggaaatccatcccattgaaacaaggctcctgtcatcaatttggggtacagagggtagtgtctacagagtggagtgccaacaaatggcatggggatcagggctcagatctggagctcaaatcaaggatactgaggaaagctgctacttggtggacatgagtaatccaagaactcatcagaggacacaaggtagtctaagggacacgccagcttattcccttcataggatccccagtagagtactaagtaatgttggttgggttcttattggctgagggatgtgactgggctatgaaagtacaaggtctttagtcctgatcactgggcacagttggggaaggcagagacctagtggtgtccttttggttacactggcatcactacttcctgacagcgtttctcacgttcatctgatggacatcaaataattttgttgggggtgatatgattttacttgggtggtgtcagaagatatgtcaagctatataacaattgggaagaagtaatatagtaactggaagaaagtaagaaaaggcaaaggtgagaagtcaggtaattagaaaatataaaatttccaattattattattttgggggttttatttgagatattccagaatttccaggattgaaataatttaaagccagagagctgggagccttccacatattgtgtatcttaaagagtaatattggggatttacagactttactcagtgaatttactgacggtggtctgaacatacatgattaaaaaacttagaaaaggcatgacaatagttctgtcttccgaatttctggatacatcaaccttcaactgctatgggttactaatctttaattttaaagagtattatgtacttaagtaaagataaattctgacaaattgggatagtttgcatcagtaagaaagtttattgaaattcattagtaaatgagaacagaaagttgtttttctttccattaaagaacactttctggtaaagtgaaaagaagaaatacagaaaccacaaaacaccttgtagacaccttattttcaaggtctatttccatagaccatcaagacagaagtgttttcttggagactttgttttccatgcatctgtaaataatggtctgtgtgaagggagactctttcctcttgatgcagtttaatagtagtgtttcttggtttctgattcaaccatagatgaaagaactctaccgtcgggcgccacctcttcaataattgtcttgattactctggttttgttagtatctgtgtgaatgatggaaaaaaaattttaaacagtctgtagggatccttagtaattaacaagcaaatattgtaaaaagaaggaaatttcaactttacattgttaagcccaaaaaaatgcttaaggtatgacattttgatcatgccatttttcacggctggtgttaagagtagtttgtgaacaaatgcaaacggaaccgtctctaagatttttaattttttaaaacaactctagagcttaaagcgcaaaaaaaccatcacaggaagttaaaactaattctgattaccccagctagtttctgctgaccttggtcccttagatgaagactcgcccacggacccggaagaggaggacttgtggcctccgctggagctgccgccgccgtatccgccgccggagctgctgccgccgccggagctgccgcccccgtagccgccgccgccgccgccggaactgccaccaccgtagccgccgctggaactgccgccgtggccgccgctggagcttccgcccccgtagccgccgccggagcttccgccgccggagcttccgcctccgtagccgccgccggaactgccgccgtggccgccgccgtggccgccgccggagcttccgccgccggagcttccgccgccgtagccgccgccgaaacttccgccgccgcgtccgccgcctccggaactaaacggggtgaggtcacattcggttatctctaacgttggaaaacggtgggtagctttccagttgccgttaatttagaaaataagcaaaacgtgttgaaaaaataaaaccctgccaggtatatattttaaaacccatcctttgaaaacaatgttaagttcacagaactcttaagaatcat

SEQ ID NO: 18017 - DNA, 2300 bp, Homo sapien
ttatcttcatcaagaatcaattcccatggttgggtttcagtttttcttttaactactgccccatttgcatgtgctaacaagttggaagagttgcaatctgctgggtagtaacctccactttaacaatcaacatttgattaatgctcccaaccacactcccttccctacagaaactatttctgtagttttcataaaccaaaatgtgcagcaataaacttaatttgaaaaaacaattactaaaggtagagtgtgtgccaaatcattaccctttgaatattttcatgattctaagttctttttgttttgctctttttccccatttggagaagtttacggtgagaattagagtcattcatctccattagaccaaatccactggagcagataatatatatacacattggtaaagtggaaaagaaccaaggagttaaaagaccaagcttctaattgcagttcaaccacctgttacatatcttcaggaaaaaatcacaacctctcaacttcaacttcctcttctataaattagaaataacaataaccacacctgtaaccccagcactttgggaggccaaggcaggcagatcaagaggtcaggagattgagaccatcctggctaacatgatgaaaccctgtctctaccaaaaagacaaaaaattagccaggtatggtggcacacacctgtagccccagctactcgggaggctgaggcaggagaatggcgtgaacccgggaggtggagcttgcagtgagccgagatggcgccactgcactccagcctgggcgacagagcaagcctccgtctaaaaaaaaaaaaagaaagaaagaaagaaagaaagaaaagaaataataataaccaccattcctatctcaacagcttgttctagaaatttttaaagcacagtatcacaaacagcactacataattgtaaaacatgtatgaatatatacatccaaacaacagcaatgtcatagcctatgggtagatataatcttatacaatgtaccaaaatcccaatttacttcactagacaaactgttataccaaattctgtacacagtatatccaagaaaatgtgttgtttttattgagaaactgaacctagcttgggaacacatgtgcacagtctagttcataatatttggtgcaagtatcattctctaatatagatttacatttttgcaagcaaatttttacttgcaatcataacatatccaaattttccctttttactcaatcagaacttagtgtaaagtactacaagttagttcttcggatttcatgctaagaaaataatgcagattttctgcattattatggtcttcacagaaaccttaactatgatgaatttaaaagtgcaaaataatccaggataactttatgatttcagattttttaatgttaaaaataatgccatcattaattagaaaattctaaaatcattacttccactttcttaggcaaaatatcaatatactctcatttgccaaataaattaaaagatctcctacaaacacaatctcctaaattgtggttttatggctttaatgttttatgtgtggcaactattgatgctagttaaatttttagaaactttttctttttgattccctacagttgtctacaagaaccttattgtagcatgatcctgccagactttatgctatttgttgctccaattaaaactgtttaaaacatgaatttgaaaaatcttattttaactataattttgtagctgaaacttttttttctaaactttgcaaacattctatgcaacctgaattagtgctgagaaaaatggatcttaacggttgctcaatgttcttcaacaggtgaaaagcataataaaacatgctcatctgaactccacccattttcaatttcaacatagcaaacctcctgtttattcttagggcaaattcaaaattgtacatattaggattggttattactgaagataatttatgcaatcataagccaaagatgctaagttggcaaaaagaaaacaatgtaagtaagcaaactctaacacatgtggacacaccctctcagtatataaaggcttgtcactgtccttggtagcaggcactccctgggctaaacagcatcaccatgtctgttcgatacagctcaagcaagcactactcttcctcccgcagtggaggaggaggaggaggaggaggatgtggaggaggaggaggagtgtcatccctaagaatttctagcagcaaaggctcccttggtggaggatttagctcaggggggttcagtggtggctcttttagccgtgggagctctggtg

SEQ ID NO: 18018 - DNA, 2300 bp, Homo sapien
attaaagttgaaattttttaaaaaaaatccagtagtggtaaataaataaaaataaaaatcttcctttttatgaaaggtatgtattattaaatcaaataagaattcaattttattttagaaatctagaatacttgtgatatttttaaaacttttccttagaataaaataaaacgcagaatccaaatataccaaattgaaaaggagttttagtggccatctataagcaaacagaggtccctgatggagaaatgaaggccctgtttcccacgaggtaggaaatgtatcattacaatgattttaatgtattttatttcaataaatccattctagtcaaaatacatatatgtctatagcacacacagtcagtgtataccttattaataaaattcagtataaacatctttgcaaaaaaactgttatttacacccagaaattttatttcctatcatcaaatacagagcaaactgaatttagaaatctgaatccaacaaaggatttcgaagaatccacaatccatgttctgtacccaattattaaagttcaagtgatagataagtatataatcttaagagaaaagcagattataaaatcttatattgaatcaattatgttcaaaaatgtatataaaatactcatatatacatacatcttctttatgttttctgcatcttctaaatttcctactataaatacatagagagctatatttaaaaaaaaactatagaactattttgcaatgagacatgtagagaattgggccatcatctcaaagaaaacatgtaaaagaaaaatccttattccttcttatccaatcaaaatgctcacaatttaaattcctaagggaattccaccaccctggaattgtactactcggtttccaggtatctacaactctctctgaaagcaggcttctttcaagttaatgcatttcctgtaagaacgttagttctcatgttcaatatataagccatatcaatttcaaagataaataatataccaaacaagaaagtataagaactttatgtcttaaaaattaaagatactggatataattccttgaagcacgctttgcaaagttttcacaacaaagtttaaaatataacatttaatttattctatattgtaaaatttatcctttttcatcatagcagtcaactgaaatggttcactagcctcttaaacttggggttttaatcatttcttaatttgaactgtgtttccactttctccttattgataatggcaacaaaatctgaagtgtttacacaatccattcaactagtcaacacatttattgagcaaccattacaggcaatatctgttgaaggaataaacatagtaaatgctgagtgtagagcagtgagcaatcagacaaggtaaaactgctaaaacaactataataaactctactataaacaactgtactcaaaaatagtacttttccaagttgaagaataagagggaaaagaaacatgcaacatcctaaagccaaggttttaaaatccttgaaaatgcaaattctagtatccatctggaaaatatatttattctccacctttcaccagtgcatttcacagctgcttctgaagctgtattccactaaaaggtatacttgatcatgactggattttacattggattggtttttccaaaggaaacaaatggtttacactggattttccaaaggaaacaaacagaaaagatcagggaagaacttaaaaaagcataaggtttaggaagaagtatttaacgtatccattcagcaatcgctcattatcttcctactgtgaacaagacgctaggcagtgctgggaatacaggcaacagactaatttggagaagaaaaattccttatgacaagcagactctactccacccagctttctttttcatataacaaatatttaatggaaatgattattcgattatttctgtatcaatgaattttcattatacataaatcattcacttgttgagctggccaaaaacctggggggaggatccaattttgagtggagaaagtgaacttttcaactgcgacacccatcttgcagcctatataagtttagctttctggcttgctggcacaacttcctctccagttgtggccaccttccccaggccatggatctctccaacaacaccatgtcactctcagtgcgcacccccggactgtcccggcggctctcctcgcagagtgtgataggcagacccaggggcatgtctgcttccagtgttggaagtggttatgggggaagtgcctttggctttggagccagctgtgggggaggcttttctgc

SEQ ID NO: 18019 - DNA, 2300 bp, Homo sapien
aagagaacaaaaatcatcatgtttaacaactgcattcatgttcttttctaattataaagctaactattgattttataatgcttctacacaccttgatcatgtgttagcatatgaaactcttagctgagaccaacttactataaaacttgtgtaatttaaatagtataattttccaatgactttaatctaacaacctcctaccccattaatcaacaccaaaaacaattcatctttgaatacatgtataaagaacatagttcatgtgtttataaaaagttcttctctgctacagagtttagctgtgacatctattaacaaagtaatttataactctaataagttagcaaggtcttcttgctaccagtccagtcattggtggtgagtactcagtattggctgatgaatacatgaatggataaaaatataagagctgcccacacatataccataaaatgcataaaatagattccattttatctcaatttttatttctgtgatataactaagataaaatcaaacacaatgtattattttaaagtatactgtttataagagagaaataatatgatctgaccttattttagaagaaagttgtgtgtaaaagaaatttaaactcaaaagtaaaaaagccactggtttctaaaaactcaaaaaaaattttttttaagtgactggctttcagaacaacagcaacaacaaataagccactaaaataagacaattaaattccaattttttttgcatttacttgcttgcttaattatatacaaatctcaattccattaaagtatcaggatgacaattaattagatgtttttagtgacttttccaatcccttctaattaacttggaagtgattaactgattatctaattatattaattagtgattatctaattaactaaggaagtgatttacatgcttcatgggaagtgtgaattctcagccagggggtttgaatgaagggaagcaagtgactcaggcatttattggttgcttacaatcagattcccaccgatgagatcatgcccatgtgtctagaggtccacacacaagcagctgcctccagcccaaccctggaagctgagtgtagtcccaagtccccgcctgcaccccttcctatataaacagccactctcgctgtgattatgggggcatacaaggaagatcaggcttccatggaagcttctgcaactgaaatccactggggactttagaaggagcacctgtaagtagcttcaggatggatggggcagagtctgtctcatggtgggtgttaagctggcctcatacaaaagaggagacccatcctgataccatgccaggtacaaagcactgtgtgatttattctaagtgtcttggtaacaggacttgaagccaggtggtgactggaaacctaaaatgcaatatttagtcatagaacattagaaatagaaagaaaataacctcccaaatcatctaatccatcactcagctaaattcatttaattcacatccccaaactacatctccaaatgtacaatggtttcattcctggtttagggattcgaggttttgtgtttgtacaaaatattttaatagtcttataaaataagatgtccaaaacacaataaacttaaaagccaaacacaagcaaagcatgaaacagaggttctgaagagcaactcctcaatacaaatcaaacattgtcctttatctccattgtgactttcagttatgtaggcacatctgcctttttagatacctaaattatacatgaggattgtaaatattctttgtgtgtatgttaggatgaaaaaaacctgccaaggcaggcgcatgggctaaaagaatacactttcctgtttccttttattacctgtttaattaaaaaaaaaaaaaagttgcccctgataaaagcctccaagaaatgcctctagtggtattttctggaattgaattaagcatattaacatattgctatacaaagcggggggcgtggaagtaaggcaaggtggactgtggtgccaatcctagtgacatgtcagcagaggaggagtttcttgcctgtggacttcataaaaggctagctcaacaccctccatgagacacactctgccccaaccatcctgaagctacaggtgctccctcctggaatctccaatggatttcagtcgcagaagcttccacagaagcctgagctcctccttgcaggcccctgtagtcagtacagtgggcatgcagcgcctcgggacgacacccagcgtttatgggggtgctggaggccggggcatccgcatctccaactccagacacacggt

SEQ ID NO: 18020 - DNA, 2300 bp, Homo sapien
ggcactctttctaagcactctccaagcttccctgaggcttggaggctcatttttccagctcgtgcacagtgaaataaaaaatattcagagactcttccctgataaggttttgttgtaagactgggaggagcagagctggtgtgcttttgggtggctttatttgtaattggaaaagattggccttcatggatggttaatctatacccaggagaggcgttttcctactttctagttctataactcacagtcctaaaaggagcagaagttgatggcatcaggagacctgtgttaaaatcctgactctaaaaagtttatgattgagtcaacatacatttgcaaaataccaccaagaaaccagactttggtgctcaaaaatggaagacataaactctgctttcaagaagcctgcggtctcagaagggtgtggcaaatgcagtataatggagtgaaagaacggagtggacttcatcccaggcacaggaggtggctgcgcctggctaggggctcccagcttccaccatgaggtgggatgccaaggtgtctgcccctctggaggacctcggcatccagaagaggcagtttcctcctagagggtcacccaactcatgcaggagaattcagaaaatgattgttgaaggaggtagcccttgaactatagaagaggtaggggtgagtgactttccaggcagggaggacagcacagactcgggcagtgtcacctatgaattcatgtgctcaattacactgtacatgcgaatcagctctggatcattcatccctatgagaccctgattctttgtctgcaaaatgaagacaacaacccttgcctggatacataaagagttgtgaggattcaataaagaatataaaagagctacaccaattggcaagtcctattattatgaaagagaagtgtggtacaggacctgtcaagattcaacccaagataacagtgctatgtggagaaagaatctagccctggctctgccactaacctccccaccaccataggcctcagctttcctcatctgtccaattagtggcttggaaccagaaaggccagaagcccttcctgcgctgatattttatttgtaagtcccctttaaatccaactgccagtaactagcacgtggctcccgcccccagactgcttctttattcattcctaacctttaccttggcagatgaaatataagattcatcaaccacatttgacagcccatggcaggtttcctgttttccatcgtccctctgcaggtcacagacacacagagcccagccgtggcaggctcagccggggtccggggctgctaacaacggctacattcctcccccagggccaagggaaatcctgagcgcaggccagggttgtttggttttgaggtgtgctgggatgaaaggcaccctggaagtggaaggttcggtcattcattaattaattacatctataattgagggtttgttcttaagagcgagtcctttgaaagtactttccttcaaacagtgactgccacaaaggcatcagatattcaccaccttctcggctgcctcagcacagcaagctttattctgggacctgagatcctgttctgagctggctttcccttctccaggctcgctcaccctccctttagaggtggggcttattgggggtggaaaaaggtgtgtgtatctctgttgtttaatgtctggttttttgttgctgttgttgttgttttgttttggttttggtttttggttttttttaaggaaatctatactacatcgaatatgctttcttttgggtggactttaacctaacccattccaggtaaatgaacaatggaaaaacttcacggcaagattagaaagatacctgagcccaatacccgcctgatgtcgtgggccacacctccgggttaccaggggaagggaggaagcaaactgtcatattgatgtggctctaaacaacaacagtgtgcgaaggcccaggggcactttgggattgaccaagaggaaacacaagttgcacaatgatacaatcttgttggtacaattgtcagagaagggaactcccacagcaaaggccataaaaccatccagggcagtctggggcggctcagttctgcggtgccagggagtggagcagagctcagccccgtcccaaacacagatgggaccatgaactccggacacagcttcagccagaccccctcggcctccttccatggcgccggaggtggctggggccggcccaggagcttccccagggctcccaccgtccatggcggtgcggggggagcccgcatctccctgtcctt

SEQ ID NO: 18021 - DNA, 2300 bp, Homo sapien
gggaggtggaggttgcagtgagccacgatcacatcactgcactccagcctgggcgacagggcgagactctgtctcaaaaaaaaaaaaaagaagttatggaaaattggctgggcagggtggctcatgcctgtaatcccagcactttgggaggccaaggcaggcagatcatgaggtcaggagttcaagaccagcctggccaacatggtgaaaccccgtctctactaaaaatacaaaaaattagctgggcatggtggtgcgcacctgtaatcctagctactcgggaggctgaggcaggagaatcgcttgaacccaggaggcggaggttgcagtgagtcaagattgcgccattgcactccagcctgggtgacagagcaaaactccatcttgagaaaaaaaaaaaaagaagttatgggaaaccatcatataacagtactagaagagactatttctccccagtgctctcagatctcaccaccagtttttcctggccctggtcctgctatgacacaagaaatcttttgctcaaggataagtcctataaatcaaaactcccacacatggacataaaatgagacagtggccaaatctatggggttgataagtcactgccactcagacatgcctgaaataattagagaagcattaatttcattgtagattctggtgagagaatttagaaaaaggcagtgcagcccggcccttgcacatgctaaaggtaaatgttttcttccttggtaagtctgggtccaggcgaacaggaaccagagctgaccataactttgatgaccaggaaccgtccacatccacagaacactggttgccaccactcgccaaacaagtctctctagttccctcatttgctctatttttatcacttgtctcttttgtctttttctcatatctgagatgtaagtgactgtcggcactctttctaagcactctccaagcttccctgaggcttggaggctcatttttccagctcgtgcacagtgaaataaaaaatattcagagactcttccctgataaggttttgttgtaagactgggaggagcagagctggtgtgcttttgggtggctttatttgtaattggaaaagattggccttcatggatggttaatctatacccaggagaggcgttttcctactttctagttctataactcacagtcctaaaaggagcagaagttgatggcatcaggagacctgtgttaaaatcctgactctaaaaagtttatgattgagtcaacatacatttgcaaaataccaccaagaaaccagactttggtgctcaaaaatggaagacataaactctgctttcaagaagcctgcggtctcagaagggtgtggcaaatgcagtataatggagtgaaagaacggagtggacttcatcccaggcacaggaggtggctgcgcctggctaggggctcccagcttccaccatgaggtgggatgccaaggtgtctgcccctctggaggacctcggcatccagaagaggcagtttcctcctagagggtcacccaactcatgcaggagaattcagaaaatgattgttgaaggaggtagcccttgaactatagaagaggtaggggtgagtgactttccaggcagggaggacagcacagactcgggcagtgtcacctatgaattcatgtgctcaattacactgtacatgcgaatcagctctggatcattcatccctatgagaccctgattctttgtctgcaaaatgaagacaacaacccttgcctggatacataaagagttgtgaggattcaataaagaatataaaagagctacaccaattggcaagtcctattattatgaaagagaagtgtggtacaggacctgtcaagattcaacccaagataacagtgctatgtggagaaagaatctagccctggctctgccactaacctccccaccaccataggcctcagctttcctcatctgtccaattagtggcttggaaccagaaaggccagaagcccttcctgcgctgatattttatttgtaagtcccctttaaatccaactgccagtaactagcacgtggctcccgcccccagactgcttctttattcattcctaacctttaccttggcagatgaaatataagattcatcaaccacatttgacagcccatggcaggtttcctgttttccatcgtccctctgcaggtcacagacacacagagcccagccgtggcaggctcagccggggtccggggctgctaacaacggctacattcctcccccagggccaagggaaatcctgagcgcaggccagggttgtttggttt

SEQ ID NO: 18022 - DNA, 2300 bp, Homo sapien
taccttttccccatggcttttattttgtattttattttattttattaaaaatgaaatcgcactgtgttgcccacctgaacttgaactcctgggttcaagtaattcttctgcctcagcctcctacagaatgggagaaaatttttgcaatctgtccatctgacaaagggctaatatacagaatctacaaggaacttaaacaaatttacaagaaaaaacaaacaaccccatcaaaaaaatgggctaaggatatagaaagacacttctcaaaagaagacatttatgtggccaacaaacatatgaaaaaagctcatcatcactggtcactagagaaatgcaaatcaaaccacaatgagataccatctcacaccagttagaatgacaatcattaaaaagtcaggaaacaacagatgctggagaggatggagagaaattggaacacttttacacagttggtgggagtgtaaattagttcaaccaatgcagaagacagtgtggcaatttcttaaggatcaagaaccataaatacagtttgacccagcaatcctattacttgatacatacccaaaggattataaatcattctactataaagacacatgcacatgtatgtttattgcagcactattcacaatagcaaagacatggaaccaacccaaatgcccatcaatgatggactggataaagaaaatgtggcacatatacaccatggaatactatacagccataataaaggattagttcatgtcctttgcagggacatgaataaagctggaaaccatcattctcagcaaactcacacaggaacagaaaaccaaacactgcatgttctcactcataagtgggagttgaacaatgagcacacatggacacagggaggggaacatcacaccggggactgtgagggggtgaggggctaggggtgggatagcattaggagaaatacctaatgtagatgacaggttgatgggtacagcaaaccaccatggcacttgtatacctatgtagcaaacctgcacgttctgcacatgtatcccagaactcaaagtacaaaaaatctcataattcaagaaaaaaaaaaaaggatgaaaaggggccactagctgaggatgtggacagcctgtagaagctggaaaaggcaagaaaatgatgttcccctagagcctccataaaggattagcagcaagtaactttctgaagaaaatgctgagtaagtattcctcagaaagaaaacacacccctttcaatgaatcctatttaaacatccagtataaaccaacactgtgatacatttttatctaatgtaataccacaagcaaacaccaagcactaaaaatgttataaaatgtggactttggaaaaccaaaagagagctagtctcttttccaagaaatttcttattagcaatcaaaccctaccttttccccatggcttttattttatttcatattttatttatattttattttatgttattacattttatggaaagctaaaacataaatctagcaattatctttaaaacaagacttttaaaagactaacattttaattcatactcacattgtcctgacactgaaaatggggaaaccatttgggcagaacaaactaaaatattgacttctgatttctaagtttaccaataattattaaacattaatagtttcccttttctagagaagaaaggaaaagaaggatgaactcattcctggttaagctcagtgccaagtggagaggtcaacaagaatgtaatgaacttagtatactcacacctgcttaataatggatgctgttaggacagttccttttgaagacataatttgaagctctgggtccaatagacaagtagtagttatgatgggtaataacttactaacagcctaaatgcacatgtttatgagacaaataactcttcttaagcaagtaaaaagcagactaataagatgttcctacaggatttgatataaacctgagaaaggaaaacatcccacctgtgtgacaccacgtagaagagaggctatataagcacttcaaagaggaaaacaccaagagccttggaattcagactctgtggaggtggcttgagcttttcatcctggtgaccacagacctggaacaaactaaagccagacacatactatggacaccaagggctgtacaacaaccaattctccttcaaccccatgtcaaaactgctctaggattacaaatgttagtaccatctcttctaacaacggctgccatcctggtggccttacagtcaacaactgtcaaccagctggccacgttctcagaattccctg

SEQ ID NO: 18023 - DNA, 2300 bp, Homo sapien
taaggagaaagaaataaataataaacataatatcagaaatcaatgaatagaaaacgaggaaattaatgaagctaaaatttgattctttgaaaggattcataaagtacttctatttagttattttttagttggcaaataataattgtgtatatgtatatttgtggggtacaatgtggtgttttgatttatgtatgcattgtggaaagataaatcaagctaagtaacatatccatcacctaagcacctgatcattgttttatggtgagaacatcaaaaatctactctttcagcaaccttgaaataaacaatacattagtattaatctgatgaacatcaagccagattgatgggggaagcatgagataaaacacaaattaccaatatctggaattaaatagtgagaatttatagacactgcagatactaaaattcatgataaggattattatgaacaactttatttcagtatttttgcaacttaggtgaagtgaacaaactccttgaaaaatgcaactttcacacaaaatgaaatagaacaactgaatagcattgtgaggtttctataagtagaggtaagcaatttgatgtagaggtcagcaaatatacatatatttgcgtgtgtgtgtgcatgtgtgtgtgtgtgtgtgtgtgtgtgtgtgtgtgtgtgtgtgtgtttgaaatggagtctcactctcacccaagctggagtgcaatggtgtgatctcggctcaccgcaacatctgccttccaggtttcagcaattctcatgcctcagcctcccgaaaagctaggactacaggtgttcgccactatgcccaactaatttttgtatttttagtagagacaagccttcagcatattagccaggctggtctcaacctcctgcccttaagtgatctgcctgcctgggcctcccaaagtgctgggattacaggcttgagccaccgcgcccagacattttttttcctagttaaaaacaaaacacaactttttcacatgggagactcctggaagaggtggcctcactggactccatcaaacatttaaggaataaataacactaatcttacagaatttcatgaaataaagaggaaacatttcccaatttaatttatgaacagtattactccattctcacactgttataaagaaatatctgagactggataatttataaaggaaggaggtgtaattgagtcccagttccacatggctggggaggcctcaggaaacttacaataatggtggaaggggaagcaggcacttcttacatgggggcaggtgagagagagcgtgggaaggaggaactgtcacacacttacaaaaccattagatttcctgagaacgaactcactatcacaagaacagtatacgggaaactgcccccatgatccaatcatccaggtccctcccctaacacgtggggatttggggtttataatttgagatgaagtttgggtggggacgcagagctaagtcatattgtgaacccagtatgtaacttgataccaaaacctaacaagatcattagaagaaaagaaatttacaggaaatatttctcaagaacatagatgggggtggaaatccatttgctaatcctatcaactaactgaataaaacaatttacataaaggataatgtagagtgaccaagttattcaatatgattgatcatgttgtagggtcacccagatcatccctccacttccttctttgccttgggaaacagattaccttgaccaccctgtggcccagccagctgtgtgtttcccctgcagcttgaacccgagctgacccttgaacattcccaggcactgttaaaagttatttaggttgttgcccaaaacagtgaaaatcaaccaagttgctgcacgtggatactagctctggccctgagccaaatttcttaaggcctcatgtaaactcttataacctgtcgcacaaatgttaaaagcaacaagacaactgctatagcagagatgcgtgcaaagtgctctgggaggagccacatctccacatgaggcagttgaacgacgtttcagctgagtcttgacatgtgagttcatccaggaaacgaatagcagaagagcatttgaccaagaaaatagtacctacgaagcttgaaggatggctggagcttagggtttgtgagacagaacatcaggaagtgagcccagaaaggtaaattggcaccaggttagggaaggtcatatttgccaaggtagaaagtttgcattccataagtggaaggcgacaaaaagcaggtttgtattttaggaaaatgattctggcagcctaggt

SEQ ID NO: 18024 - DNA, 2300 bp, Homo sapien
tcaaatttttaggtttgttaatttatatgccaaccactttctctaatcgtagatgtgattatttatttatttatttatttgtataaactaatataaatgtttgctctttcctgtaaggttgctctcttacttaccttcatctcattttcttttcttcttttgactatgtttcttttatctttaccttgccttgaatttcatctgtaatttgtttcaatcatgataataatttatttttgcatagcattatatggttgtccatgagctttcaccctttttatcacatgtgaacctcacaataatcttctaagtggaggaatatgcatgctattaccctgatttcgcagagaaaaaggatgaagctcctaaaagtgaattacttaccataacgaggaagataaccagcagcaccgggaacagtcaagagctattctgactcctcaggtggtcctcttgactacacgtccccattcccaaaacatacaaacatgcacaccacaatgcaccactcaacaggtgtgcctaaaagaggaggtatgaagaatgtgagaagaaccatggcttgcaagaagcatgagaccaagctgagcggaaatggttcgaggtgtataaatgatattggccacaagcccaccttgtgctccctcttaaacactgaactatgcctgcagtctaaatagcgtactggtactagaaccaggtctttcctaccacagctacatttgatttcaggaaaaaatgcaataccttgcaaaaaaaaaaagaaaaaaaagagagagagagaatgaaatcaaatgtcaacagattaatctagctcaggctcataagtttcctttggtaataattttacttgaattttagttttgtattcttaagttattattttatttagtctatatagacagaagctaaaaattcaatttgcccacaattagcagtgaaggaaacaaagcaagccaactctcaatagaagacagatggccaatatgcatatgaaggaatatttcaacctagctggttataaaagaaatacagacacaacaatcataaaattgtgtttttcaccaatgaaattggaaaacacctttaaaataaagtatctgtcaaaggtatacgaaatgggaattcttaatcaaacacatctggtggaaatagataatttgaaaaaaaaagtaggtaaatagaaccattctgaaaaacagtatggcaatgatatgaaaggccttaaaaatactggaaattaacatttgcccctataattctaccaaataattaattctgtttctgaaataatcaaaaatatgcacaaagatttacatacagaggtgctctgttgccaaaattattgtagagaaaagtggaaaataacctcaatgcataataatataaaattttaaagtaacatagaagtgcaattatataataaatgctaagaaatattaaaagtaacactatcaaatatcctttaaaatataagataattatatatatatataatatatatgcacacacacaaaggcaagtttcagaacctatgcacaatatgattccagtaatgtaatgtaatgataaacaatgtatacaaaatattttgtagtaaaaaactagaataataagcgttttttaaagtttttccatatttcttaatggcatatttcttcatgttaatgtaattttgatcttcaaaagcctcaaagctaaaagaaagtaaaattaagttcaactctttaaaacaagaatactttatcagacaaattggtatagataaagtgacagattaaaaataaagcagcactggagagcaggcccacatattacagactcactgtcatgcaatattccccagcagggctggtgttgaaaatataataacagaaggctttggtgatacctcataaagcttgtgttccagtgacaaatagcaagggtaatcagttcagatttagcaacgaactcaaataaaagttaattaggaaaatggggactctttacagagtctaaatgtcaaacaaattaaagaataatgggtacactaacataaacaagaaccaggaaagaagcctcttggctggaccaactcccagtggagagggtacataagagccccagagaaaggagagatattcacacctcagaagccttatccttcttttcaatcaaacccataaataccacagactctaatagccatggattgctgtgcctctcgaggctgcagtgtccccaccgggcctgccaccaccatctgctcctctgacaaatcctgccgctgtggagtctgcctgcccagcacctgccca

SEQ ID NO: 18025 - DNA, 2300 bp, Homo sapien
aacacacctgtcaatcaaagaggcaaacactggctagagattaggcagccttgggaagggacacacacacacacatacacacacacacacacacacaaagacgcaaactgcaccaagctgggggctgatctcatctcacagaggctggtttgctctccccctcttagagtgtaatactgtgcttaatacacttttgtttctttgttttgctgtgggtgtctcgtccaattctttgggacaccaaaagcctggaactgcatggcaccatctggtaacagtatgatgttcgacacccttggcatttgttgtaaattcctgctaataaaaatgatttgaagctgttttctgtttttttgtttttaacttttaagttcaggggtacctgtgcaggtttgttacataggtaagctggtgtcatgggggtttgttgtacagattatctcatcacccacgtattaagcctagtacctaccagttatttttcctgatcctgtccctcctcccaccttccaccctctgataggttctagcatctgttattcccctctatgtgtccatgcgttctcatcatttagctaccacttataagtgagaacatgcagtattcggttttctgtttctgcattagttactaaagataatagcctccagctccatccatgtttcttcaaaggataggagctccttattttttatggctgcatagtattctatggcatatatgtaccacatatttttgttgttaaagaaaaagataaactggttgttttaacgtataacgtataaggcttacctaccaatgacatttgatattttccactgattttagccagctttcttctcttttaagtagatcgtactggtttttggtaatgtcccctcagaaacaacctacccggaatctttgctttctgttaagtcaacaaattgccacataacgagtatgtaatttaaattatacaatattatctgaaaggatttgtgctgatcatggacaggtgtaggaagatgttggaatctagaatattacacatttgatattatctagttcaatctctggctgacttaagtaaataatgttgtttaaggcatacctcaaaggaatttcaatctagttcaagatccaaggtatgaaaacaaataaacatgcaaagtagggagtaagtcagtgaaaaagtgatttttatgaatgccatagttctaaattgcattgagtcagattccctgccaaaatccatgattgttctgtgactcttgtggtttctccttttaattcttatttcatcttattttaaagtatgtacaccattcatgtgaaaatgaatcaaggctgaggtggttttcttttagtggtatattcaacaaagaatggccactgtgtggatccttccttccaatgaatttatactttgattcaccacaagattggcataactttgagaatagagactattttagaaaaaaaaaatccatagaataatacaacattgagaaattcactacagatttaataaaaataataaaaaggagtttcttcatcctgtaccattctaccactttgcttgctcaatagaacctgaattataatatcactaaataatgcaaacatgtccgagatgcctgtagtcacatgaaacattcatctgtaaatagccatattcttgttgactttattgagttgaaaatggtccagttcatcatttgagttactcattctgaaattagtcattagaaatcacattatccatagtattttaaattaagagggaaaaacaagaagagtttggcctccaaaattacagctgaattgtcacttggattgattacccataaaagtcatataaggtttggcatgccagaaacctgtgaagacaaaatgtgatgatcttgtgacaaaaatgacaagtcaatgagtcaaaaatatgattaacttaataagagcgggaactcttaatggacatgtaaatgacaaactgattagagaatctcagtgaaaaagggtgccataaacaaaacaggaaggcttccagttggaccaatgcccacttgggagggtatataagagccctaacaaaagaggagacatttgtacctcagaatcctcatctaagaaactgaaagctaaccagacgcccattgccatggattgctgtgcctctcgcagctgcagtgtccccactgggcctgccaccaccatctgctcctccgacaaatcctgccgctgtggagtctgcctgcccagcacctgcccacacacagtttggttactggagcccatctgctgtgacaactgtccccca

SEQ ID NO: 18026 - DNA, 2300 bp, Homo sapien
aacccacctttccgtcttcattccaacagattcagaacctatgcttcaaccaggcaacactttttgtcataccatgggggccctgtggcattttgtttcaatggctgaaatctccttcctatttatttctatctgctcagctccttttcacccttcaagatccaaacagatgttctctttttgtgaagggcttcctaagttttctaggagaagtctgtggcttctacctctaaattctcatatcataacctggaaaatctaaatgtacaatcctttgttattgtttgctggtttacttctctgtgtctgtcttcttctctatgacccctgtaagggcaggagcctattgcgactttttgcatgatgcccaacatacaacaggtgttcaatcaatgagcattttatatgtaaattctaattttgatatgtaaatatctaagagagatgtaaattctagcataggaatccaaaactgcaaaatcattccaataagaaaatggctaaaaagaaagcagtttcatgctaagcatttttttaatccaacatcttgttgatttgcatctcatttggcttctgattcctctgcattgtgcaattttctactttagaacttgagccatcttatctgaaaaaatgggtcaagaaaatatgtacatgtttttaagcctttctaagtaagccatttctaaaggttttaccagtttagtatttttcatattctaaagtaattctaaatcatcatactaaattttctacctttatctacttttaaaactttatttttagagttttagtggtttagatgaaactcggaaatgtctctattctggaccacagagcctggaagtaagacaggggtgttcaatgttttggcttccctgggccacattgaaagaagaattgtcttgggccacacataaaatacactaacactaatgacagctgatgagcaaaaaaagaaaaaaaatcacaaaaaaatctcataatgttttaagaaagtttatgaatttgtgttgtgctgcattcaatgcctttctgggccacaggttgaacaagcttgctgtaagatgttgctaaatctccccaagtatgtttcataaagcactgacctatagagctaatctctgaaaacaaacaaaaagcagtccatggtcaagtaagtttggagaaaaatatatgctatatctctgtattgaaaagtcatagagcattttagcacattaaaggctccgagaggcccaacaatgaagaattcagcatttcccaaacttacttaccagaaaacactttcaagtcccttggaaccagtgttcatggaactcagtctggtaaatactgcatcatttagcttctgaatggcccaatacaaccagccttttggttataaataatctccatttataacacagttggatggagcttaaaggacacccatctttgtcacccatgaaggtcttcattcccacctgcatgttcttaccaagttattgttcagagcatatttgaaaggaatgcagaacaaacgatttgttatagctctgtttgaaagtgcctctttacacaaaaccaaaatctatttctctatagattctatccattcatcttcattcagtttattggagccacaaataataaatctaaaatgttatatcactttttcagcctgagggcctaaaggatcacatagaacctgtagtcactggtagaacagcaaacaaaaagcttacttgtcctcttcatctgaaaagtaaacaaaagaagtgggaaacgtttgcagatgcctggcataccgagccattattagtgagggtataatgattagaagataatggcccggtacctttgaagactggaatgaagatttctgtgtagtgacacactggcaatgtgaatagtcctaatttgacaacaaaacaacctaaatctcttttatgaggtgagcagtgtatcttaggtaataaacacttaagtaattaggcattttttatggaaataactataaactgaaacatgggggaaaaaccctcagtaataggctgacgcccagggagatgggtatataagagccagagcagaagagaggagcatcgagacaccaacagacttctctcaactcaacaaaaacccacctcccattgccatgtattgctgtgctctccgctcctgcagcgtccccaccggccctgccaccaccttctgctcatttgataaaagctgccgctgtggagtctgcctacccagcacctgcccacatgagatcagcctccttcagcccatctgctgtgacacctgccccccac

SEQ ID NO: 18027 - DNA, 2300 bp, Homo sapien
ctttaaacatgtcttcttgtagctggtattcaagagtggatttgcaatttgataataataccaaggcataaccataaagtctaaaccagaaagattaaatacaaagtaaattatgcttgaatccatcagcttaaaaatgctccatgaattaaagaatttttatagttcaaatatttacatgctctaatctattatgattaggtctagaccaataaaggttgacctttagctaaaatgttaaggttgatcaaagctattgatttctatctaaatgtaattctaccatcttttgtctccttccatttaatatactaaatgttctccttcatttatgccccaaaatctaaagaaattgcattaccttctaaatagatttaaaaatagctactagatactacctattttccaagagaatttaggtttaatttctacaccttagcctttcacattcttcccactgatccttgaattgctctctaagcttcaactcccactattcaccttcatttgatgtacgtatgcataaggtgtatctttggtctaaatgatagtagaagaaacagctatagagagcacccgctgagttctaccattgccatttgtcagacagaagtgttagaaatctgaaacagctcgattatattttgcactttgcaacccaacttaaaagatattctcttaagaagttaacacgctggacacggtggcttacgcctgtaatcccagcactttgggaggctgagatgggtggatcacgaggtcaggagattgagaccatcctgactaatatggtgaaacccagtctttactaaaaatacaaaaaaaaaattagtcaggtgtggtcgtgggtgcctgcagtcccagctacttgggaggctgaggcaggagtatggcgtgaacctgggaggcagagcttgcagtgagccaagatcacgccactgcactccagcctgggcaacaagcaagactctgtctcaaaaaaaaaaattaacacaacctagaacaaaacaaaacatattttaccatttaatttttaaattcttcattaggcattagagtgtaatacacaaaatacaataggatgcaaatatagaaagaaacacgttttccacattatttacaagctcccagaacttacctctatatttaattggtagcaatgatggattacacacaaaattatgcaatttccaagaggaataaagtagatggcagtacatttttcaaagtgtcataactcctagatattttttcccgagcccggttccactactaaatccaaaaaataaaataaaataaaccaaaaaacacatttcctagtctctttacagcaaataacaagactctttcatgagaagtactacagcttgaaagttctctttaatcatgtttgagtggtattgatatccatgaatcaagccttttactccacctattcaataaacatttattgaatcagattcagtaaacatttattaaggttctaccacaaactaaggactctgctggataccttcctaaatactatgtcagtttggttcccaagaacagatttctggtctggaacaggaataatagtcacacattccaaattggttgaaatcaaaggaactataatcggtaattcaataagacattggaacaaaaaaaggtgaaatctgcgaattatgtatgaccaaaggtattccttcagttcagtagatatccagatatccaaaattcaataaaatttagtctatatatctaggaggaaaaaataatagttaaatataacagcacaattattactcttagccttagaggtatggatagattgtcacgtggaataactattatgtaaaatgagagcattcatttggactaaaatggaagtactctttgaacatgggaaaccacaaacatattccaaagagcaaaggactgatatgaggagtccagaagaaactataaaacagtaatttctaaactattgctcataatgtgtcacaagtatttcaacataagccaatcagagatccacggagtaacaaatttaaacaaaaacaaagaaaatatgttaacaattttgtaaacagcagctggttcagatatataaaaggaccaacgtggaagtcaccaccaaacctcagaaactcctccaagcaacctaactcttaacccaacttctgacaccatgacctgctgccagaccagcttctgtggatatcccagcttctccatcagtgggacctgtggctccagctgctgccagccaagctgctgtgagaccagctgctgccagccacgcagctgccagacta

SEQ ID NO: 18028 - DNA, 2300 bp, Homo sapien
ccttggtcaagtgattacaataagagctcaactaagataatacccatggaataaagaagacacaatgagtatagcagatgtagaaacccagaaagtatattaacttagttgaatgtgggaaacaaaaaacaactaggaggcaaatgtgacttattccaattataagtctctggtccagatacttaaaagaactttaacatatttgtacttatttattgtgtatttaaaatcactactccatagtgccatctctctaccatctaatatttctattcttgtgctattacaaaataccttttttttttagaaaaaaagacaaagacaaagagccttactaacattaattgattctgaaaagcagcatggtataaaataaaaagaactggtctaggaacaagtgataggaattttatacccagctcttctggttgtgtactgtgtgaatggaacaagccacttaacctcttcaagactcaagagtattctaacatcagccgatgttaagtgaaaatgaaaagtgctccatagcacatcaccaatgttcccatttagaactttgagactaaatggttctatactcaactcttttccttgattaatccctcctattgctactacactgatttttatactagagcaagatacaaaacaaatagatgggatcttgctttctgtataagcctttagtgctctgggcatagtagaagttaataaatatgtgctatttataataagaatgatgtcagtttctacacctataaaattaagtggtggaacaagataatttactacatttttgatctccaacattcattgattacatataaccattttcaacttcatacctacagtcatggttaccatatgacgtgaacatctttactgaagctggcatgaatcacattgtgatataaccccattcctgtacaaacaaatgccaccacctcataaaaagctaactatgtgtttctattcatgattggaagggagaaataaacctaccccaagtagaaataatatgtttttgaccagccttttttcatttatctcacgtaaccctaaactcccagtgaaaattacattctttcttctggcaatgaccaggaattgttttaacttttattttgctgaaatttttcttaatctctttgcatttattatactacacctcttgaactatatttggtcacccattttctaacctgccttataaagcagataaaagtattttctaactcttgctttttctttgatttattccctttcctaaattcagttgtcatgctctttggtctaatatcttttcacaggacacatggtttagtaacttgaaatgacataaattaaaattaaattctgcctttgaaaaattatatgccagataatccatatacaagtgatttttgtctttcatagagaagtgtaaattttgttaaaatattttgcaattttttccaattactgaatatgaattttagcctcttttttaagagacattgaaattgaacaggttttgttttatatatcctcctgagtgatcaatgtttcctaaaatatgaatgtgaagttcaggagatatcacagaaattggaaagattccatttcagggaaaaatctatgaatttctatgaatatagagtttatcagagtttctatctggctaataagattatatcgagagaggataatcttattagtctaaaaaatacaaagcagtcttacataagggcaatcatgattaataattcttttctggagacctgaggtttggtgaatatgatctccaaaatcacatcaccttatgggtgagagtcactttgtcaggtgatatacccacaagtgcaaacctgaagctgaagctcaagtggaaattataccattgtttgtaaacaaaatgttaacatttttaccaaggacaaacacatttggtgagtattagctgagcaataaggaaaaatcaattttgagatatatttaaaacaattcagcatttgaaccatcagagggccctagaaaggctggtttaaagagtaacaagataaaaatgttgctcgccacaaatagaggaattggcccagacttataaaaagccggcagtggaataggcagccataattcagaaactcctccaagcaacccaaccttcagatcaactcctgacaccatggcctgctgtcagaccagcttctgtggatttcccagctgctccaccagtgggacctgcggctccagctgctgccagccaagctgctgtgagaccagctcctgccagccacgctgctgtgagaccagctgctgcc

SEQ ID NO: 18029 - DNA, 2300 bp, Homo sapien
taactgaagcatgacccatattttctctgcctgaaaacgaagtttggctatggggtgtggataagtgtcttagagtgaataaacactagaaaggttactgagtgatgcacagattatctttttggacctttataaaggggagacagatccttataaaggggagagacagatctttataaaggggagagacagatctctttagaatgaccttgggtttgaagtttctgcagtagagaaatgagtcttgttaatgtgatgatttaagtcttccaaagaggctcccattgcataaaatgtgattatcatgaagactccacagcagcatgaaaataaattatgagataatatgtctcgaaaagagcagaatatacaactttttacctagttacctctggttaccactttgaaaaacaaaaatcccacgtccgtaaacaaagaaaagaatgtaaaacaggagagtcaaaggtctctagcgatgagattgtgcctgatatctccctcttctgtttccctaattgtgactaccgggtccagtcaatttacattcctcttaaagttttgaaattatgcttgaaattccatttggggagctttagatgtccggccccaaggcacattctttcaaataaagaaaatgatcccgaagtgattcaaaaccctgtctggtgactaacaggaggagtaaagctggaaagtaatgggactgtttcccccatgtagttcctgaactgcccctggcaacacttcctgaagaagcgcatccatcacgcttttagcagtgccacagcagaacactgggcagcctcccaatgcgtctacccctgaacagtgttctggatatgtgtgcaatgttggttgaaaacccctttcttgtcacttgctaatcagagcacctatgtcaaagtatatatgcatatttcttttttgagatggagtctcactctgtagcccaagctggagtgcaatggcatgatctcggctcactgcaacctccgcctttggggctcaagtgattctcgttccccagcctccggcacagctgggactacaggcactgccaccacacccagctaattttttgtattttattagagttgaggtttcaccatgttgcccagggtggtcttgaactcctgagctcaggtgatccacctgccttggcctccccaggtgttgggattacaggcatgagccactgcgcccggccaacaaggtatattcagaaaaatttcccattacagaattcttcattacatgcacaagaaaggcaacgctaaaaaatgacatgtttcagagataaaaatcagcatcttatgacagaaagaccagagttgcacagaacctgaactagagaaaagaaaacatgcaaggcagtcttggaggttttattccaacacttagtggtttgcaaaaatttttgtctgtcctgtacaactctatgagctgctatcctattcaaggcctatgtatcccactatatcaagtgataatcaaacgtattcccaagcagactacgtgggagggcttgtctaacactcgtgtgattcacgtttcacatgtaggtgcttccaaggacttgagtcccctattggggtcaggataggctctactcaatgttctatgtacttctctatgtttttaatttcttttaaaaactgaagtttttttagaccgttttgtccagatttgatccagtgttatctactcaaaataagcatcaagagctactatcacctcaaatgacgatgagttcttagattttcacccaatgtgagtacatccatacttagagataaaacaagagctctttagtgagataatgagtgtgtcacaagcaaccattagtcaaaacaaaattctacttaattggccaaaaggtaaacgaaaagggtcacctgcacccggccagggtatataaagggcccagagggggaggaggacattcacacctgagaacatccagctcctctccacagcccaacccacaccagcctcagacaccaccatgaccggctcctgctgcggctccaccttctcctccctgagctacgggggaggctgctgccagccctgctgctgccgcgacccctgctgctgccgccccgtgacctgccagaccaccgtgtgccgccccgtgacctgcgtgccccgctgcacgcgccccatctgcgagccctgccgccgcccggtgtgctgcgacccctgctccctgcaggaaggctgctgccgccccatcacctgctgcccctcgtcgtgcacggctgtggtgtgcaggccctgctgctgggccaccacctgct

SEQ ID NO: 18030 - DNA, 2300 bp, Homo sapien
gcaagttgaggccctggcttaacatagggctgcagtctttaatgatatctgccatgatattactcttctcactgaagaaactgcccaaattaggtgtgttactttgcaaaattgcatggcccaggacatcttaaccgcttatcagggcagaacctgtgcattaattaaaactgaattttgtgtatatatccctgattactctcacaatgtaacacaggccatgtgggccctagatacccagatttctgctatagaatctctatcttatgaccctgtaaccacatggtttaatcaactcctgagtgcttggaaaaactttctatacagtacaattgttgttacattcattattcttttttgttgtagtagtttatgttgctgctgaaacatctggttgcaatgctcctctgcatatcctagccccagggaaatctcagaagaatggtgtgattagaatgtaagggctattcaagggtatgctgaggtggagggtatggcagacacatctggcagcaataacttaacttaagcataccctgagaatgatcctacaatcaaagaagaatgtatgcttggagttctgagctaaggatctgggagtggccaacttggagatccactccttatctatgaaggacatttgaatccccacctcatccattagaacacaggtcatactggggattgaggccctttgttttggattaaatggaggttgttaggtggagggttctaatgaaaatactgtgtgaactgcatgctttttacaaataatagcagttctcctgtccagataccaccactggaccacccttgtatgtaagttccactaataaaccctgcatcatgttagctttctccaggtcccttctctagctctcagacacattgtcatacttagtggagtcaatgggggtccaggatgacaatgtgtcatctgggcaaaacatttccctaattctcttccagtaccacttctaaccttgctgctgaaaggaaagttcattacttatttttttaaatctgtgtttaatatgtataaatgtaagaggttcaaatgcagcattgttacatggatatattgcatagtggcatgaagtctgggcttctactttaatatatgttttctttcctgtctaaagaccatggtttactgaatccaatgagcataaaactcatagtagaggctacttactgcagactgaggagacctggatctcagacctcatatggtgacctcattgtgtgaccttggtacactctcaggacctcagctgtagagtgagggcataggcctacatattctccgcaatcccttcccggactctacagatgcaacgactaattccaaacaaattacaaatataataattgcaatggatccttgaagagggttttacaatcaaggtagaagttgagtttggattggaaggatgaggagggcattccaggtgaatgatgacacatcaaaaccaaggcaggaaagcccaggtcctagtcaggggagagtgaccacaccagtggccagggatctgcatttcgtgtggtccctgctcatatgaaaaaccacaagcctatctttaagtgagtcatggaaggagctatctgtgaagcagatgactactggtctgcactaggatgatgcaattaacctgctaccatcatgcccatgtgcattaataaggcaagtcactgcttgggtgccggtgatgggagcctttgaagacaaggaagaacatgctaattttagcgccaaagggcagagcgattagacactaatttagaaaacacattcttttctctcttatgggttaggaatatttcaaaggaaaattaatcagaagtgaatccaatgtctaaatttagtgaggataaacaatacaagaaaatgagcgaatatttgtggtgtatgtacatgaatatgtatgaggtgaagagtgaccaaaataccattagtcaatgctaaatcttcacttaattggccagaagatgcacaagaaaatgatcatatgttgaagggtcatcagctcccagccagggtatataaagggcccagagggggaggaggacattcacacctgagaacatccagctcctctcaatagcccaacccacaccagcctcagacaccaccatgaccggctcctgctgcggctccaccttgtcctccctgagctacgggggaggctgctgccagccctgctgctgccgcgacccctgctgctgccgccccgtgacctgccagaccaccgtgtgccgccccgtgacctgcgtgccccgctgcacgcgccccatctgcg

SEQ ID NO: 18031 - DNA, 2300 bp, Homo sapien
ctcttagatttacattttgacttttaagttggtgatggaacatgactttgggactattgggataaaaggaatatattttgcgtatgagaaggacatggatgtggggggccaagggtggaatgcaatggtttgaatgtgtccctcaaagttcatgtgttggaaacttgatcctcaatgcagcagtgttgggaggtggggcctaacaggagatgtttgggtcatggtgacaccaccctcatgagtggattaatgttgttatcacaagagtgggttccttataaaaggatgagtttgactccttctttctctgtctcaccctctctcccttccacaatgggataacatggtattcctggttatctataaccaagtctcattctataaacggaatcctaattccacaaggttccacatatgctatttatcaggggacatgttgcttaccacataaataattgtagttttcctgaaatgaaactctgatctccttgtttggaatgttttcctctcttttatccagaagtcaaacgatatatacatttttaaaggaccttacatgcttctatgtcatcaaaaagccttcattcattcaacaaacatttatttccggtgttctctgtgctgagtatcatggtaacaaaaagaaacgtcatagcccatgccttcaggctatttgcattgcatatgggggaatgaaagaagtaaacgtctatgatacagtagaatgtatcacattatgagcacaaggcaggaaataatgataaatgaatggggtagtttatcaggaaagatattactgaggaggaaatatttaactgggttttgacaaatgagtaggagtttgcagagtggacaaaaaaagacgacacattccaagaagatgaagcagtttcagcaagcttagcaaattttgttctttaccactttcttggctacactaagacatattaggcttactttctctttaatcttggacaagcattttgtttgtttgttttagctttttaatgcttcttttgagtattctgctaaaagagcaataagaatgtacactactttataaggttgtaataaagagtgaaaatgaaaaagatatttagcacaatgtctggtacatagtcaatacttcacaagtaatatacataccctgaggatgtatggaacttatccacatactatacatttttattttagttgtttaatgaacataattgtaattcttttcatttttgccaaattctgtttcttatgcatgtgtcttatacaagtacctgcaggaaaaagaggagggtttatctgttctatacccagagtacccaatagaatgtcttggatgcatattattgaaggcttaataattctaaatattgtttacatataacaaatgcttttgtcaatgaataatccatcatgcagttttgatgatcaaaggtaaatcaaaacttcctactccaaatgcctatactgtaagacatacagaaaaatgtgtttttactcattaaaggcaatgagtcatggctaagtactttcacttggagtggtggaatgagatctgacacagagtttataacttccttaagatctgaccatctccccaaccattcaagaagcatacacggaatcagagtcatcttcattatagatgggacatccttctcccgaatgagtccttccttctaattcctttccaacatttcatctgaccaggacattatttgacaacaaaagacacattaacattataaaagttgtcccccatgatttgcagagagcaatctacaggtaggagggagaatcacatttagaaataaagtgtcagagtcatgtgaccagtgctttgtaaaagacactgcagagaccagggacaaaggtgacccccactaaggaagaaatatgacaagtgtttccaatagaaacacaggagcacagcaggaaaaggaaatgggttattttctctcttttggagtatttaagtagaaacacacaattatgtaattacatgattaagttttccacgaggtaaataataaggaaataatgacgtggtggcaatgggccttcagcagggtataaaggaggctatggacccagaagacttccaaacccaagaacttcactctcttggaaacccacccagatcctccccgttctgacaccatggtcagctcctgttgtggctccgtgtgctctgaccagggctgcagccaagacctctgtcaggagacctgctgccgccccagctgctgtcagaccacctgttgcaggaccacctgctaccgccccagctgttgtgtgtccag

SEQ ID NO: 18032 - DNA, 2300 bp, Homo sapien
actgtgtgaatataggcatgcacgttcaacactgtattcttggttatctataaacaagtctcattctataaattgaatcttgacttccgcagtttccacgtatgttatttatcgggtgacatgttacctatcacacaaatgagtttagtcttcctgaaatgaaattatgatttctttgtttgggatgttttcctcccttttatccagaagtcaaaagatatatacattttttaaaggaccttacatgcctctatgtcatcaaaaaaaccttcattcactcaacaaacatttaccaccagtgttctctgtgctgagtatcatggtaacgagaataaatgccatagcgcaagccttcagggtatttgcattgcacgtggtggaaagacagaagtaaatgactatgatacaggagaatgtataaattatgagcacaaggcaggaaatcatgatacatgaatggggtagcttagcaggaaagatattattgaggaggaaatattttaactgggtcttgacacatgagtaggagtttgcagagtggacaaaaaaagatgaaacattccaagaagatgaagcagtttcagcaagcttagcaaattgtattctttacggctttcttggctacactaagacatattaggcttactttctctttaaccttggacaagttgtttgtttgtttgttttaagtttttaatgcttcttttgagtattcccctaaaagactaataagaatataaactagttcataaggttctattaaagcgtgaaaatgaaacaaatgtaagatatttggtacaatgcctgctacatagtcaatacttcacaagtaatatacataccatgagggtgtatggaacttatccacatattatacatttcttattttagttgtttaatgaaaataattgtaattcttttcatttctgccaaactgtttcctatccatgtgtcttatgcaagtacctgcaagaaaaagttgagggtttatctgttctacacccagagtacccaatagaacatcttggatgcatgttattgaaggcttaataattctaaatattctttatatataacaaatgcttttgtaaatgaaaaatccatcatgcaattttgatgatcaaagattaatcaggctgggtgttgggggctcatgcctgcaatcccaacactttgggaagccaaggcaggtggatcacggggtcaagagatcgagaccatcttggccaacatggtgaaaccctgtctctactaaaaatacaaaagtaagctgggtgtgatggcgcaaaccaccttactcgggaggctgaggcaaaagaatcgtttgaacccaggaggtggaggttgcagtgagcagagatcatgccactgtactccagcctggcgacagattgagaatctgtcaaaaaaaaaaaaaaagataaatcaaaacttcctactcataatgcatatactgtaagacatacagcaaaatgtgtttttaccctttaaaggcagtgagtcatgggtaagtactttcgctggaggctgtggaataagatctgacagagtttagaacttcttgggatctgaccatctgcccgaccatccgagatgcacacatgggatcagagtcatcctcattacagatgggacatccttccccaaatgagtgcttccttctaattccttcccaacatttcacctgaccaggacattctttgacaacaaaagatacattcacattataaaaatcatcccccatgatttgcagacagcaatctgcaggtaggagggagagtcacatttaaaaacaaaatgtcagagagtcctgtgaccagtgctttgtaaaagacactgcatagaccagggacaaaggtgactccccactaatgaagaaatatgacatgcatttccaatggaaacacaggagcacagcaggaaaaggaaatgggttattttctctgttttggagtatttaactggaaacacaatgatgtaattacatgattaatttttccagtaggtaaataataacaaggaaataatgatgtggtggcaatgggccttcaggagggtataaagggactacaggcccaggagacttccaaacacaagaacttcactctcctagaaacccaactagatccttcaccctctgacaccatggtaaactcctgttgtggctccgtgtgctctcaccaaggctgtggccgagacctctgccaggagacctgctgccgccccagctgctgtgagaccacctgctgcaggaccacctactgtcgccccagctgctgtgtgtccagctgctgcaggcc

SEQ ID NO: 18033 - DNA, 2300 bp, Homo sapien
atattatttcatttctcttactatgcatgagattgagtatatttatatggtggtaaaatatttgcattttattttcccattaggctgttggtctgttttctatctatttccagaagcctttttttcttcttcttctgtcacccaggctggagtgcagtggtgcaatcttggctcactgcaacctccgcctcctgggctcaggcaatcctcccaccttagcttcctgagtagctgggaccacagaccacagatgcatgccacctcgccatttttttttttttttttgcttttttttgtttttttggtagagatggggttttgccaagttaaccaagttggtctcaaattcctaacctcaaacaatccgcctgccttggcatcccaaagtgctgggattacaggtgtgagccaccgtgtccagtctcagaagtcttttatatactattaaccctttgtccgtgatattaattgctagttctttttttattatttagtcatttgtgtttttactttgtttatgatggtttcttaccatacattttttttttttaaattttactttaagttttgggatacatgtgcagaacatgcaggtctgttacatagttatacatatgccatgatggtttgctgcacctatcaatccgtcatctgggttttaagcccgacatgcatcaggtatttgtcctaatgctctccctccccttgtccctcacccccgacaggctccagtgtgtgatgttcccctccctgtgtccatgtgatctcattgttcaactcccacttaggagtgagaacataccttgcatctttttaattataaataattgtttttaaatatcaggagggatttaattgcaaaatgttcatgcgcaaaatgttccttgaacactctaggagagacgccctttccctgttacagactgtgtgacttcaatctatctgggcctcaagtaccttggatgtaaagaatttagaaaaattgtgtctacatagcagaatccttgtgaagtataaacaagataacaattatagaggactcagaaaattcctgacacatagtaagcactcaaaaaattataactattagtattgtttcatctttcattggaagtgtacagattaaatacataattgttattttgttcactaatcacaccattctctaaatagttgctaaattctttcctatacatgtttcttatttgtcttgtttaagcttctgtaggacagaaattaaacttgatcctttgtttcttttctccatgtatcaagcaaaatatctccaacatacattgtgagaaaaagcagctttcgagtatgagaaaatctactttcaataacacttcagttaaacacattcagtgggtatcttgacttaccaacaaaatagaacaaaaatgttccttatgatccccatctctgaagaacatgccaacaataatttataaagggacctatcatgccaatgtatttttacttgtaaagcaatgaatcattgcattatatctgtttcaagctaaatagagtcaataacatgaaacaggaatttcagtgggatcttttatatctcactgaccagccacaaaattcaaaggaatcacagtgttccttattatacacaagttacctcctatcaccccccaaagatgaatctttcatcacattttcctaccagcattctatgtaatttatttttaacctctttgagagcagaggagatttagtcatcataaaatctattttcaacttattatccaggagtcaaataaataaagaattaacttatgaaatccaatcaaacaatgtcatgtaatgggtctacacatcagaagacacatcagatgaaggaaggagaatgagagctgattcacttggcttaaccaaattggatagctcagaatacaacaggaaaaggaaatgttgccttttctatttatagaaatatttaccagataaggacaactatctaatttactaaaaaacaactgattctctattagtaatgtgcaaaccacaagattattcacattgtcatagtggttctcagcagggtataaaaagcaaaagagagaacaaggagagatcaaactcagaacactcactctcctggaaacccaccgagaacctccaccctctgacaccatggtcaactcctgttgtggctctgtgtgctctgaccagggctgtggcctggagaactgctgccgccccagctgctgccagaccacctgctgcaggaccacctgctgccgccccagctgctgtgtgtccagctgctgcaggccccagtgctgcca

SEQ ID NO: 18034 - DNA, 2300 bp, Homo sapien
ggccccacataagttcacaagagacatcccttcattcccaggaagagaaaatattgtgaaggtaatttgttctttccttgaataattgcttttccctgaatgtccacggcactaaagaagaccctttatttagaaccatgatcatgtgaggattttatttaaaaactctttatgggccgggcacagtggctctctcctataatcccagcactttgggaggccaaggtgggtggatcacctgaggtcaggagtttgaaatcagcctggacaacatggtgaaaccccatctctactaaaaatacaaaattagacgggcgtggtgacacatggctgtaatcccagctacttgggaggctgaggcggaagaattacttgaacctggaaagcagaggttgcagtgagctgagatggtgccactgcactccagcctgggcaataagagtgaaactccatctcaaaaaataaatacataaataaataaaataaaaacttgttatgaatgcaatttctgtgtaaatgtaactggacccaggttcagctgcttgctgctggaaagccaacacataagaggcaagggctggtgaaaggaaagttagttctagttggagagccagtaaaccagaggataaccttgctttgtgtgaggccaagaaagatattggagaaaaatggcatttgaactaactggtaatgaataactagaagaatgctaagtgaaggaaataaaaacatttcaccccaagatatatctcactgacatcctttagctagtgaactagcattctaaagtgccatcttaaattttaaaatttgccatagggttttgaaagggaaacttggcatgggagacatgcaggggtggtgcagggtgctgagtctgcatgtcttgttccaatggctatcttgggtgtccagaggtttgggaggcattattttgacttcagcccaatggtggtggattaattgttcaagattccccctaagtgagaggattcctcagggctctgtgcctggtttgtttcaagattagcctctggaatttcttaagcaagaatataattagataagatattagatagtattgccagaagggagtgtgcagagggaaggaatgaagaggtgagaggggaggaaaggaagagaaagtgggtgatttttaaaattgaggtccacagttacataagtacctgtaagttaaagaatatatcttttatattcctctcaatgcttcttaaaaaatcttagaaataagtgatactaaaaaaaaaccctgctagatgttttagctcaaaatgtatgaaaaagattttaacaaaatgtcaataaagcataaccattacacatttgatatttcaaaaggcagatcaaaaactatgatccacattactctacttcagcctgtaggacacttttgaagacagacgcagctcaagcccagatgatgctttgttccttagaaacagtgagtcactactaactgtttcaaggtgcaccagagtgatgagaattaacacagcttgcaatgacctaggaatttagttagctcaatggccacccagaatacatacaatgaatcataagcttccttatttctcacactcaaaaacaggagcatattttctttttttcctgtcagcattccagctgattgacacatgcatttctccactagagatcttagcccaatcagaagctctcccaaaacgatatcatgatgagaaacagacaagtgacagtggccctcccatgtcacatgatacccagagactgaagtcatgtgacactgaaaccaaggaaaggaaaacaagaggtgactcatgtgggaacaccagggtgagaaaagggaaataatcattttctatatattgggattttttactagaaaaacacaatataatttagtaattgcatttgtgtcatataaacaaaaacaaggaaacaatcttctcataatcacaaaggctcctcagctgggtataaaaggggacatgcagcaaggagactcccaaactcacgaaactcactctcttggaaacccacccagaacctttaccctctgacaccatggtcagctcctgttgtggttccgtctgctctgaccagggctgtggcctggagacctgctgccgccccagctgctgtcagaccacctgctgcaggaccacctgctgccgccccagctgctgtgtgtccagctgctgcagaccccagtgctgccagtctgtgtgctgccagcccacctgctgccgtcccagctgctgtcccagctgctgtcagaccacctgctgcaggaccacctg

SEQ ID NO: 18035 - DNA, 2300 bp, Homo sapien
ccacacagcaaaggaaaccacaaaaagagtcaagagataacctacagaatgggagaaaatatttataaagtatatatctcataaggggttaacatccaaaatacaaaaggagctcaaacagctcacaagcaagaaaacaaaaacctgattaaaaatgggcaaaagacctgactagacatttctcaaaagaagacatacaaatggctaacaggtttgtgaaaaagtactcaacattactaatcattagggaaatacaaatcgaaaccacattgagatatcaccttattcctgttagaatggttatcatcaaaaagacaaaagatgacaagtattggcaaggatgtgaaaaaaactccctcgtacactgttggtgggaatataaattagttcagccattatggaaaacaatataagggttcctcaaaaaattaaaactggaattaccgtattatccagcaatccacttctgggtaccttatatatctacaggaaatgaacttagtatgttgaagaaataactgcatgtccagatttattgcagcactattcacaattgccaagatatgcacacagtgcaagtgtccaccaatgagtaaggggataaagaaaatgcagtatatactcagtgcaatactatttggccgtaaaaagacggaagttctgtcatttgtgacaacatggatacatctcaaggaaattatgctaagtgaagtaaatcagtcatagaaagacagatagcacatgatctcactcacatgatcgcactcaaaaaagttgatatcatagaagtagagcagagaatgaagataatcagaggctaggggtggctagggagtcaggggcttgaggagatactggtcaaaagacatataattgtagctagacaggaagaatcagttcaagaggtctactgtatagcatagtgactatagttaatgatgatatattgtacatactgtattcttgaaaaattctaagaatggatattaagcgttctcaccacaaaaaaatgataggtatgagaggtaatgcatttattagctagatttaatccttccacaatgtatatatacttcaaaatattatgttgtatgtggtaaatacaatattatacgtcaatctgaaaaataactaattgtttttaatttcactgagcttgagttctttctatattaagcacatcatgcaagacacagtagtgggggtagatagattcttaaaagtattatacaggtgttacacagtgttagggagcctgggtgaagtacagacagcctctcctgggactgtttgttacagctgtatgtaaatctacaattatctcaaatttcttttttaaaaagtgaaaacacacacctgcattatgttaacagacagttagaggcatttaaaaaaaacaatgagttatggaataaaaatgggactatgtcttccggaatctaatagattaactggagagacatgacacaaaatataggagagcaaagtatcaatttaagaaactgacccattagtaacaccaagtataaaaatttaaggatatggaatatgacccaaaatttgaaacattcagggaaacccatttcaatagtgtagaggtcaccaaggccacatgcaggtattgctatccctttgcttattgcttaataatgacccacagactaggaatgccacactgagcagatgggttttcctcgctattggtcactagagggaatgcataactggaagtgtgactgaccaaatcccattttggtagagggtacctgaagcgagagtaagaaatgcaattccaaatgcagggaatcacatgaacagccctctgtggaggaagaggaagagaacgtggtctagaagatgctaccgaggtgtgaatcatgagagaaggcagacatgatagatcttattacatccggacaagaaaattttgttttcaacaagtttaaaccattaaatgggcaaacattattgtgtaatctgataatcacttagttattaagtaaacaaaaacaaggaaaatgtagtaccaacaagacagctgggcagtatataagaggctgtggcccaaggacacttccaaacttgagaacctcattcttctagaaatccacccagaacctccaccctctgacaccatggtcagctcctgttgtggctctgtcagctctgagcagagctgtggcctggagaactgctgccgccccagctgctgccagaccacctgctgcaggaccacctgctgccgccccagctgctgcaagccccagtgctgccagtctgtgtgctaccagcccacctgc

SEQ ID NO: 18036 - DNA, 2300 bp, Homo sapien
aaaaacatgaaatcctaaatgttctattgggcattttctttgagcatcatataggtactcaaaaaggtttgggttttggagaatttcagatttcagattttcagataagatgtcctcaacttgtaatattctatctggtgaagggatgctaagaggggacacaaccttagggtgtgtgtatagttaaataaatactcccagtaaatttagatatattcactcctccccaatctcgtttgccatgctgcattaataaccactcatttgatctacaattggttctgatatttcatcttgttaggtttgattccttgtgagagtatttctgtagttttggaaacatggttctgccatttggcatattcactttttcttaccttcatggcccccaaatatttagatgagcatgttttatggaaagaccctcagcagagttggggtgtccatagtatcctcagagagaccagtccaaacagaaattgctaacccaagagcatcccaaagtggagggtggcacaaagacaggaagtttctgccttcttccttgggtttctttaacatccaggtttgggggagtgtgtgtgtgtgtgtgtttgagtgtgtgtgtgtgtgtgtgtgcataatattcctaaggtaaagggccttaggagataaaggtaaatacatatatatataaatatatatatttctaaatatgttattgtatatattatatatatatttatacatactattaaatacaaacatatatgaagaatatatattatatattcataaatatgtaaatatatatattcctatattacctatatataaggttctctatctacccatctatatatgtataatatatatatatattcctaaggtcctttggcagaatatatatattcccccaaacctgtgtgtgtgtgagtgtatatatatatatacatatacatcaaaagaaaattatgggcctagaagaattaaaatcacccaaggtcagacataatgtgtgtgtatgtgtgcgtgtgtgtgtgtatatatatatatatatatatatatacacacacacacgcacacatacacacacatacatacacacacatatatgtgtgtgtatgtgtgtatatttatatatagtgtgcatatttatatatagtgtgtatatttatatatagtgtgtatatacgtgtgtgtgtatactatatatagtatatatatgtatatatataatatatattatatatatatatatatattatatatatatagcaaggacactgggtcctttaccttaggttggcaagtaaaccttagaaatagaggagatgactcaatgtgattgttaaagccagagagacaggaaggaaaagtcagaaggaaaatcagcccctcagagcagagagcggagggacctgaaccttttagtatagctgatctctgtagccaatttcccctaaaggccctgaaactgagttttggagtgttgtttctcaagaaaaagaagcatcgataattcatgacttagatgtccaccttaaaacaattctgctttccccagtagaacatctagaaaatgggtcatgattcattgtatggaaggtggcaaggaatatatcctaatagtatttgttttcatgccactggtcacctgtttcacattcaaaccttcattgctcacttgatctataacaaacatgccatgagattaaagcacagctttctcctcctgagtcaccaaaagaaaattacgggcctagaagaattaaaatcacccaaggtcagacataatgtattaaggaaaatgaggctgcagcacatggtacctgcaggcagatgtcacatggcagctcaaggaggaagctgcagcaagaggcacacaagaggttgttcaagaagagctgacctgaagaatcctaacacaccaggggaaggaaataatgcttttctccatgttgacaaatttaagcagaaaaacaaacttgcctaatttgataattgcctgctcatcagaacaaacaatgacaaggaaagagtgctgcatccgatgacatcagccctgagcagggtataaaagaggatctggggcaaggagacttccaagccttccaaaccctccttcctggaaacccacccagaacctccaccctctgacaccatggtcaactcctgttgtggctctgtgtgctctgaccagggctgtggcctagagaactgctgccgtcccagctactgccagaccacctgctgcaggaccacctgctgccgccccagctgctgtgtgtccagctgctgcagaccccagtgctgccaga

SEQ ID NO: 18037 - DNA, 2300 bp, Homo sapien
ctgtagttaattacactgtattgtatatttaaaatttgctgaaagactagatctaaaatgttctcactacacacactcaaaaaatggtaactatgtgaagtggtggaggtgaactaatttgatcatgacaataatttcacaatatatacatatcagagcatcagggtgtacaccttatatacatacaattttatatttcaattatagctgagtagaggtagaaaaaatgaaattgttaaagtactagaagaaatcgtgagagattcctaaatataatgtaaatttatcttaaggaaaacacacacacacacacacacactcacacacactcacatcatgaagaaaaatagttaatataaagtgatctctactgaatcatcagcaggcaccaatcgtcacggcttctcaagggcacgattcttttccagaatacaaggtctcctggaaatcttagagttgttctcgtacaccaccatggggctcacagggtcttaattccacagcatcatggaacccactttcatccctcaataaaatatgatgtctgggtacatcagagccagagaacagtgcaggctcagaacaccagccagcgcaccaagcaggggttcacttgggagcccaagttgttttcattctgcttgaatcacctggaaattagggccagggcaggagtaggaactggcttggaacatagcagcatcataagaacaccacaatttgatttattagacttataagcacctgagagaagaaagggaatctccctcattcatccaatcccctccatctggttcttggatctccctcagaaacaccagcttacactgaaactcctcccctgattatctgcagaggctgcccagttcataaaacatttctatcatggtaagtcagacatttttccacccccttccctgggttccttgactcctcaggggtggggaaatacatatatatttattaactgatgagttaatgaattgacaacatagcacatttttgaaacaatagtcagccatccctacatgaaaaaatataggctgatatcctttgttcttgatacctgttttctgctttctttctctctttattgatttattttttgaaaacaaagatgtaaagtgtgaaattggatcaacaacttctataaggaagcagcagagtataggacatcttcaaggcccagcaattcagcagagaaagcaagagggctgggagcgaattagagcaagcaaaggatactgagtcatctaatttgggttggccagaaaattttggaacctggagagatgagctcatgtgccctgttagagctaggaaggcagaaaggcaaagtcacaaggaaaatctgccccagggagcaaaaaaatgagggacttggacctttaagtatagctgttctctgaagccaacattccccaagaggccctgaatctgaattttggagggttgtttctgtagaaaaggaaacatcaaactttcacagcttagttttccaccttaaaacagctctgtatttctcatcagaaggtctagaaaatgggtcacaattcagagtgcggaagataaaaaagcgataggtcctacggtgttctcgttctcacaccagtggtcatctgtttcacactgaaatctgtttcacactgaaaccttcacaggccatctgacccataatgaaggagccatcagactgaaatgcagctttatcctcctgagtcaccagaaagagtcaagggcctgtaagaatagtaatcacccaagagtagtcatgatgtgttaagcaaatgagactgaagcacatagtatgtgcttacaggcagatgtcacatggctgctctaggaggaagctatagtaagagagacacaggaggtggttcaggaagagctgagctaaggagtcctaacacattagggaaaggagacagtgtttccatctatgtggataagttaaccagaacaacaaacttgcctaatttgataattgcctacatatcaggacaaataataacaaggaaagagtgttgcatctgatgacatcaggccttagcagggtataaaagaggatctggggcaaggaaacttccaaaccttccaaacccaccttcctggaaatccacccagaacctccaccctctgacaccatggtcaactcctgttgtggctctgtgtgctctgaccagggctgtggcctagagaactgctgccgtcccagctgctgccagaccacctgctgcaggaccacctgctgccgccccagctgctgtgtgtccagctgctgcagaccgcagtgctgccag

SEQ ID NO: 18038 - DNA, 2300 bp, Homo sapien
agttgctaccatccagtctgctgccagaccaccaatctgtggatcctgttgttgaatttcattcctgaccaccagcctgagtcaactaccatgttgaaaacatacttgttttaaggagaagggttatctctaagctgtctcccctgccttcagacagagagggctatttctaaacaaacaagtgaccatagaactgtggctcagttagaccagaatcccaagcctatgatacctgcacttgctttgaccttgatagtgacttccttatgatacattaattatgtctgcaaaaatattaatattcttgttgtcataagaagttgggctacattcaaactaagtgcaaagaaaaaaacctgttataaatagacaggaaggtgataaaactgcaatcatagcagaggctttaaacatactatttcaaaaacggtcatttgaagaagaaaagtaaacaaagatatggagaatttgagtaaaatcattatcaacttagacacaatggatatttttatgccattttatgcctaacgaactgaattttcataatttttatatataccccaaatagtcataaaatatgtccataaaaatatattctaaatatgttcttgtatccttccttccatcccctcttccctccttcctgaataactcagtctaaatagaaagtaggtgtctgcatgggatagggatggcctaaagagataacattcttaatttctttttttaaaaattaatgtcgtcttgcacttatagaaaaattgcaagaataggtcaaagaggtttctttggtgataaaaagaaagtgatgcttcactgcctctgagcactagtgtgtgttgcctacatcaagggctttcccctccgtaaacacaatagaatttaaaatcaggctttattcttgcaaacaatgttgcaaagaatacccttgaacttacatcttggaaggtatgtataggtgcatctgttgaatacatttctagaagtgaaaaggctcaatcaaaacacacgcacatttcaaaatatgctaaattaatttaagatactgttaaatttcagattctgttaattaccatctaaagaagttgcctcaatttagatccctgccaactgtgtattaaaatgtcaatgtctttataatttcaccaatttattaaagtttttaaacttaaatattttacatttgtcattacaaatagcaagtattcactgccatatcccgagagcatgcagtagaacctggcacacagtaggtattcggtagatggtttgatgagtgaataagttgttcaattaaaataccttaaattatgagtgagactaaacatctttcagaagctcaaaaggcacttaaatttctttttttagtgaaatcactgttaatatcctttactcaattttctgtttggttgttgttgttgttgtttttctcattgggttgtaagaggtattcatggattaagaaaattagctcatttatttgtagattggttaaggtattattatttattttcagcttactctttagccttcttgtttttcaatcaggcatttgagtttttttctgttgtaaatttttttcaatctttttcttcattgttgttaagtttttctgtattagaaaatccactccacttctaatattttaagacaatttctgctgttttcttctagttgtttcacagtttatttttctcagaagaatcttcagaaaacaagaaacatcatcccatttgaggactgctgtgagacacacagttttcaggatgacacacagaatgctgagttccaagtgatctgtcacctgacaatcgactggatgagtaagattacaagtctttgaaattaaatgacacactaaattaactgaagacaagaggaggaggaaagactggattggctaaactctaacacagagaaagaataaaagtgcattccaccttttatacagatattttcccacaattagctaacttgataattgcctatctattaagataaacaataacaaggaaatagcttttatgtggtgacaacagctcctcagctgagtataaaagtggacatgggataaggagattcccacattcgaaaaactcactgtcttggaaacctacctagaacctccaccctctgacaccatggttaactcttgttgtggctctgtctgctctgaccagggctgtgatcaaggcctctgccaagagacctgctgccgccccagctgctgccagaccacctgttgctgccccagctgtgttgtatccagctgctgccgcccatcctgctctcagactacc

SEQ ID NO: 18039 - DNA, 2300 bp, Homo sapien
cgagagacataaacctacaaattcaagaaggtgaacaaatcccaaacaggataagctcaaagaaatttgtgccaacacacatagtagttaaacttctgaaaagtaaagataaagaaaaagttgtaaatgcaacaagagaaagaaaaactttatctttaggggaaaacaattaaaactacagtggatttctcattatttttcaagtgctgacagaaaagaactaaaatgagtagaaaatcaacaaagatatggaagaactcaaaaacaccatcaaccaacaggatctaattaacgtttatagaacagtccatccaacaatagtaaaatacacattcatttcaagtgtccatggaatatatttcaagatggaccacatcttgagccataaaacaatctcaacaaatttataagagttgaaatcatagagtatgttctccaactgcaatggactcaaactagaaattaatgacagaaagataactggggaatcttcaaacacttggaaactaaacagcatacttttgaataatctctaggtcatcaaagaatacttaagggaaattttttaaaaatgcattgaaatgaatgaaaatgaaaatacaacatgtcaaaacttgcgagacacaattaaagctgtgatgagagggaaagtcatagcattaaatgcatacatttgaaaagaggaaaagtctcaattaattatctaagctcccacctcaagaacctagaaaaagaagagaaaaataaactaaaagcaagcgcaaggaaggaaataataaatataaaagcagaaatcaatgaaattgaaaacagaataataatgaagaaaacaatgtgaaatagtgaaacaaagagctggttctttgaaaatataaatgacagtgaaagatcgaatgctttcccctgaactggaaatactaaatctcactgcttactctacacagtgctcaaagttttaaccagcacaataaggcaagaaaaaaaaataaaggaaaggaagaaataaaactgtctctgtttgtaggtagcatgattatctacatagaaaatctcaaggaatctatgaatacaaacaaacaaataagcaagcaaactctgagaactaatgaatgagttttgaaagattggaagctacaagataaacatacacaatcagctgtattctatatattggcaatgaatgcatggacacagaaattgaaataaatgtcatttacaatctctctaaaacatacttaggtgtaaatttaaaaaacatgtacagggcttaccacagcaggtttttaaaaaagtagatatcaataagatcttccaaaatgtatacagaaagacaaaagaactagaatagctaaaacaatttcaaagaatgaagtggatggaatcagtctatttaatttcaagatttatgatgtagctacagtaatcaaggctgtgtggtattggaggaggaatggacagctgaatgaacggattaaaacaaagaacctagaaatagacctacacaaatacagttgataggtttgaagtgcacaggtccacttatatgtggattttcttctgcctctgccactaatgagatggcaagactaacccctcctcttcctcctcctcttcagcttactcgacatgaagacaaccaggatgaacatctttatggtgatccacttccacttaatgaacagtaaatatattttctatttcttatgattttcttaatagcattttcttttcttcagcttgctttattataaaaatgcaatatataatacatataacatacaaaatatgtgttaattgactgcttattttattgataagtcttccagtcaacagtagaatatatgtagttaagttttgggggagtcaaatgttatatgcatatttttagctgtgtggaggtttgctgctcctaacccttgcattgtttaaggattggctgtatccctagccaatttttgatagaggtacaccaacaattcaatagaggaatgctatccctttaaacaaattgttctagagcaattagacatctagaggaaaaaaacccctaaaaattaacttgaataaattacaagaggaggagccaagatggccgaataggaacagctctggtctacagctcccagcgtgagcgacgcagaagacaggtgatttctgcatttccatctgaggtactgggttcatctcactagggagtgccagacagtgggcgcaggtcagtgggtgcgcgcacagtgcgcaagccgaagtagggcgaggcattgcctcacttgggaagtgcaaggggtcagggagttccc

SEQ ID NO: 18040 - DNA, 2300 bp, Homo sapien
gttctcctcaatgaatttaactgatacctacatatgctgatgtaatttcctcctcctataatttgagttgcagattaaagacaattcctcactcacgttttctagattaacacaatattgttgtagaaatgactaagtacagatttcagataattgggctagacttcattgtttctgtcaaagtagataagaaagactacaactgggctacaagtatctcctgggagttccccccatggggtgtgtgtgtttgaaagggacccatgggatagtctagtgcccctgttgaaaaaagaactgttgatccccaagcccacactctgcaatagaactgctagagtatttcatggggcatgaaattgcctttagaaaaaccaatacagggggtcacatcaaggtcaaattgggcacagaagggtaggaattttgctatattcggaatttctttacttagagaaggtagaggaaatagagtaagaataggagaatatatttttggaatgcaatgatagtaaatatcctaaacaaaatataagtaaataaaatccaatggcatatacatatgatcgtaaccacatgaattgttttcagaaatgcaagactgggctaatatttgaacattaatcaacttttaaaataacacattttgggaagccgaggcaggtggatctcttgaggtcaggagtttgcgatcagctggccaacatggtgaaactctgtctctattaaaaatacaaaagttagctgggcatggtggtgtgctcccatagtcccagctactcaggaggctgaggcaagagaatctcttgaacccgggaggtggagattgcagtgagccaagattgtaccactgcactccagcctgggtgacgaagcaagactctgtctcaaaaaacatagaataaaacaacacttactgaaaaggtagaataatcataacattatttcagcttataaagaaaaagcattttgtaaatttcagtacattttcagttttctgtctctcagaaaataaggaatagaacaagacctgttgctatgatgaaatgaatctacaaaaaagacagaaagcatcgtaattaattgtgaaatactgagagttctcctttctatccaacgaatataaaaagatatacactacaccattctattagacattgccctggagggtctacccctggacaagggccaaaaaaaaagcaagattaaaaatactcttataaagcgaagaaaactattactattttttatgagtcatgactgcacatgtgcaattttctgtcacaccaaaaaaaaatacaaaaagtattagaattaacaagctaggaccagaactcagcttgatttgcccgaatctagagcacttacgtcacagagagtcccatgctggtaaacccttcagtcccaggcaaatcagggtaaatggcaacaccatcacagagacactcgatgctttctgaatcccagtggactcctttttctacccacctgctttggtctagctctgcattttggaatacattgtgccaaacaccctttccctagtgagtgtaatagaactggaagacacaggtggaatagtttgtagcgagaaagatgcttgttactcttgaatcagacttttgtgggtaaataggcttggtgccgggcacggattcaatgcatcactgtgaacataacagcatcacgcgactgcccacagacatttcccagtctacatacagtcaaccatgaggctggacagagagaactatctgcttcccggatcaccaggaactatcacatgaccagatgatggtcagagcaggaatgatgctggtgatgagactgccttccttttatctgaaacaaagtttttatgagtaattctcaattaagaaacagattaaacccttactttcaaaagattcataagatttcagaaacaacttcccctttgacaatcgcaaagggagtatggaaaacagtgtaaacaacaacaaggaaaagtcctgctgattggtggaaactttggaggccagatgtataaaaggtccagattgcaaggggtcatcagattctgggaaactcacctctgaacagaagcccaccctccacccctgacaccatgacccactgttgctccccttgctgtcagcctacctgctgcaggaccacctgctgcaggaccacctgctggaagcccaccactgtgaccacctgcagcagcacaccctgctgccagcccgcctgctgtgtgtccagctgctgccagccttgctgccgcccaacttgctgtcaaaacacctgctgtaggacca

SEQ ID NO: 18041 - DNA, 2300 bp, Homo sapien
agaaagaaagaaagaagaagaaaggaaggaagaaaggaaggaagaggaaggagagagaagaaggaaatgaaaagaaaggagaggaagtgagatgtaaaatgaaggccaatgaaataagctacacttactgctgctatagtacagtgcacctgagattcacagtctccgtttattaccaccagttctattctcccttcaccgctggccagcactcttcttggtctggataactgcctgataactgccttgataacttccttcctaaattgtctgagcctctagttactataccactgtccactgtgattgctgttcttaccgatttgtagttatcactggacatggacacactatgagattctccagtgttatgggttaatttgtgtcccccaaaactcatattcaaatagaatcatttaaagtgttatgtgataaggcaaggtcatattggaaacaattaggcctctgattaaatatgactgatgtctatataaaagggggaaattcagagacagcatgcatataacagaaaaattatatcaaacacacatggaaatgatagacatcaacaagtcaaggagagagacctggaacatgtacttccctcacaggcttcagatgaaaacaacattgccaaaaccttaatttctgaactgtgaaaagataaatttaagccacttggtttacagtaatttattatggcagtgctggtaagttaatacacttactaagtatcctgagctatagatatattctgctacactatatggcttaaagataattacccctcaccaaatagtaactcctttctctgtctgctgctctgctgacgggaagagtccaaaatgactaggcgataacgattccttttgattataacaaagaaacagagaagcaaatactataatttttattcacatggaaattttaaaaagccaaagtcatctactggattataacttgatagagtgattagctgtttggaaatgagtaagcggatataattgggagagaatggcattaatttctatttcctaacctggtaatggggacatagatgtatttacaatgtaatactatatcaggttggaaattaataatttgcattcttctcaagtgaatgatatacctagacaatgttttcaacatgttagaactccacgatgaatcaggtgtcatctcaactcatctaatcccttcattgaaaagaaatagaagaaattacttctacttacttcttcttctagttactgctagtaactaggtttagggctagagccacagcacatgctggttggcctgaatttcaacgcttacttctagttactgctagtaactaggtttagggctagagccagagcacatgctggttggcctgaatctcaagaagttacgtgatagaaagtcctccattctcatcccggaaatccccacactcccagacaagtcagaatgaatggtcgtcctagggcatacattgcttgatgctgtctaaatctcagcagatttctctgcatccacctgttctcgatctgctctgtcgcatggaacacactgtgcagtcaccgtcttcccaagtgacattcaaagaactgaaagacacagatgatgtgggtggcacaaagagatgcctgttagtcttgagtcagaatttggtgggtgaatagtcttgggcccaggcatggattcattttgtcactgtaaatatatcagcatcatgcttctccccacagacacttccaagtctatatacagccaaacatgaggctggccagagagaacttcctgagccccccggatcaacaggaactgtcacatgaccagatgatggtcagagcaggaatgatgctgatgatgagacgggcttccttttatctgaaacaaactttctatgagtaactcacaattaagaaacagattaaacccttagtttaaaaggttcataagatttcagtaacaacttcccctttgacaatcccaaatggactgtggaaaacaatgtaaacagcaacaaggaaaagtcctgctgattggtggaaactttggaggccaggtgtataaaaggtccagattgcaaggggtcatcagattttgggaaactcacctcttaacagaagcccaccctccatccctgacaccatgacccactgttgctccccttgctgtcagcctacctgctgcaggaccacctgctggcagcccaccactgtgaccacctgcagcagcacaccctgctgtcagccctcctgctgtgtttccagctgctgccagccttgctgccacccaacttgctgtcaaaa

SEQ ID NO: 18042 - DNA, 2300 bp, Homo sapien
aaagaaagaaagaaagaaaaaagaaagaaagaagaaagaaagaaagaatagagagagagagaagggaagggaagggagggaggcaggaagggagaaaaaggaaggaaggaaggaaaagaaagaaagaaagaagaaggaaaggaaaagaaaggagaggaagtgagatataaaatgaaggccaattaaataatctacacttacttctgctataatacagtgcacctaagtttcataaactccgttaattaccaagagttctattctcccttcacccctggccagcactctttttggtctagataactgctgatagagtagctcagagcatccttcctgaagggtctgagcccctggttactataccattgtccaccgtgattgctgtttttattcatttgtggttatcactgggcatggacacactatgagattctgcagtgttatgggttcatttgcgtccctcaaaatccatatacaaatagaaccatctaaaatgttatctgataagacaaggtcatattggaaacaattaggcctctgattaaatatgactgtgtctattcacaagggagaaattcagagacagtatggatataatagaaaaattatgtcaaacacacttggagatgatagacttcgacacgtcagggagggagacctggaacagatacttccctcgcagtcttcagatgaaaacaacattgccaacaccttaatttcagaaaagaggccttcagaactttgataaataaatttaagccactttttttcagtaattcatcagggcagtgctagtaaattaatatactcagtaaatctcctgagctatagatatattctgctacactatatggcttgagggtaattatccctcaccaaatagtaactactttctctgtctgctgctttgcttatatgaagagtccaaaatgactaggcgataaagattacttttgtttatgccaaagaaatagagaagcaaatactatactttttattcacatgaaaattttaaaaagccaaaagttacctacaggattacaactgatagagtgattagctgtctttgggaaagagtaagagcatataattgggagagaatggaattaatttctatttcctaacatagatgtaatgggacataaatgtatttacaatataatactatatcaagttgaaaattaatagtttgcattttctcaaatgaatggtatacctagaaaatgttttaaacatgttagaactccatgatgaatcaggcatcatctcaactcatctaattccttcattaaaaagaaatagagagagaagacatgatgcttactgtgctggtaactgggttgcagctagagccagagcacatgctggttggcctgaatctcaagcagttatgtcatagagagtcctacattctcgtcctggaatcgccacactcacagacaagtcagaatgaatggtcactcagggcatagtttgcttgatgttgtctaaatcccagtgaatttctctgcatccccctgctctcgatctgctctgccacatggaacacactgtgacagacaccctcttcccaagtgacgttcaaataacggaaaggcacaggtggtgagggtggtacagagagatgcctgttagtcttgagtcagaatttggtgggtgactagccttgggcccaggcatggattcattttgtcactgtaaatatatcagcatcatgcttctccccacagacacttcccagtctatatacagccaaacatgaggctggccagagagcttcctgagcctcccagatcaacaggaactatcacatgactagatgatggtcagaataggaatgatgctgatgatgagacgggcttccttttatctcaaacaaagtgtctatgagtaattcacaattaagaaacagattaaaccttaatctgtttaaccttaaggaaacaactaccctttgagaatcacaaacggactgtggaaaacaagataaacagcaacaaggaaaagtcctgctgattggtggaaactttggaggccaggtgtataaaaggtccagaatgcaaggggtcatcagattctgggaaactcacctctgaacagaactccaccctctacccctgacaccatgacccactgttgttccccttgctgtcagcctacgtgctgcaggaccacctgctggaagcccaccactgtgaccacctgcagcagcacaccctgctgccagccctcctgctgtgtgtccagctgctgccagccttgctgccgcccaacttgctgtcaaaacacctgctgccagc

SEQ ID NO: 18043 - DNA, 2300 bp, Homo sapien
gaaagaaagagaaagaaagaaagagagagaaagggagagagaagggaagggaagggagggaggaagggaggaaaaaaggaaggaaggaaggaaaagaaagaaagaaaagaaagaaagaaagaaagaagaaagaggaaggaaaggaaaagaaaggagaggaagtgagatataaaacgaaggccaattaaataatctacacttacttctgctataatacagtgcacctaagtttcataaactccgttaattaccaagagttctattctcccttcacccctggccagcactcttgttggtctagataactgctgatagagtagctcagagcatccttcctgaagggtctgagcccctggttactataccattgtccaccgtgattgttgtttttactcatttgtggttatcactaggcatggacacactgtgagattctgcagtgttatgggttcatttgcgtccctcaaaattcatattcaaatagaatcatctaaagtgttatctgataagacaaggtcatattggaaacaattaggcctctgattaaatatgactgtgtctattcacaagggagaaattcagagacagtatggatataatagaaaaattatgtcaaacacacttggagatgatagactttgacacgtcagggagagagacgtggaacagatacttccctcgcagtcttcagatgaaaacaacattgccaacaccttaatttcagaaaagaggccttcagaactttgataaataaatttaagccactttttttcagtaattcatcagggcagtgctagtaaattaatatactcagtaaatctcctgagctatagatatattctgctacactatatggcttgagggtaattatccctcaccaaatagtaactactttctctgtctgctgctttgcttatatgaagagtccaaaatgactaggcgataaagattacttttgtttatgccaaagaaatagagaagcaaatactatactttttattcacatgaaaactttaaaaaaccaaaaattacctacaggattacaactgatagagtgattagctgtctttgggaatgagtaagagcatataattgggagagaatggaattaatttctatttcctaacatagatgtaatggggacacagatgtatttacaatataatactatatcaagttgaaaattaataatttgcattcttctcaaatgaatggtatacctagaaaatgttttaaacatgttagaactccatgatgaatcaggcatcatctcaactcatctaattccttcattaaaaagaaatagagagagagagagaagacatgctgcttactgtgctagtaaccgggttgcgactagagccacagcacatgctggttggcctgaatctcaagcatttatgccatagagagtcctacattctcattctggaatcgccacgctcacagacaagtcagaatgaatggtcactcagggcatagattacttgatgctgtctaaatcccagtggatttatctgcatccacctgctctcgatctgctctgccacatggaacacactgtgacaaacaccctcttcccaagtgatgttcaaagaactgaaagacaggtggtgtgggttgcacagagagatgcctgctagtcttgagtcagaatttggtgggtgactagtcttgggcccaggcatggattcattttgtcactgtaaatatatcagcatcatgcttctccccacagacacttcccagtctacatacagccaaacatgaggctggccagagagaacttcctgagcctcccagatcaacaggaactatcacatgaccagatgatggtcagaacaggaatgatgctgatgatgagattgccttccttttatctgaaacaaagtgtctatgagtaattcacaattaagaaacagattaaaccttaatctgtttaaccttaaggaaacaactaccctttgagaatcacaaacggactgggaaaacaatgtaaacggaaacaaggaaaagtcctgctgattggtggaaactttggaggccaggtgtataaaaggtccagattgcaaggggtcatcagattctgggaaactcacctctgaacagaagcccaccctctacccctgacaccatgacccactgttgctccccttgctgtcagcctacatgctgcaggaccacctgctgcaggaccacctgctggaagcccaccactgtgaccacctgcagcagcacaccctgctgccagccctcctgctgtgtttccagctgctgccagccttgctgccgcccaactt

SEQ ID NO: 18044 - DNA, 2300 bp, Homo sapien
aaaagaaagaaagaaagagaaagagagagagggagggagggaggaaggaaggaaggaaagaaggaaggaaggaaggagaaattaagaagcaaagaaaggagggggagagatatgtaaaatgaaggccaatggaacaagcaacagttactgctgctataatagggtgcacctgacagccataatctccattaattatcaaaagtctatagttccttcaccactttccagaacttttactactctagataatttccggaaggagtaacccagatgttcctgcccaaagggtctgagccactagttactgtaccactgtccactgtgattgctgttttcactcacttgtggttatctctgggcatggacacagtatgagattctccagtgttatgggttgaatgagtcccccaaaattcatattgaaatgaggtcattgaaaacataattagttaagatcaggtcatattggaacaagttaggcccctgattcaataggactgatgcctgtatagaatggggaagttcagacgccatgtgcatctagaaggaagatcatgtaagagacatatggagaagacaggcatttacaagtcaaggagagacacctggaagagatgctttcctaacagtcctcaggtaaaaacaaccttgtcaacaccttaaattcagactactagccttcagaactgtgagaaaataaatttcagccacttggtttgtagtggtttatcatggcagtgctagtaaattaacatattcagtaaatctcctgagctacagatacattctcctacattctacgccttcaggataattacccctcaccaactctgttctctgccttctaatctgctgacatgaagagtgcaaaatgactaggcggtaattattacttgcgattatgcgaaagaaatagagaaataaattttgtaatttttattcacacagaagtaaaaaaggaaaagccaaattgacctacagggttacaacttgatagagtgattagcggttttgggggatgagtaaggaaatataactgaaagggaatgggattaatttctatttcctaacctggtaatgggaacacagatgtatttacagttatatcaagttggaaattaataatttgcattcttccaaaatgaatggtatacctaaaaaatgtttaaatatgttggaactccaagacaaatcaggtatcatctcaactcatctaattccttcattaaaaagaaatagacagagagagaagaaatggccctgattgtgttagtaccagagttagggctagagctacagctcatgcaggtttgcctgaatctaaagtagttatgttacagaaagtcccacattctcatcctggtaagtccctcactcccagacaaatcaagatgaatggtcaccccagggcaaagattgcctgatgttatctaaatcacactggacttctctttgtacccacctgctttggttctctctgacacataaaacacattgtaccaatcaccctcttcccaagtgactttgatggagctgaaagacacaggtggtgtgggttgtacagagagcaatgcctgttagtcttgaatcagactttggtggctgaacaatctaggccacagatatgaattcatttagtcattgtgaacacatcagcatcacgcttcccgcaacagacacttcccaatctacatacaaccaaagaaggaggctgggtagagagaacttcctgagcctaaccggtcaccaggaactatcacataatcagaagatggtcacatcaggaacgatgcagatgttgagaggggcttccttttatcgaaaataaactttctatgagtaaactacaattaagcaacagaaaataacagaaaactaagaaattaagcaacagaaaattaaataattttcttctgaaaattactttcaaaagattcataacctttaggaaacaacgtcccctttgacaataccacaatgactgtggaaaacaatgtaaacagcaacaaggaaaagtcctgctgtttggtggaaactttggaggccaggtgtataaaaggtccagattgcaaggggtcatcagattctgggaaactcacctctgaacagaaacccaccctccacccctgacaccatgacccactgctgttccccttgctgtcagcctacatgctgcaggaccacctgctgcaggacaacctgctggaagcccaccactgtgaccacctgcagcagcacatcctgctgccagccctcctgctgtgtgtccagctgctgccagccttgctgccacccaactt

SEQ ID NO: 18045 - DNA, 2300 bp, Homo sapien
gggtgcagtggctcacgcctgtaatcccagcacttcgggaggccgaggcgggcagatcacttgaggtcaggagatccagaccagcctgtgcgacatggcgaaaccctgtctctactaaaaatacagcaattagctgggcttgttggtgcgtgcctgtaatcccaggtacttgggaggctaagtcaggagcatcgtttgagcccaggaggcggaagttgccatgagccaagatcaagctactgcgctccagcctgggcagcagagtgagactccatctcaaaaaaacaaacaaacaaacaaaaaaggacacgtctgccatagacattgctgtattatactcactcagaggtgcccatctgtggatgtggtatggtggaagaaacagtggaccaggagggagaacatctgggccatgggtccaatctaccacggatgtgtcatctctgggccttggtatcatcttctgtaaaacacaagtgcttggcagtgatggtcatgataggattagattatatcagtgtttcctaatgtaacccaagttacctgagaaagtttaaaatatatagcttctcaagctctcataagcacacattctgatttatcataaggactggaatacagtttgggaatctgtatttttcaaaaggcccccttttaggcaattctgatataaaaccctggaccagatgatgtttcaggggttcctcccagctctaaaattccatatcctgtgaagtattgagtatcatatcagatccaagtaactcattcatcatttaccctcccgactcccaccctgtccttagttcttctagcccttcttagaggctgtcttacttctagcccatcttacaaagaaagggaaatgaaaagggaaggactagatcccttgatccagatccttactcccatccctccttccattcccaccccacccctatcttctgtcctctacccctactagatgttgtattccagctccagggctgccatgggcactccaagaggagaacaaggtaccaaagtccaagaaagagacagaaattttgacccatctcaaaatttacacatggacctgaaccatctgtagattttagactccttgcaaaggcattttattccttgggatgacactctgggtattttgtattctaatttctccttctgccagatggtctataaggttcgaactcttaaaaaaagtgcgttacattcccattttaatgtagcattttggatatttactgatctccttcctgctttcttctttcttttcttctttcctttcttcctccccttctcctcttcttcctcctcctgcatctcttccttccccggtcaaggaaaggcctggggctggagtgggggtgggtagagggttctgatctcagttcttcccacctatttagagagaagtgcgaatattcagctcaccttgccgccgagacagaccatgccttaccagcttcttgcagctttacgatgagtctctctcggtttcacagggcagttattactcatgactgatgctcaccggccaagcctaaacgtgtggcacactccccataccacacacagacacaaacatttgcctggctcacatgaaccgggatgaggatgccatttccacctgggaggagccacgtgaccaggcgttctcagtagcctccactggtgtcagggggaacagagcattcggctgttgccggtctgcctttccaggactagcatccatggaagatggggtccatcgccaacctgcgaagatgtggaaggcaagcccctcattccagagccagaagctgtggccggcttccccttcccatctccaacctgggctaatgacagctggcagatgcttggccatgatgacaggtcttttcgaagatgtatttttaccctctggataaacagcagttggcaggagtggggcgtttttatgagttgaggtactcaggactggaaaataaacagccagttaatgagccggtcttatggaaacttgcataaataataacaaagaaaacatcccgtccctcatgcctgggtgaggggatataaaagctgccatccagatggctggccaccgtcagtcgtggggaactccggctgcgttaccgacctgcgagctgacgggcccggaccatggggtgctgcccgggggactgcttcacctgctgcacccaggagcaaaactgctgtgaagagtgctgctgtcagccgggctgctgtggctgctgcggctcctgctgtggctgtgggggctctggctgcgggggctctggctgcgggggcagctg

SEQ ID NO: 18046 - DNA, 2300 bp, Homo sapien
cttggtttaccgaagttcactgtgggcattactttaagaatgtgcacaggcgctgcgtacagcaggcatacctgtgtgaccctggaaaggtcctggtaaatttctggtcaaggcagccaataccctctccatggtcctgatcatgtgcggcccctttgctgcacttggcacttctaacatcacctcctcttggaagcaccctccttcctgcccttctgggatgccatgaacttgtttttatcatttttttctcaccatttctccatttatcacagattctttttccttctcctgatctctgattgggaaattctccaaagtttggtcctcagctccttgttgctcttctctttgtactctcccttggcccagttctctaactctctcacttgtactaaaccttatctgtatcatcatccctgccataaattctagtcttgcatggactgttgcaatagtctctttgctgaactctttgcctccaatctttccttcatttttcaaaaacagataaatatttgctaaaacatttcctaaaacaccttttgtcacaccacacttaggttcaaaagcttatactggctctacagcttctggggaagtccaagctgctccacttcaccatcgagaccccctaccatagggtccccatacaatcccccataaagctttaatttctagcacttcccttcacaactctccccttcctgctgcctagacttaccctggtccttcaaccatgccttgggctttcccaccccattcctgtgtgcacattattctcctcacctgcacttcctacttttctcccctctgcttcttagaagcctccctatcccagcacaaatccattcatccattcctaagagcctccaatcctggagctgctcgccctccccagtgtgtaaaccactcagttatcacttgtcaacttctgcctcagattattatttcctgttcatcccttcatcactctacccacacccattcaacagtgcctaccaggtgcctagagctggggattcaaagacaaactagaccctgcccttgccttcagggacctcaaatagagacagagagacaagcacataagtcatgacagtgtcatgctcaaggtaaaaagagagcttggagaggagaaagggacggcctgtctgaagaagggaaggaagtaagccatttatatttaagccaagtgttgtgatgaaaagaaaagtgatctgctttggaatcctaggtccacaacttattatcctcaccctctatgccttggtgttctcatctataaaatgggaattatacagtttacctttaagagttctggtgaggaataatggacatctaagttctgcatgtttgaggatcatgtttgtaaaaaggatctagtttgtgaaaagtgtccacactaccttgggcttgtgcagtttcttaacaagtaagaacttcttctgaccatagcattgagtcctattttccacccctcccagtgtctattacatcgccctggatgaaattgtcatagtggatatctattatttggttgattgacgtcatcatggacatgaaaaaagcccatcatatcaggaaacatggccatcaggaactgtcccagaaaggatctattcctctttctgagaaccatgaatttggaatttggcacttggaaatgtgacctagcaaaagacacagggcaagagctatgcttttccatttcaccaaggagagccagagcttgccaaagagttaggggcctcaagccacaaagcagaacagcaatactgtctcttgacctgctgcaccccactgaagaaggccagggctttcatgagtccaggtctttgaagtcacaccatgaagctcttacatcatgacacacagcatggaagaggagtcccgacttagcgagaagcccaagtaaagtattttatgaggggagagactcttctgaagaaacacaacaaatggagggaagggcttttgacaatcaccaaatgagcaaaaaaaaaaaaaaaaaaaaggggttgtcttacgtgtccacaccctccatggacgaggtataaatgctccctggaggaaggagacccaccgctctacaacctggagattttggactctgtcttcagctggacactccctccctgcaccatgtcttacagttgtggcctgcccagcctgagctgccgcaccagctgctcctcccggccctgtgtgccccccagctgccacggctgcaccctgcccggggcctgcaacatccccgccaatgtgagcaactgcaactggttctgtgagggctcctt

SEQ ID NO: 18047 - DNA, 2300 bp, Homo sapien
gatcacctgaggtcaggagattgagaccagcctgcccaacatagtgaaaccctgtctctactaaaaatacaaaaattagccaggcacattacaggtggtgcacgcctctaatcccagctactagggagggtgagacaggagaatagcttgaacctgggaggcggaggttgcagtgagctgagattgcaccactgcactgtagcctgggcaatagagcaatagagtgagactctgtctccaaaaaaaaaaaaaaaaaaaaaaaattagagattcaggcaggaggggcagaaagttgtggattgtgattgtaggggaggatatcagtaccttcaatgcattcaccctggaagaccacatgtttgccccaaagctgctgtcctttataaaagcatatttgaagcttctccttggaaatgacttccagagtcacccaagaaaacacacattattattttgtagtcacaacctgtttctgacccattaaagatgctatgcagcttggttattcaccctatgcactaggtgtggtttcaaatgacttctggctggttccaaaaataaacacacccatagaagatgaagattggccttcaatgaggataaccaaaagaatgtgtcccaagctgtgaaggcaagtttgaaggaagggtgatctgaggaatggcaggtcacctgtaggaaaagaattcttgtatggcaagacttaatatgtagcttccaaaaggaacaacttggaggagtatctttcagaatttgagcactgatagattaaacataaaatcctcatatttcatagttccatctggaatgcatgagagtagagcatctgcttgccaaaatgtgccaatggtcataaaatgccacttcatgcacatgacatagtggtggattttcagggtcatatcctttggagagctaggcttgggtatttctccctcagatcaaccaagggtttcctttttttttttttttcaagcttctagtgggtatgaggcattttcacttagtaaacttccttccttcagcatagaagtgacttttggttctttaataagtaaaaaacaggcttgttattttttggcccattctaatttaggatattgtcagcactgattgagctcaatggagctcaatctgtattttttgcattattgcatctcagtactgaaaagattggaagagagagacatgtaatatgacagagtgtggacattggaattagagagatctgtatttgaaccctggctccatcatgtaggagctctgtgaccttgggagacctctcagaggcttagggtccttatctacaaacccttgcagcattttgagaggactgaaggagctggtgcatatgaggtgcctggcactgtgcctggtgcacagtggaggctcagcaagcaggacccatcaccaatgacagagtcacgctgtgcacaggcatggagcacagtgcttcatgcagagtaggtgctcccaaaatttaggtttcttaatgttctgtgaacactgaatactagtagaaacggaggtgggtggcttcctgcagccccataggaagagggtagagttgcctccatctgcctggatggaactgcaaatgggccttgaaccaatggccttgtaagtcctttctcatttcagcttccaggattccctatcacatagtctagtttctagacgggtttccttacatggcttttctcacagagtcttaattgaatatgaactggatgagacacaagcctttcctcatttaggagaaagaggcacatatgtgccccctactctggggacagggcccagctgtcactctagctcaatgtcccatggataagcactgctacaggcaaggttggtcactttgaagccaaaccatgaagctcttacttaaccaatcagcatgttttgtgaggagtcctgacttagcaagaagccagagtaaaacatttaatgaggtataggactcaggtgaagtggctaaataacaaatggaaaaatcagcaaaggaggtaaaaaggaggaatacttgacatggttgccacacccactgctaacagaatataaagccctggaaaggaccaaggcttatcccagggaaaaggaatcaggttttgaaactgacttccagagctccactgcctccctgcaccatgccctacaacttctgcctgcccagcctgagctgccgcaccagctgctcctcccggccctgtgtgccccccagctgccacggctacaccctgcccggggcctgcaacatccctgccaatgtgagcaactgcaactggttctgcgagggc

SEQ ID NO: 18048 - DNA, 2300 bp, Homo sapien
ccaaatatggccgtacctaactaccttgcagtttcatctcctataaccacacttaccctctgttctaggctagggattgggttgtcaatttctaaacacacctcataactcctccaggcaaagttcatgctcaggaaaactttccctcttcttttttttttttgagacagagtctcactctatcatccaggctggagtgcagtggcacgatcttggctcactgcaacctccgcctcctgggttcaagctattcccctgcctcagcctcctgagtagctgggactacaggtgtgtgccaccatgcctggctaatttttttttttttttttttttgtattttcaatacagatggggtttcaccgtgttagccaggatggtctcaatctcctgacctcgtgatccacctgcctcagcctcccaaagtgctgggattacaggcgtgagccactgcacctggccaaaactttccctcttctatggcctaaacacactcacctgaccagacatttcccagcaaactttatttcagaattatgctaatatcatacagtaatcattgattgaagttgaaactatgggaagtatataaagttttaataaccttctcatgaattttcattagtgttactcttccttatttattccacttacagtattccatggtttacatcgtctttaattaggtgatgatattgcctctgctgaagggcctgcagtcaacaagacaggcagacaaaatttatatcaacagaacatttgggttttcaaggctttgattgagtgctccctccttcttggagcctcttcttttcattctctcacacatctgaaattcgtaattctttatctgcacctttcttgagccacactgatatttgtctatgatgactgtagctttgtctcatccactctaaactgtaaaacatgctgtgggccgagactgggattcacttatttgtgtttctcagtaccgcccacagtacccagcacacactatagatgattgattgcagttgtgtcaatcagataggattaaataaaatggataattgagactggcctataaaattgaaagctttaaaaattcagggatgaggcaagtggggtggggtgtggggtaagattaatgttttgggggagatgtttaatgaacattggcctttcttggaattatagaaaatgaaatgataaagaggctatggaagaacattatggataagaccaaagatctaggggaaagaataaacttgaagaggggaaaggtaaggactgcatttaaagggtctatctggaggacaacatgtcaggcataacaagtgggcggcaagatgaaccagtttgggaaaaatacgttttagtccaattaaacatgatgtaatgacctgataccaagtgaagctgtcatatgcgcaacagaaaacctggaaactgagctgagatgagagggagatgtggcagtcatcagcatagaggagctagatctacacgaacagggacgtagaaagagaaagacagagggctaagaatataggtgtttccttcatttgggacaaaaaggggaagacagctaacaagacaacagagaacaggtaattagagatattacaagaagacccagagtgtgcagggttatggaaatcaatgaaggtgtattttaagggaggagtaggtatctatatcagcaaggcagcagcagcagagaggttgagaggagagaatcactgctctttgaacagtttctgtagaagcagtttctgtagtttcttcaggcagtttaggagaaagggaagcagaacattctattctgatgagggtgagagctggagatagcagtgaagtctggggaggctttgcaaaattgccaagggccctgtagtcaaggcaaggtaagcatgggtattgaaggccaggtttcctgcatggcctaccctgggtgggagtctcccagaaggacgtccttccctgtctacatcagtgtttctggtgaagcataaaggcttggctcagtcatttacttcattttattctcctaatgaaggggtatttttatgaaacagccatgatgagtaatttacaatgcatgaatatgaatgagaaacatttattatgccagagaaatgaagtttattgggaagtaaatgaagtctcctccttgcattccagagaatgccaaagaaaaaaggaaaacaggaaatgcagtagtacgttcaggaaacaccttaagtagtaactggagctcagattacagggagctgaacatctttagaaacaaacaggctcgaccctcaacaggaaggagt

SEQ ID NO: 18049 - DNA, 2300 bp, Homo sapien
ggtgaaaccccatttctgctaaaaacacaaaaattagccgggtgtggtggcgggcacctgtaatcccagctactcggggggctgaggcagataattgcttgaacccgggaggtggaggttgcagtgagccgagatcgtgccactgcactccagcctgggcgacagagtgagactctgtctcaaaaaaaaaaaaacagaaaacaaacaaacaaaaactttatttacaaaaattcagcagggtaaacttgacgtgtgggctgccatttgcagatgccctcttttaggtatactcccatccattccattggtttccattttactttctcatttctcaaccatgaacatgccattgttttcagttgctccatgtgttggcaagttccctaaaccccaacgaatagtaaggctcaggatcatttcggcgaatacaggttgagtttctgctataaaaacaaattgaatgctgaaacatggatgaatgtgggaggaaagagctacttggaagagtaactctcaaagctctctctcagagctctctctctggggagaaagaacagtggcggaaactcctgggtgaggaatccctgattcccaaacaactccaccccatgtccctggctgtcctcccctctgagtaatgcagacagccttttggggctgtgatgattctatctcctatgaagccatctgatgaaactctgatttcaccaaccactagcacccaggaagagcctggtgtgacataagctgaatggaataattttatgggttgaggggggactctttagaagcatctaactagcatattttggagaaaaattagctgaagcattaggaaaggaaactatgctgtatgccaagcccccacccacaattaatggtataaaaggactgcagaggaaggagagactcaaacctgcccacatccacctccagcagcttacctgcttttccattacctgttccagcaccatgtcttacagttgttgcctgcccagcctgggctgccgcaccagctgctcctcccggccctgcgtgccccccagctgccacggctacaccctgcctggggcctgcaacatccccgccaatgtgagcaactgcaactggttctgtgagggctccttcaatggcagcgagaaggagactatgcagttcctgaacgaccgcctggccagctacctggagaaggtgcgtcagctggagcgggacaacgcggagctggagaaactcatccaggagcggtcccagcagcaggagcccttgctgtgccccagctaccagtcctacttcaagaccattgaggagctccagcagaaggtgagggggttggccatatggggggccagcagcagctggctctctttgaacagtaagacattttcaagttcaagtgtacctcatgagagaaatttcttttcagattctgtgtgccaaggctgagaatgccaggctggtggtgaacattgacaatgccaagctggcctctgacgacttcagaagcaagtatgttgaacttcaaggtccctatggttctttcatggccctagggacctactattgcctggaagagaggagaaagccatttctctctatttctcctcctagggctggttatgtaaaattagtttcaaatagggaactagactcatgtgctgcctgctctttggtctatactggttttttttggaagtgtttcttaaaccacaaaattcagagattgaaatgaattgttctttgggaattgatttggtggtatattagctaacaaaaccgagaacacagtgagagacttcatctcatgtgtgcctgtgggctcctcgtggtgttaggtgagtcagggaacctcttcagcctatccatggacagcttgactgaagcatatggaagagaagaggcagaaaactgtaagttcaagaagattcaggccaattctacccaaacaacacatgagaggggaaggtggttttctttcctgacttatcctcccactccgacacgtgcaggtaccagacggagcagtccctgaggctgttggtggagtcggacatcaacagcatacgcaggatcctggatgagctgaccctctgcaagtctgacctggagtcccaggtggagtccctgagggaggagctgatctgcttgaagaagaaccatgaggaggtatgaaacaaattcacaaaagcaggcctcagaactaagctactagcactgggaatcaggagaggattactgtctggatccctggtctgggacccttctctgaggaactcaagatgttctcagagagtgacggtgct

SEQ ID NO: 18050 - DNA, 2300 bp, Homo sapien
aaatgaaaatgagaacacaacgtatcaaaatttatgggatgcagcaaaagcagtactaagaggaaagttttatatatgtatatacataaacctatatctaaacatacacacacgcctaccatgtacctacaaaaattaaaaaattaaaaaagataaagaacaaactaagctcaaagttagcagcaggaaggatataataacactttttgctctaaattttattatgatacttacgataaaacttagagcagaaataaataaaaatagagactagaaaaacaatagcaaaaaatcaatgaaacagagtttttttgaaagacacagaaaatttacaaacctctagatagactaagaaaaaaagaggaaacactcaaataaataaaatcgaagatgtgcttttctgctcctctcatgctgcttttgaaattcagatgcagccttctttaaatgatttgtattgtgttccacaaataatcttttgggacttctttctgaaacatgactttgtttccctgcggaacaaaggcaaggtagagtgacagggaaaagaagtgaggtagggaaggctattctgtgaagagtgattattgggcaatagagaggctccctaggttatgcaagagtcaaagggtaactggatcccagaggtgatagaagcacacttatcagagacagtgtctacttgtagggacaacagagtaaatctgcattctcatgggcactgtggcttgtcctggaagcatctcaggctggcatagtcatacctctaggagagttaatactctagaaagaggaacaagtctagaaataagatgatagaaatttccagagaatttgagaaaaagccaccatggatacaaagatacctctgagcacccttgctccaattttcgtttcttggtgagtctgcagtattatgcttcatattcatgcttcagtgctgccatctgaactctcactgctccagactgtttccagcatattttttcttctagatatttctactcttgctcatctttagagaggctgttgctttagtacaagttggcaaattttttaattttagggctttgtggacactatagtctctgtcacaactacacaactctgccactgtagcacaaaagcagccatatacaatagctaaacaaatgggcatggctgtgttccattaaaactttatttactgccggacgcattggctcacgcctgtaatcccagcactttgggaggccgaggcgggcggatcacgagttcaggagttcaagagcagcctggccaacatggtgaaaccccatttctgctaaaaacacaaaaattagccgggtgtggtggcgggcacctgtaatcccagctactcggggggctgaggcagataattgcttgaacccgggaggtggaggttgcagtgagccgagatcgtgccactgcactccagcctgggcgacagagtgagactctgtctcaaaaaaaaaaaaacagaaaacaaacaaacaaaaactttatttacaaaaattcagcagggtaaacttgacgtgtgggctgccatttgcagatgccctcttttaggtatactcccatccattccattggtttccattttactttctcatttctcaaccatgaacatgccattgttttcagttgctccatgtgttggcaagttccctaaaccccaacgaatagtaaggctcaggatcatttcggcgaatacaggttgagtttctgctataaaaacaaattgaatgctgaaacatggatgaatgtgggaggaaagagctacttggaagagtaactctcaaagctctctctcagagctctctctctggggagaaagaacagtggcggaaactcctgggtgaggaatccctgattcccaaacaactccaccccatgtccctggctgtcctcccctctgagtaatgcagacagccttttggggctgtgatgattctatctcctatgaagccatctgatgaaactctgatttcaccaaccactagcacccaggaagagcctggtgtgacataagctgaatggaataattttatgggttgaggggggactctttagaagcatctaactagcatattttggagaaaaattagctgaagcattaggaaaggaaactatgctgtatgccaagcccccacccacaattaatggtataaaaggactgcagaggaaggagagactcaaacctgcccacatccacctccagcagcttacctgcttttccattacctgttccagcaccatgtcttacagttgttgcctgcccagcctgggctgccgcacca

SEQ ID NO: 18051 - DNA, 2300 bp, Homo sapien
cagagtgcaacatgaataccatcatgaaagctcaatgggagaagcactccaataaattgtcaataaaacggcagctctggctggcagccaaagccacagtggagatgggggtgctgcaacttttatatattcagaactttggctacctcttcctcagatcttctagtgccttccttcacctcccaaagcaaccccaaatgactccagcttgccttgcaaaacccccttgctcatgccgtgctcagcattttctttcctggtgcccaggtccttggatttaattacacaaccacagagacctcctttggtacctttagacctttggttcttaaagcaggtggcatctccactcgggctggagatgggaagcccaggacagaatatggtacatcttcctgatgtatccatttctcttagagaattaagcaaagtatttgaaagtttaactggaaatttaaaaggggctttttaaaaacattaaagctggctgggcgcggtggctcacgcctgtaatcccagcactttgggaggctgaggcgggtggatcacgaggtcaggagattgagaccatccttgctaacacggtgaaactccatctctactaaaaatacaaaaaattagccgggcgtggtggtgggcacctgtagtcctagctactcaggaggctgaggcaggagaatggcatgaatctgggaggcggagcttgcagtgagccgagatcgctccactgcactccagcctgggtgacagagcaagactccatctgaaaaaaaaaaaaaaatatatatatatatatatatataaagattaaagccaacatggatatattatggaatatagggtcaattcatatgaagtttaaagatcaactacaagtgatttcaggccgtggaggcccctttgggctatctcctgactttcctaacatatccatctactctgttcggatactatggataaccttaggaaatgtttgacaaagacctccttattcctttctctctgcccctgaatatctttcctagattatttaaatgcattttttttgttttgttttgtattttgagatggagtcttgctctgtcaccaggctggagtgcagtggcaccatctcggcttactgcaaccttcacctcccaggttcaagtgattctcctgcctcagcttcccgagtagctgggactacaggtgggtgccaccatgcccagctaatttttttgtatttttagtagagatgggtttcactatgttggccaggatggtctctatctctagacctcgtgatccgccggcctcggcctcccaaagtattgagattacaggcgtgagccattgtgcccagccttaaatgtgttttttatggctctctcggtttgcacttttcagcctctttcaaaacgatctcttaccccagaaacttcttgttctccaactagttatcaaagcctctacctttaaaattctctcctctacaattttcttaagtaatatgtggtggtgggggggaagtattacacggacccgtaaaacacaaatcgctgtctaatcttttcagtcgtgtcctccattgattctaatcatccaccttaaggcttccaaggcacagaatgctccatcatttgaagattcttctctaaatgcagagggaaagacagtccactgtggcctcttaatgcaacttcttcctcaaatcaatccgtgtttctccctagaaacggcaggtggaccaggacatgagtatgtttatgggcctgcagaattatgtgacacaaaagaatgtcatcggatggatcaacacctcaattaatgagggcagatacttgggctggactgtgtagcctctttgaaggcctaccacagaactctgatttcatgggtggactgtctgcggaggagtcctgacttagcaagaagcccaagtaaagaattttatgggagaagggactcttcagaggaaggcaaataacagactgaaggaaagggcgtttgaaaagaagtgaagaaataaaaagaaaaaagacattacatactgtgtccacaccctctgcagtgggatataaatgctccctagaggaaggagacccacagctctgtggcttggagaatttagactctgtcttcagccaggcactccctccctccctcccagcactatgccctacaacttctgcctgcccagcctgagctgccgcaccagctgctcctcccggccctgcgtgccccccagctgccacagctgcaccctgcccggggcctgcaacatccccgccaatgtgagcaactgcaactggttctgcgag

SEQ ID NO: 18052 - DNA, 2300 bp, Homo sapien
aatggaaagagacggagaccaggagagacaacaagaaaaagaagagacaaggaaaaaagttgggaggaatcctcagcatcatgcagcaaatcagacaaagttagcccagcttccgaggggctaacctggaaaatgcaaagctgagaagaagccaagacaaaataagccaatagactgaggagtggcccaccgtgctgagtgtcctgcaaggcgtaaatggagttgactcataaaagatctatggacacaggactacagcttctgaggcctctgaaagaagtgacattgttccaagctgtccagaccgaagcatcacctctgtgatcaagcttgagattgtttgtggctgagaaatatactgccatctacacacaggcagtgtaaagtctaaaaggagcgacactgcctgttcctgaaggaataagaagtgggaagagaagaaaggagaaatgaagcagggagagtcagtcctgcactggctgcaggtcatggccagtcagcagccacacagaagatgtaggagagaacaagaaacccctgttatcttctggttactcctagatattcctttttctacctgctggttgccctgcagaatgtgaaatggcacaagaattcaagatggggaccacagacagactagctggtgagtaaacacaatgctgccatctcttgtgaatctagcctctttcttgcagtgttttcaagatctcaatgggcttgagtgaatttgctccttgaattagtggggaaaatgggaccccagggttgtaagatccccatgacctcacacaggcgaggggtagaattcatgtattctcttggtttcctagttggaatatttgcaaatttttttcattcaaggagaaattgagcagtcaatgggctatcaaacccacattcattatccagttcaatttaattcagaacacattgattagacagcttctctatgctgagcatatgactaaacagaagaatcatagttctggtgaaaaaaatgtctttttatgaacaattccggccaagatgggtcctcaatatgtatgagaaatagccagaagttaaggaaaggagatatttagaaggtgtaagatgggcatttagaaatatgtttgtattcagtgtaaatagaaaacgggtactgggtgcagtggcttgcatctgtaatctcagcactttgggaggctgaggtgggagaatcacttgagcccatgagttcaagactagcctgggcaatatagcaagaccccatgtctacaaaaaaaattaaaaatgagtttcaaaattagccggacgtggtggcacatgcctgtaatcccagacacttgggaggctgaggcaggaaaatctcttgaacccgggaggcggaggttgcggtgagcggagatcacgccattgcactccagcctgggcaacaaaagcgaaactccatctaaaaaaataaaaataaaataaaatttaaaaatgagccaggcttggtagagcacattttagttccagatgctctggaggctgaggcaggatgattgcttgagcccaggaatttgaggttacagtgagccatgatcacacctcggcactccagcctgggcgacagcaagaccccatctaaaaattaaaaataaataaaaagaaaactgtacatgtgacattatgggcattagtcacttgttgaacatctactgtgtgcttggcacagtcccaggggcaggggacatggtggggagtgggggtatgtcatgtccctgcccccaggaactctgagtcctgctgagcagacaggtccacagctagcataatgtaatgtgattgggccttcccccaaaaatatctccttcccctacccactccatttcttcctacacccacccctgacccaaaccccattcagggcattccaatccagctcatgattttcagccacacggcgaggggatgaagccatttcaggttatgcacttgatcccaaagagttttttgtgcttcgctctctaagtgactcataagcagaattcagagaactgttctcattagaatcttgttccctttaataatctagtcttcagccaggcagggtaatgaattgttttggcatctggttcttgttgctttggagaccacaggagaggcggtggtgatggcccatcgcttcagccctgtggcatccccacaggatccatgggcatcaaggtaagtttcaaagcaaatgaaagaggcttttgccaggtgcagcataggaaatcattccagggatgtggtgtgggcagaaaaagaaaagcacctacagtaaatcaagc

SEQ ID NO: 18053 - DNA, 2300 bp, Homo sapien
acttgggagggatgactcctggccacacccccattggttgacttgttttccagctctactggaaatctctgggatttgggatatacagtcagaatgtttctgtcaacgacagaccacatatacgggcggtggtcccacaagattataatgatgctgaaaattcctattctctagtgatgtggaagtggttataatgtcgtagtgcaatgcattaccttttctatgtttagatacacaaatattatcgtgttaataatagttgcctatgatactcagtacagcaacatgctgtacaggtttgtagccaggtgctataggctgtgctatacagtctaggtgtgtagtaggctctaccatctaggtttgtgtgagttccccctataatgtttccacagtgaagaaatctcttaacgacgcatttctcaggacgcaccctgtcttaaatgatgcatatgttacaaactagcgtaactttttttttcttttttgagacaaagtgtcaatcttgttgctcaggctggagtgcaatggcgcaatcttggctcacggaaacctccgcctcccgggttcaagcaattctcctcctcagcctcctgagtagctgggattacaggcatgtaccaccatgcccggctaattttatatttttagtagagaccggttttctccatgttgttcatgctggtctcgaactcctgacctcaggtgatccgcctgccttggcctcccaaagtacagggattacaggcgtgagccaccgcgcccggcctagtttaactttttaaagtgcattttcttgttgtcactgccatagtatttaaatcttttcctttgctggaacacaaagaccttcagtaattttcttttcaccacaatttctcatccagtaactaagccccttcttgccctctccttaggcccagcactgacggggcaatgacaccgttgttctcaccgggggccatgatgaagtgaaaagagaatgggcctagcagacatgagactgaatcgagcctttgccagttcactaactgtcaatcagaaaatgtgcaaatgtacttcactctagttttctcatctgtacattgaggcaatgagtaaccacctcataggtggtaagggttagataggaaagaacacagtagaatgcctagcacacctaagtactcaatcaatgttagttctggacctttcatttgaatactgcttgagctctgtgcccaatctccctttcctggatcaaataagatttttctttgttagtgatttctttctagatacttccttggccagaactatagatcctctgtctttcactaactcttgttgatctatggttctcattcaagtttgtgtagaacatccagagatttcagaggcattgtttactcctgatgaacagggaacattgcgtgtccaggaaccagcacactgcctgagttatgggggatattcaggaagcatgctgaaccaatgaatgaatgaacaaatgaatgaatagctgattctgactagtcaaccaaaacttaattagcgccattgcttccagatgttattgcttctcaagggagtatgcaatgtgaaagaagaaagaaaaaaaggcgcctctcaatcgtcaaatatcagtagatgcattggttttattaactgatattttctcttcaaaggaaaggctgattcagtcttgcacaggcgaaagatccagtgggtcccattggttctctgtgtctcctgctacacaaattactgacggaaagatttgagccttcattgtgaccacatccacagagaccatagtccagagagagcaattggggcctgaatcaactgctggtgtttgttgagcagaaacagtgagtctctgacttcccaccaacagctaacctgatatggaagagccaagaggcatctcagatttgtcaacattgctttaatgagctgaggaacttctcatggtaaactcagcagctgagtaacaggatgatggcaccacaacaggtagataatcaaggcaggaggtcaaagcactggagccaacacccgcccaggatggggtataaaagggttgggaggagaggaggcttcagtctcagtggctcagccttcccagctgatctgaagctcctgtgcagcctcagccctacaccatgacctccttctacagcacctcctcatgccctctgggttgcaccatggctcctggagcaagaaatgtctttgtctctcctatcgatgttgggtgccagcctgtggcagaggccaatgctgcctccatgtgcctcttggccaacgtggcacac

SEQ ID NO: 18054 - DNA, 2300 bp, Homo sapien
gaaaatggcattccaagaccacagctcctcacctccatttgcagtagacttcatgcctctagagatcggcatgtctaaagtcagaatccacacagagaatgttgtgcacacaggtgaatgaaggagggcagcaggctcccatctctcacactctgtattcatcacttcttgttactgaacctggcctcatattcggtcaccaggggccacagggactctttttaaagggttgggaaggaagagagtcttaggatccccacccgctccttcacctcctttgagaaaatacaaatcaggggaacaaagcgattttacaaagagccatgcaacatcagtatcattatgcaaaacagtacaaggtagaagcccaagccaggacccaagccagttggcagagaggggtgtcatctggacacacaaggcttcagcagtgatgagtcatgtattgtgaatggacgaaatcgtggcttttagtccatggaatgaatctgggcagaggataaagccaaaagatgggtgctacttagcaaatcaaaggaaatgactttaaaagcctggctctctgatttatagagaagcttgttgctatgtgatgaggcggaggagagtaacaaaagggtgtttgaagatgtaacatatgcagattgcacccagtggcctctggaggatgggacagcctgccctggtgatgtctcccaatgatgttgtctgtaaagggttatggattggtgagctctgaataacccttaggtcagcgctcactactacttactttcctgagaagcccaatctggactgaattctcagattctgtatttcttcttgatagaactccaatagcctgtgtttcacatatgcacgtctgatccctatagaggtgtatgttcagcttttgttcaatgctcaggggactggcaaaaactcattttcccaaaattctagttataatcactttggattgttccacattaggtttttcttagtctcaggggtctatgtatcttctgtcacaaattttgggagaaaagttttgggatctcagcagccatgtgtcttggatccctagtaccaagaactatctgaatgtggaatgtgtaatataaccattttagggacaggactttcccctggcatcttctgatttagcccttggagaaactctgttttattgtatgaatacctccacatctgtattttctgagatacaaagggaaaaatacacaatgtcagatttttgttttacatcttaatttcaacttcttgcccggtttctaggaatttgaatccttcttagttctagcaatgacacagtagttatccttggggtggaggatttggaggtggtcaaggtgaagaaacagtttctggagttgaaagaagctgatgttgagaataggctttatactttatagtgaggttgatcttagaaaactgtcctcaatggcttgtttatttattttgtaaaattaagagtacccacctcccaggttggaagtaaagattaaaaggtatcattgctcaatcccctagctcatagggtgaaggctcatgactgactttagaataaaggaagcaaggtatgaagagagcccacagaggctctgatcactcaatgtcctttgactttcatgaccaagttcttatttgaggttcagtaagattattgctcatttctctttgtttatttctggcttcttgagcttgcccttcttggtcgagataagccatggtttttggagtcatcctcattttcatgagcttctcagataccttgtttgaaacatcacgtctacccaagttacagttgttccccaatggcaggaactattttgtgcttaaccaactatatatcaagcatcagcaaggtgcgtagcatatgggacgtagccaggggatgtgttttgagtgactggattcatctaagtcttgttgctcctcaaagtgagtctgaaaggcaaccaactaaagaaagaagaaatgtaggacttcttgataacccaaggccataacatccaccaattccaagactcagtttcttccctggatagggaaggctggttgagtcttaacccaagtgagaaccattgtcatcaccggggttagtcctcctgctacaccactgaccaacaggaaagtttgtgtctccagagtggacacatccataaagaggccaaacccagtcaaggtctaagcatctgatggctataactttgcttctttgaaagataataaaaagcttctgacctcccatcaacagccaacctgatttcaaagagccaagaggcctcagattcgtcaac

SEQ ID NO: 18055 - DNA, 2300 bp, Homo sapien
atggggttgtttgttattttcttgtaaatttgtttaagctccttgtagattctggatattagacctttgtcagatgggtagattgcaaaaattttctccaattctataggttgcctgctgactctgataacagtttcttttgctgtgcagaagctctttagttgaattagatcccatttgtcaactttggcttttgttgcaattgcttttgctgttttagtcatgaagtctttgcccatgcctatgtcctgaatggtattgcctagactttcttctagggtgaaaactcacatttctaacatgttcctgagtcaggttgatgctgagagtgactgataacaccttattataataattatagtttttgggtgagaggattaaatgggcaaattaatgccaagcactcagcaccatgcctggtatttgtatacattccacaagtgctggctatgattctgaagggtggcctgatgagtctcatcccttgtagttggtattgccatcacacctccttccatctgatgctataatcttctctaaataggtaatccagacaaggtactggaatttgtagttgttgcagagaatcaaattgtgagagtatttgatctgaccccctcgattggcatgaagaaactgaggtctggagagacaaaattactttcccaaggccaaatggcaagtcagaggcagtatatctacgctctccttttcttatgcaatgaatgagctgggtggcattttccctttcctgttcttgtactgacatttctgggaatatgtgaaacataaggcaagtacttataccccaaaattatatcaagaagattactgaataaaaaagtggctatatagcacacacatactaaatgtgaagctcacagcttttgcagccaggactgaaaaccactgctctagcatgttgccttcttaagtgaatgcccagggcttctatagttgggcaaatatgctccctgtctcctggcttagctcattccagggctatagaacatcctttcccaagggagtggattcacactgcttccatagtctgagatcctgaagtgagccttccccatctgccacaacagaaagtaaaagtagaacctgttccaactattctcagtctgttcaacaaacaattattgagcacttgacaattgtgtatatggtgcagtgataattgaatggatggtccagagggggtcaagacagagcagctgccacctggagatgttcatgatatggacttttccaagaggaagagaccaactggaaagatgtacctgattcttaggcttctgtttgggtcttttttttttttttttttttgccttttgaaggggtgcagcattcctggaggtactgcaataccaggtcaacatgtagagtgaacagagcaagctcttattccatctccctgctcccaaaatccatttaatatgttgtcctcagatggaggacgtatcagatattaagacgataagaacagataccacacttgatcttagccaaaaggctgagaagtgatgctgcctatgtcttgagttcattctctccccactgatattattttcttccccttggcaggaagatgatgtctgttaggaagcctctgaggttcctgttcctttctgctggatttatgccgctgccagcatcggagcagtttctaccacccacacatttccttgttaaatagccaggcctcttcccatggggaatgctttcattaaaagaggcagccactgctgcacagacctgcaggcttctcagggctagagcaggcgggggtgcagtgggcaaagccagtggaggcacaggctgggttgtggcagtctcctggagggcctgccctagtaatgagggcccaggcatgcggctgaccctttgaagatgtgtcctgaagctctctcatggtgatcaatgacaggaacccagactcctgctttagccaaatgataagtttggcctcttttattggaaaccaaattacaaattaattagcagcttcctctggggctgggtgtgaacatcaacaccacccaatgatgaatttctatcatgagccccctcactgcaagggcataaaatggcccgggcggcatggggtctgtagacatccaggtagctgtggctgaggagaaagggcctctccaacatgacatcctcctgctgtgtcaccaacaacttgcaagcctctctcaagagctgcccccggcctgcctcggtctgttccagcggcgtgaactgccggcctgagctgtgcctgggctatgtctgccagcccatggcatgcc

SEQ ID NO: 18056 - DNA, 2300 bp, Homo sapien
gcatgatctggggacagcctggaccacatctgagcagagtgcaaggatcctgtaaggaaagttactaggaatgtgctaaacaatgttagttcttgctgataaggggttctagataatcatgtcatttaagaaaagcatgctaaaaaggaacagaaatagatcagaccaatttacaaaataccttaaaacagcttgaaaaatattacatatatgttttataaagttatctaaaaatcttatcaagaattttttagtcacaactttagcactaaattggtttatgagatccatctcccttgggcagaatggcttttggcccagaaaacactttgttcttggccaaaggggctggttagtctggacaggtgctgctcacctacacagagatgccggatccccttccatctctgagtctcagtttcctcatttacaaaagtaggaatagtaggctgggtgtggtggctcatgcctgtaatcccagcactttgggaggctgaggcaggcagatcacgaggtcaggagatcgagaccatcctggctaacacggtgaaaccccgtctctactaaaaatacaaaaaaaaaaaaaaaaagaaaaattagctgggtgtggtggcgggcacctatagtcccagctactcaggaggctgaggcaggagaatggcgtgaacgctggaggtggggcttgcagtgagctgagatcgcaccactgcactccagcctgggcaacagagtgagactccatctcaaaaaaaaaaaaaaaagaagtaggaatagttaagattgactgtgttttcctttccccgctccctactctcttttgtttcctcccattctttctttcctttcttaacacaattcaccgtgggaaaaatcacttaattaattaattaattcatagacatctagaagccctgcactgtgcttaacactacagagatttaaaaaaaaagtacaaggtcaatccttgcccccatgcttacagtctccctgggaaaatagggctgaaacacaagacaatcagaagacgtcagttaattggaggccaagaaatctaccaatagtcactgccttgggcattcagagctgggagggcacagcagggctggagcaggggccagacttcgggggaaggcctggccaggactgggcccttagaggcagtggggtgggcctgtggtttggagctgcaaggcctgggctttagcctccctgggaagcctgtgtggaccttgggtaagccattttctactctgaccattgtctccttctgtaggagtcagcacctttctatccacgactgtgttggagggtgtgtgtgaggccttaaagaagatagcatgccttgaacagttgtacagatgctttttcagctgtgatctgggacaggctcctgaaacagtccaagcctcctctatttaatgggctattggtgatgccaatctcatgagtttgtgtgaggactgaataagagaatgcatagagacagatcagcgtgggggctggtgggtactaaatgctcagtgaatgatggttgctaccatcagccgggttattgatagggctgtgtgaaaagagctccaattcaggcagccagaaggaagggcttctccatttctcaaccagggctggggaagacatgccctcctagatgtcatcatgggcaggtgtccaattaactgatctctaggcattgtggctagaacttaggctctacaacctgcacagacttcctggcaagggaaagagtagggaagtgtccatcagggctctgcagtatctagggtgataagctgtcccattttaccgaggactgaggtttccctggcatatggaactttcggaactaaagccagaaaattcctggggaaaccaagaaaattggtcaccttagccatattttctgggccaattcaagagccttctgtgtctccctggctgcaagacccctgccttcctgcaccaaccaagtttacccttccatcttctgggagcaccccagagacctcctctactccctcaggccaataaaagaagtcaaagttggagaaagtcaagacagtggctgaactcccatgcttgcttaatgcggaggctgaggtctgggctcaaatgacaggtccctttgaagaactgacagggacttggtcttcccagtgatgtggggtggtggagatgagtcttgacatagtaatggggctcctattttatgagactggtaaattttcacaggaaactaaataacaggttaatgaggggttttaatagaaagtggtgttaactttaatgaggagaaaacactt

SEQ ID NO: 18057 - DNA, 2300 bp, Homo sapien
aggttgggtcggagccccagtcttggtcctgatagtccaatggttctcaactgggggtggttttgccccctgactcctaacccggggaacatttggcaatgtctgtagacagttttggttgtcaacactggggcagggggtggctactggcatctggtggtagagtccagggatactgccacacattttacaaagcacaggagagccctaaacaacaaagaatgacctggcacgaagggctgaggttgggaaaccccatgacaatccaatcctaggccctgccaggagaactggggagattgggtggctgtgaggaagccattgctggggcagctggtgctctggagggctgatgctgtgctcttgctcccagaggggctgcacggggtccactgccagctgctcctggacatcttgtcaaggtgtccaccttgctgggagaggcatgttcaccacagccaatcctccctggataatttcagagagaagcttataaaacattttaagaggttggcaaattacaaccttagaagcacataaatgcttccataaacgccagctttgcaaaccaagcgtgtgtgggggcagagtgagcaggtttcccaagccttgggaaagtccatgtttcaaggcggaagacccaggtttatctttggtccccaattctcaggttcttctctctcggcttgcttaactatctggcagtatttagcttttttctttgtattcctcctctgtccaaagagtctgccattggccatttctgtgacctgttaagggaccaggagggtcagagcaggttgttctagggtcctgattctacccatgaggttcaaaaagctgacggccacaaaggaaactgccctccagctctgcccagtgatccaagcatgcagattccataatagcaggagtctgtgatgatgtgttcattgactgagggactggctatggggcatctccttctcccactgccaccctgctgtgcccagtgggcagacagaccattctcagcagtgccatgtgaatgctcacactcacgaacctttgctggtcacagccataaaccatcatcaaagactgtcaacctaacctaacctaacctaacctaacctaacctaacctaacctaacctaaccaaccaacacttctgcaggacccagtggcttgcaaaacactttcacttcttgttcgatcctccttatatctgtgtgaagcaggcgggacagaaggacaatctctactgttccagtgaaaacactgaggttcccagggaggaaatgatgtgctcagtatcacagggcaaattagtagcagagccaggatttgaactatgtctcctgtccctaaattctgggtacccagacttgactccagttgtgtggggaagcagtggggcaaggaagtaggatttggtgtctgagagccctagtttcagacccaagctctgccagtcacttcctgttcacactgagcaagctattaaaccattcggagccccagtttccacactggtaaaaatgaagataaaatcagccacctcctagggttgttacgaggtgtaaatgaaataacaatgagcctggtacatcacaggtgctccctgaattttagttcctttgctcccttttaccatcccagtagcccaggcaggggtgagcagctatgaggcgtggcagcagtggatggaagtgacaagggacagatgaggatccccaggggaagggaggtggagaaagcaggaaccaaatgtcattcgtgcagccactcccgatttatgggatctggtgcagagactctttgaagaggcaataaaactcatattctgctaggaaatgacaacagtggagagtcctgacttagcaaaccaaattcaacgatttgattttttttttttttttacaaggcatggggttccggatgggtagcaaaaatcacattctaatattagctatctggggtaggaacaggctttcccaagagcaagagatgtgtaccatgccaacacccaatggtgagtgtacataaatgctccatagaggccttgagagtccagaacctgagctccttgctaagctgcaaccttcctctgctagcaccatggccacccagacctgcacccctaccttctccactgggtctatcaagggcctctgtggcacagcaggcggcatctctcgggtgtcctccatccgttctgtgggctcctgcagggtccccagtctcgccggtgctgcagggtacatctcttctgctaggtcgggcctctctggccttgggagctgcttgcctggctccta

SEQ ID NO: 18058 - DNA, 2300 bp, Homo sapien
gacttgggagggcaagaatgacagccactgacagcagggtgtgagaggacaggaaggcacgattctccaagggaagccctctgtgtctgaccctgagaacagccagccatggtgacaggccatcagggaaggagggaagaaagagctgcatttgtgtggccaaggctctcaaccagtgatgtttccttactgagggtttcagacacaggacactcagatcagaattgcaggtaaacaaacaacaacaacaacaacaacacagacacacacacacaccctataagtatgctcctaataccacatttaaaaaatttgctaaatctggcaaccctttctttatcaggtctgtgaatggccctgagttttccaccatcaaaactgaataaacagccaggcacggtggctcacgcctgtaatcccagcactttgggaggccgaggcgggtggatcacaagctcaggagtttgagaccagcctggccaacaaggtgaaacccctctctaatacaaaaaattagacaggcgtagtggcgggcacctgtactcccagctactcgggaggctgagaggcaggagaatggtgtgaacccagaaggcggagcttgcagtgagccgagatcttgccagtgcactccagcctgggtgacagagcaagactctgtctcaaaaaacaaaaacaaaaacaaaaacaaaaacaaaactgaataaacgagacttttcctggagtttttggaaaaattacattggtggctagaaagggcttaattgtagggtttcccctttctgtgaggctttcttcaactttgtgtacctgttgttgcatgtcggcactagaatctaatgtaagttgacagtggatttggcatgagctgttgatggggttatttgacacagaatatatagaaccctgcttttcaggggaggggccagggctcccaggtgctttgtcacttgaacacattcttcgttccaaggaaaatttagtcatgtggaggaaatgagaatgagttgtgggtctcccagggtcctgggtgaccgttgggtgctgggtggatctgaagaggttaaaacatggaatgaacatttcttaggtgcttcttctggtgggaaattctctaggatctgggtgtatggacctcaagggtggaagaggcagtaggagaaaaccagaaagatggagctgaaaccagcaggctgctctaacagagacaaccattggccttctgcagagatcttattcttgtctgtgcccatttctggttggcctggccatcccagaggctgctgtctggtttgtttgcttcactatctttggggcctttgggtagtggtgaccagcatgttctgaccaaagcccagagaagcataaaaagagacaccctgcttgaagaactcactccctccttgggcacactgtgacagcaatgccttgtgcatggaagggactgttcagagctgggcagaaggagacttgggcttgatatttcaggcctttgcccatggagaaccttggttttcagatggaagttcatttgagtgtgcagacttctttctgccaaagaaggggccagaaactcaggagttgatgttgaacttggcagccttccaagatgggcgtggggaaaggccaggatgctttctgttcctatggcggcattccccttcttcctcctgcccccaagctgggatcatggcggataggtcatcctgtcagcactgcagcctgcaggtggtgtgagggcttttggaagcttctagagtaagggtcagaggccagatggagacttctagctgaggggactgttgcagctctggacacaatcctagaccatgcctcttcgagtagctgtcttttctttgacagctgggttaggcctctgaattagtattccattaaaccagggcaagtggtttgtgccctggaaacagcattggactggggttctgactatatgggtactaatagcagtttcagtctcttaaatctgtgaaacgacttcctgtttatccagcccctttggatgtagttctcacaatcccgtgattgtggtgttatgacctccacagacctattgtgaaagctgaggctcagagggatggagcagcttgaacttagttctcgctgagtcccggctcagggcccttcccttgggtcggggggttggctgtgcagtcaacaataaggaaaaaggcaagacactgagggcagctgaaagacttttacctttgacgagctggtcacctgctccagggaaggtacattcctctccccacaaccctagaggcacctctctggtccac

SEQ ID NO: 18059 - DNA, 2300 bp, Homo sapien
cattaatcaccttcttgtcagttttgatcctctaccgagagagcaagagctcctgctttgggctgaatcaccccttttcagagagagagagagagagagagagagctgagccatcagcttgggcaggagggccgggcagggtcaggggttagcctgaatccctggcctcgcaaggctgttagaacactggcaacgtgccctggctctgtccctgctgatacccctgcgggaagcacaggcccgcttctctaccccagaaaacaaaggcccagaaagccctgactcagatttctcctttctgatcttgctgaatcagtgaagggggttccaggagaacctcatgcctgtgccaccccacccagcccctggcctggtatcatccagacctttgtggctgctgtgggccagaaagctgctcccaagatgccatccacagcaaccctggccccttggtgagtggggcctgggagtctgcattcagggtcctccattgtcagccctggaatggaggaccttctatcctggcctcacagatgccatctgaggtccttttctcccagcctgaatggggaagctccctctggcagggttcttacatagtccctgagtttctcagccacatctcaggatcctaagctgagaccctggccctgggtcctgtgtcacatcctcttatgtggcctcttggctgggacagacctcatatgactggcgtactagaaaggaccctgctcacattattacagggccgtcttcctggatgtgactgtgccctaaagcagtcagcgtaatggagtgattcaacccgagggccagactgacccaggcatctcaacctcaacactattgatattttgggtctgataattctttgctgtggggacagtcctgcaccttataggatgtttagcagcatacctggtgtttagctatcagtagtgcccccaagttgtgacaaccaaaatgttcctagacattgtcaaacgtcccctggagagcaaagcagcctctagctgaggacctctgaacttgtctatggggacagaagttggaagagtggttacaccaggggtgtggagtcaggtaattgactgggaaaaggtacaaggacctttatggaatgctgggaatgtcctgggtggtgtttacacaggtcgtgcatacccatgcgtgacatcaagctggacacgtgatctatacattttactgtatgaaaaatgtacctaaaaaatgcaccttagcgtcagacagaaccagacttggatttcagtcctgattctgcccttaaggttcattttcctcatgtgtaaatgggggcaatagtaggaccctcctcctgtggctgctgtgaaggttaaatgagatgatgagtgtaaagtaacttcacccagttcctgcctatggtgagggctcggagaatattcgctatgataatggacagggccacttcctctttccatgcctgagtttccacagctgtgtctgatggtccctaagatcccttaaggtctctgtcactgtgactttttctgatggcctcggagctatttctttctcagtctaaatactttcaaggcaggtgattctatcgaaccaagcaaagtttgtcatcagagttgctggggcccctggagtagatgaagtgctaagaaggatccaggacatcccagtcagaagttttaggtatagaaaaaaggaaggtcgagggctacggtgaccttgcaaagcacagagccactctgcacccaccactttcctcgcagaagctcctggcaggcctccgcatctcaggtcccgttctaatactgggtggggctcagagcctgcacagtgaactccttaagtggaggtgaaacagaattcacttgtcaaaagggcagtctcaggcagaatgctgtcccctctgaatcattctttttgttaaggattaaaaaaaaagccacccccaaaaggcacaacccaccctggagagatcagagataactaagcttgtgggaaacagaagtgtagttggcaccaagtcagagggtggggaagggaggagagaagataaccagcccctatggaggtgtataaaaggtgtccactctggggaagagccacagtcctcggcccaggccaagcaagcttctatctgcacctgctctcaatcctgctctcaccatgagcctccgcctgcagagctcctctgccagctatggaggtggtttcgggggtggctcttgccagctgggaggaggccgtggtgtctctacctgttcaactcggtttgtgtccgggggatcagctgggggctatgg

SEQ ID NO: 18060 - DNA, 2300 bp, Homo sapien
ctttcggaggaaaagacaataccctcccacccatgagacaataccacactgtctgtgcccagcattggaggccaggctcactgcgaagatggatgagaaggaacccacccccagccttgctggctggcagttccccttgccagcccagctcagatgcaggaatttggggtctgcaggaaggactctttccctgtgccctgtttggttgagggtgtgaggacctgtttgagtcctggctttgccccttaccagtggtgccacctggcacaagttgcttcacctctccaagtttcaatttcattctttctgaatcttgggtgggggtcaccctctgttgtgaggatgagaggaggtgatggatgcaaaagtgctttgtaaatcacaaagtgcagggtagaagtaaaggattatgctattatagcaaaataagaacctaagaacaacctgcgttgccccataggagctggctatggaaggtcgatgccgttgagcctaagaacatgctcaggctcacagggcatgttctgatgcccaacgacaaagcccctcctggtgagggcactcaggcgcaggtgccggtcatgcaccctggcccctgcatgtctggcacctgggtggggatccaggagggggcaggatgggggctcttgggccacagggcttccctggaagtgagagttgagagcgccccttgccacagggaaacagagacttaaaaaggtaaatgtccacagtcttaccatggtaattggtagggtcaggatttgaacccaggcctcacagtcttaccatgataattgataaagccaggattcaaacccgggcctgagggactccagagccctgtccacttcaccatgctgcaacctgggctaggaatcctcctcctgagtttctgtaagccctggggccaggtccagagggctgagccacacctccaagtggcactgcccacaggtatcaggtgtccctggaaaggtgtccctgagctggtggcagagaaaagggctctcctgagtgttcaactccccgtctgtgtgaagcaatgccttggtcttcaagatctccggtgtcttccagcctgcctgccagtctcccttctcttcccttccacagcattcaggcacatagagccttctgcagcggcccgtccccagccagcacttgacaggacagatgggggctaatctggccctgctaagcagcgacatgcctctcctggagaaggcaggggcttcctggaacttgccccagccttatcagcggaggtttgccccaacacatcccagaaacgagcaaaggttcagcgccgtgcagttggcaggtgtcgggatcatcagtcatccccttgtcagtcccaagcctgctgggcttttgtgagggtgccaggaacacaggctggaggatggcaggaggggagtagaggtgggaggaggggagtccatctgcagcaccaggtaaggggatggatgctggctcctctggtcacctcagctggaacactactcaaggtccctggctcctgtcctccacctgcccccaggggccctgcattcccatccccagggcctccactctccctgagccctgcagtctctcactcactcactcactcactcattcactcactcactcactcacagggttttgagttggataacacagcataatgatcggccagtggactcccaaactaagaacacggagctgtcctcttggggagaggctcagggctcggggaagtgaagtccagctgagggcacagttggcctgagctgctctcagtacaggcagaggccttggtagctgtgctgtgatgagagttcgctccctgctgctctcttctggcatggagagatgaacctgtaatccaagtgttaaaaccgtgccctggggaaaaacactattaattctgaatcatctcttttgttgcattaaaaaaaaatagaagagaaaaacttcacatgacccactcaaggtgtgcaggcagctgtgtttgtcaggaaggcagaaggagttggctttgctttaggggaggagacgaggtcccacaacaccctctgaagggtatataaggagccccagcgtgcagcctggcctggtacctcctgccagcatctcttgggtttgctgagaactcacgggctccagctacctggccatgaccaccacatttctgcaaacttcttcctccacctttgggggtggctcaacccgagggggttccctcctggctgggggaggtggctttggtggggggagtctctctgggggaggtggaagccgaagtatctcagctt

SEQ ID NO: 18061 - DNA, 2300 bp, Homo sapien
cggcagaatcaggagtaccagcggctcatggacatcaagtcgcggctggagcaggagattgccacctaccgcagcctgctcgagggacaggaagatcactacaacaatttgtctgcctccaaggtcctctgaggcagcaggctctggggcttctgctgtcctttggagggtgtcttctgggtagagggatgggaaggaagggacccttacccccggctcttctcctgacctgccaataaaaatttatggtccaagggaggaaggacgtttggtttattatttcagcccatggagagaataggtcgttcggtttgttatttgagcccatggagagatgggtcctgccttggccctgtttaggttttatttgaaccaaagttcactctgtcccaggaaagggaggggagggtactcacatactttgcctgtaatggtaattcctgtttacagaagtcttcatttatttaacccgttccttaaaataacctcatgaaataagcattgcttccattttacaaaagtaaactaaggctcagagaggtgaagtgtttttttctatatgtaactgctctaatgcatggcaaaggtgggatttgaaattgtttttgcttctagatttagttttctttctactctactccccagggcgttgaggtatctgtgtgaaattaatgtttattgaacacctactatgtgccattgaattaaaaacagccctaaaaggtagtatgagctgcatgttatagatcaggaaataggctcagagaggttcagtaacttgtccaaggccacacagcaactacatggtagagccaggactagaacctaagttgcctgattcttagcccatggtgccagcccctgccaggtggtctcctggagttgacgccacttgtgccggtcttgctgacattccagtcttgtgccctatgaaggctcaggccggggatccctaggggcagttcctcccgacacatttctccacctcactgaaactgggggtttggggccaggcatcccgcttggagcaaggctggggaggctgtacctgtcagtgtgtgttgtgtgtgtgcatgcactaacacattcacccatttttggggcagccctgcataagccctttaacgcccaccagcccatacctgggcccagagcccagaatgggacccagcagtgacccagacctcccacagagaccccaaccctggcttgcctggggcctgccctgggccagcaaaagaacgaagtcccagcttcctggtacaactctgcccttgggtaggtatggccctgctcctgtggtttacatctcagctgccaagaactgaggccaattcaaggtaaggaagaggccccaaaagaagtcccacttcttcctggtggagaggtgagggctgcaggcccaaccctatgagtgatgggggcaagtgagggacactagttccacgcccgcatgctgccaaatgtactcagcaccctgctaaggaggctggagaccccatcacggccatggcaatcccgaaggaggagctgtttcaaggttggttatgaacatgtaaccccagagccccgctgctgtagcctggactgggacccccttctgccccctccctagctgtcctgttctggcctccagcacccacaaaccaccacccccaacttaacttctcaggaagccttggagctggagggagaggcctggctgcacccccagctgggactgcccagaggcgcttgtccctgcccatgaaagcctcccttgtcacagctgaaaccttccctctgcctcaggggcccctggaatgtggctgcggggcggggtctgggcccacacaggtggggcaggtgactgtcaggtctcaggcctgagtgtcaggaatgaagcctgcctttgtgtgtgcacagtgcagggtggggctggactggggacacttttctgtctcagcctggagacctgggataggagggagaggggagtggggaagttgaggggagtgcctttacatcctgctggtcatcgtggccacttcagtctgttgagcatttcctgtgagtcatcttgctccaactgagagtcaggctgagctggagttatttccattttcctgattggtagactaaggctcagagagaggaggcggcattacccaaagccgcacagctggtaaatgggaaaagaggggtttaaaggtaagtctctgggctccaggacacaccccctctccctggcatttccctggggaacaggagaggtgtgggagggttctaaggttgttggagacttcattctccttgtgccc

SEQ ID NO: 18062 - DNA, 2300 bp, Homo sapien
ggaggccaggtcagtgtggaggtggattccgctccgggcaccgatctcgccaagatcctgagtgacatgcgaagccaatatgaggtcatggccgagcagaaccggaaggatgctgaagcctggttcaccagccgggtaggtagagggaagcaggcaccctttgggggttaggaaggggagggctttgtgttccctacgcgaaggtctgactcaatgcttattccctcttcttcctctctctgcagactgaagaattgaaccgggaggtcgctggccacacggagcagctccagatgagcaggtccgaggttactgacctgcggcgcacccttcagggtcttgagattgagctgcagtcacagctgagcatggtatgtgtccccccaccgccgccgcttccctgtgcaattcacacttatacccttgcagcctagggcagcctggccggtggctgtgcccatgccctctccgggaaccaggctctgctgagtcacaaccccctctccctatcctcagaaagctgccttggaagacacactggcagaaacggaggcgcgctttggagcccagctggcgcatatccaggcgctgatcagcggtattgaagcccagctgggcgatgtgcgagctgatagtgagcggcagaatcaggagtaccagcggctcatggacatcaagtcgcggctggagcaggagattgccacctaccgcagcctgctcgagggacaggaagatcactacaacaatttgtctgcctccaaggtcctctgaggcagcaggctctggggcttctgctgtcctttggagggtgtcttctgggtagagggatgggaaggaagggacccttacccccggctcttctcctgacctgccaataaaaatttatggtccaagggaggaaggacgtttggtttattatttcagcccatggagagaataggtcgttcggtttgttatttgagcccatggagagatgggtcctgccttggccctgtttaggttttatttgaaccaaagttcactctgtcccaggaaagggaggggagggtactcacatactttgcctgtaatggtaattcctgtttacagaagtcttcatttatttaacccgttccttaaaataacctcatgaaataagcattgcttccattttacaaaagtaaactaaggctcagagaggtgaagtgtttttttctatatgtaactgctctaatgcatggcaaaggtgggatttgaaattgtttttgcttctagatttagttttctttctactctactccccagggcgttgaggtatctgtgtgaaattaatgtttattgaacacctactatgtgccattgaattaaaaacagccctaaaaggtagtatgagctgcatgttatagatcaggaaataggctcagagaggttcagtaacttgtccaaggccacacagcaactacatggtagagccaggactagaacctaagttgcctgattcttagcccatggtgccagcccctgccaggtggtctcctggagttgacgccacttgtgccggtcttgctgacattccagtcttgtgccctatgaaggctcaggccggggatccctaggggcagttcctcccgacacatttctccacctcactgaaactgggggtttggggccaggcatcccgcttggagcaaggctggggaggctgtacctgtcagtgtgtgttgtgtgtgtgcatgcactaacacattcacccatttttggggcagccctgcataagccctttaacgcccaccagcccatacctgggcccagagcccagaatgggacccagcagtgacccagacctcccacagagaccccaaccctggcttgcctggggcctgccctgggccagcaaaagaacgaagtcccagcttcctggtacaactctgcccttgggtaggtatggccctgctcctgtggtttacatctcagctgccaagaactgaggccaattcaaggtaaggaagaggccccaaaagaagtcccacttcttcctggtggagaggtgagggctgcaggcccaaccctatgagtgatgggggcaagtgagggacactagttccacgcccgcatgctgccaaatgtactcagcaccctgctaaggaggctggagaccccatcacggccatggcaatcccgaaggaggagctgtttcaaggttggttatgaacatgtaaccccagagccccgctgctgtagcctggactgggacccccttctgccccctccctagctgtcctgttctggcctccagcacccacaaaccaccacccccaact

SEQ ID NO: 18063 - DNA, 2300 bp, Homo sapien
cctttaatacaaagtccctccccagacccccctatcaggccagaaaaacagagctgcctattggggctttgtgtgcatggcaactatctggccaatctcccttcccgctaacaaggagcaggcctcctcatcagtgcctgataagggaatgactcagagctgaccagtcacagggtgctggcttttatggctggtcttggactcccctttctccctcttgggctctccaaagaccttcagtctttctgcaactgattcactagttaaacagcctcagactggccttcctgagggctcagagcggttcctggtgggttaggggtgtgtatttacggggtttcctgccccagttcaaggatgagttggcagctaacaggtagtttgctgggaacttaggtttccgaggctggagacaagtctccaccagtcacaggtgacccaggtgataatacacagagaagagggctgagctgggccacccctcttttcatgagggaaaactgagacccagagatgggcagggactggcctgtctcccttaataccttctcaggagggcctctgttccaagcctgggtgaatgctttgccataaggacaagaaggaaccatggggacagttctggggacgggggtcactggggacaggaactggggtgaggttgttgcagcgccctgtagtgcctggcagggggcatggccctccaaagagatccaaaacggtgggtggaattgttgaacagagcaaggggtggggctgtgtggggaggaaggccctgcctctattgtcaaaacctttaccttgtgccgggcactttgtgtcgctctgcccagctcattcaagcactcatctttatacaaggatgaggacatgcattcagcagccctctgacaaggagggcagggattcatcctatgtttgcctttcagtggcagatgctaaatgcctcatgggcaagttactggcctctcccaggctctgcttcctcattttggaaatattaaagcagcccaatactcctgtggttgaatgaacgcatgctttgggggatggaagggaggggatcatcctggtggccagggacgagtgggctttgagggttccagagtgaggatcaggctggagcttagtgttggaaaggtgtcagctgccagaaccgctccctgcagctgttctcaggagactgttgtcacctggggcactgaatggcgacagcagggtgaggcagctttgtcttgagagggctgggttcgtgcagctcaaaatgcccggatgtgccctgatccggaactggtgcctttgtcagaggggacaaaaggggagttgggcatgggtgttcccaagaagctggttctgagaggctgtaatctccagtggagggcaggaatctgtgaatgcactttgtggggggcgggctggttaggatcgcaagcaaggggctcttaacagggagcactctgaatggttaatcactggggctgggcgcaggggctcacgcctgtaatcccagcactttgggcggcccaggcgggtggatcacttgaggtcaggagtttgagaccagcctggtcaacatggtgaaaccctgtctctactaaaaatacaaaaattagctgggcgtggtggcgcgtgcctgtaatcccagctactccggaggctgaggcaggagaatcgcttgaacccgggagatggaggctgcagtgggccgagatcacaccactgcactccagtctgggcgacagagactcgtctccaaaaaaacaaaaacaaaatcactgggtcaggggtgtgtaggaatatgaccccagagggactgtaattcccagtggtgtcaaactctgggtgatcttaaagggtgaggctcagaatgtggcttccagggacaggggtgtccaggtatgtccctgacgggggaaaggccagaacagggtctgcagagagagagtgggggagtgcgggtcggagcttctgcgcggaccggggcggggcacctctggagggcaggggcctctggtctctgggaggggagggaattgaccaatggggagagagcccatatttgctctcaggagcctgcaaattcctcagggctcagatatccgcccctgacaccattcctcccttcccccctccaccggccgcgggcataaaaggcgccaggtgagggcctcgccgctcctcccgcgaatcgcagcttctgagaccagggttgctccgtccgtgctccgcctcgccatgacttcctacagctatcgccagtcgtcggccacgtcgtccttcggaggcctgggcggcggctc

SEQ ID NO: 18064 - DNA, 2300 bp, Homo sapien
gccaggagcccagcccttctgtatcaacttgacggagtgagggaggcagtcaagcgtgtgtggggaccactccaggcacagcagctagtgctgatgatcatcctaacacacagtgccttgagcagaggagtgacaggccacttgatgagaggctgcgaggctaggagcagaaacagagagcccagtgtgcagggaggtgaagagcccctggcactcagagtgaagacggtcagaggtggctggattctgagcatcatctgaagaaagcactgccaggagttcttgaaggactgcatattgtaaaagaaagaagtcaaggaggtctctgagtcttttgtctgagcaactggatgataggagttgtgggatggaagttggctggtatgaaagatggggagtcagtttcagacatgctaaatttacattgtcttttggacacccaaacggagatcttttagaagtctcatgccagtaatcacacttgttactaaattctgtagccatcagggtttttgcctgcaaagatcagaagccacactctgaagccagtttgttaaaggatgttaggtaagccatagactctccaggaagaactcgcagggaacaggtttgaaggcagcacagcccggagcaagcccacccttgccactatctgcaggtgcagattcagtagcccattccacttggcgctatcaccaaacttgtggcgctgctgcttctagaaactggaggtctgcagttattccttccagcatggattccaccaggtgcctccttttttaggacattagctcccagcttacaggcttctgtgatgtgtgtgactgatcatgtgtctgtgctccagctgcaagggaggctggaaggctaatttctggcttctatagccaggaggcacagacactagagggagaattcctttacaaaggagctgggcgactaagtgtaagaacaattgtccacaaggaaggagcaaggactaacactgattgcgcacttaataatgttccaggcacttcgctaagcattttatataagataagggaataaaccctgtatctaatcttcacagcaatctcatgatgctgtccttgttttcattttacacatgaggaaacatttttagcgagattaaatgacttgctgaaaaggtcacacagctcctaagcagtggagacaggaactgaatctaggaagtctgatccaaggacactgggattatgaagcccattttatagatgaggaaattctaagttagagaggttaagtaacttgtccaaggtcacatagcttgtaaatgatcaagcaaagatataattccagtttggcctggctccaaagctggtgctctgtttcctgttctctatggccttgagcaattattgagccccaaaagaatacagaggctagcaaatcccataagcagaggcttgtcaaaaataccttatgtgggctgggtgtggcggctcatgtctgtattcccagcactttgagaggctgaggtaggaggatcacttgaagccagaaatttgagatcagcctgggcaacagagcaagaccccgcatctaccaaaaaaagaaaaaaatattggacaggcatggtggcatgcacctgttgtcctaattactgggttacttgggaggctgaggtgggaggatcacttgagcccagaagtttgaggctgctgtgaaccatgatcataccactgtactccagccagggcaacagaatgagactgtctctaaattaaaaaaaaaaaaagaaaaagaaaagaaaaaaaaaggaaagaaaaaaggcttacgtgggaagcaatgactgtatgaagagctgagaataagacgagtgacctggcacaggtagattctttcctgggatctcagattccccctagaaggccctgggtctgtgcttgtcaaaggaaggaatgggtgaatgagcaaacggtgcagggaggaggatgacagaggagggtctctattattattcatatcattctaacagtccgcaaatatctacccaaatctctagagctttgatctcgagtccccgccccttggagtgtcctgcttggttgtggaggctgctgctgctgctgcagcctcttggcttcaggctctgaagcactccccatctcaggcccaaacaggaataaaatcagttcctttctctgttcctcttactagactgagatccactgggattgtctgagggaattcttgtgaaaccagaaagaaagttcaagaaatgatgcaacaacaacaaaataaaacccaggagaaatagtacgacaagaagttaa

SEQ ID NO: 18065 - DNA, 2300 bp, Homo sapien
caccacgcctggctaattttttgtatttttagtagagacggggctttgccatgttgcccagcctgatctcaaactcctgagctcaggcaatctgcccacctcggcttcccaaagtgctgggattacgggcatgggtcaccgtgtccggccacttcagtattatttaacagtcgttgagcatcacttaaaagcccctcaagaaataccagtcatctatgccgcctacacatgcaggcattgcctctttcaggcccttgctgaccatcctggcaaagagatttccttacctttagctccttttcagcaatgagcatctttctggaatgactggtatctttcctccatctcatatgtgttgggatcctacttggatcagacgtggcgctgggcactggggcaagtacgagatgagcaggggcaggcttagaggagctctggctgcccgcagagagaggtttcttctattttttcagtacatgaacttttattcttcatcaagtgcttcatagagccatggagataagtgtgagacactataacagagcacagtacaaacccagggggcgagagtacaggaagacagaggaggaggcagtcagagggatcactgaagatgggtagttttctgtgtagaaaagatggagtgggacatttcaatcagaggtcactgcaagtgccgagtattcttagagggaagaagggcatttgggaagcattgtatgattttctagggggcctgggggatggtgggagatggggcaggaatggaaagatggggatgggcctaagtgccaggaatgtggaccttatcttgagggtggagggaaactggtgaagtgatgttgtcagacatggattagaaaggtcattctggctgctgtgcaggaagagtcagagggaatgggagaggcagggagggcagttagaagctcatggctaaggtctgggtgagggcagagttgacggggagttagggggctgaatgatcagaggcagccgaacattttttgagcacttctcacaagtctcttactaggagatggacaaactactcatatcaacctttttcaaaggaggaaactgaggcacagagtatttaagtaacttatcaaagtcacacagctcatgagcatggagctggatggagctcaggtaggcacaccggagaccagcgtgttctttaccattctcttctggccttggtgaccagaatatacatccaagtttctgccaggagcagggataagtcacacatctctgtatcccctccagagttctgtatggggtaggcactcaaccaaggtcaattccacactccctgctgggccctgcaaaaggaccaggacagtcgagccacttgcattcctgctcagaggtcagctagtgtcagcaccaccttgtttatttggtccactttcttcttccagccctttgtgtgaactctgcacgctgtcctttagtgctggcgggcatggtctcggtgcccgtctccatcttttggccatgccagttgcctcctcatcaaactggagtctcccaagggcagagcctcagactctgcagaaagcctcgaggatcctgagagcaaggattggttttcatccatttggggctccacaagggcaggggctgtgcctccccctcctctatgataactccttagtaccctagttccagctcagctcacagtgggcacaaggtgggagcaaggaggcatgagggatgcagacagtaatgaccatcaatagaggaggtgactctgctcttgggagtttctatcccgaaggggctaagtctcagacctgctgttggggccagccagagaccagactccaggatctaggtcacccctgtggcagtacagctgatttatggtggccctgacagcctaatgtcatcaaattatcccacacaatggagagaggctgggccgcccccaggcagtcaccaaaggacgctgagcctggggcagcccggctgcctccgtatcccagacctccctcgggtctgtggggggaggctggcacagaacaagggcacacccaggcgtgccaccttcagctgggggtataagtaggcagccccagggacagctctgtaccctgcacttgggagccggtagcactcctatcactgcttctcaacccgtgagctaccagctgtgtcatgagctgcagacagttctcctcgtcctacttgagccgcagcggcgggggtggcgggggcggcctgggcagcgggggcagcataaggtcttcctacagccgcttcagctcctcagggggcggtggaggaggggg

SEQ ID NO: 18066 - DNA, 2300 bp, Homo sapien
gattgactgatctgtcattggttccctgccatctttatcttttggattcccctcggaggagggggaggaaggagtttcttttgggttttattgaatgaaatgaaagggaaagtagagctgttcctatgtcccgggctccggagcttctattcctgatccctgcataagaaggagacatggtggtggtggtggtgggtgggggtggtggggcacagaggaagccggtactgggctctgcaccccattcccgctcccagatccctctggacacagcatttttctccagtgagcacagcctccccttgccccacagccaacagcaacatgcctcccaacaaaagcatctgtccctcagccaaaacccctgttgcctctctctggggaaattgtagggctgggccagggtggggggaccattctctgcagggagattaggagtgtctgtcaggggcgggtggagcggggtggggccctggcttactcacatccttgagagtcctttgctggcagatttggggagcccacagctcagatgtctgtctcagcattgtcttccaagctcctaggccacagtagtggggggctcccttctctggcttcttctttggtgacagtcaaggtggggttgggggtgacagagggtcctgcttctcttctaggagcagttgatcccaggaagagcattggagcctccagcaggggctgttggggcctgtctgaggagataggatgcgtcaggcagccccagacacgatcacattcctctcaacatgcctgccggggtctgtggagcctaggggctgatgggagggtggggtgggggccggaagggtttgctttgggaggttgtctgggagattgctgaagttttgatatacacacctccaaagcaggaccaagtggactcctagaaatgtcccctgacccttggggcttcaggagtcagggaccctcgtgtccacctcagccttgcccttggcacagcccagctccactccagcctctactcctccccagaacatctcctgggccagttccacaaggggctcaaacgagggcgcctgagctgcccacactagggatgttctgggggtctgagaagatatctggggctggaagaataaaaggcccccctaggcctgttcctggatgcagctccagccactttggggctaagcctgggctataacaatgccaacgaggcttcttgccatactcggtttacaaaaccctttcacatacattgtcgcattggattctcagagctgactgcactaagcagaatagatggtatgactcccactttgcagatgagaacactgaggctcagagaagtgccaagccctgggtcacagaggcgtaaatggcagagccaggacccacctgactccaggctgtttcctggcctccatgaggccacctgccctatggtgtggtggatgtgagatcctcaccatagggaggagattagggtctgtgctcagggctggggagagctgcctggatttctctttgatggggatgttggggtgggaaccacgatacacctgactagctgggtgtatttcagggatgggacagacttctcagcacagcatgggaggtcaggcctgggagggccccccagacctccttgtctctaatagagggtcatggtgagggaggcctgtctgtgcccaaggtgaccttgccatgccggtgctttccagccgggtatccatcccctgcagcagcaggcttcctctacgtggatgttaaaggcccattcagttcatggagagctagcaggtaactaggtttaaggtgcagaggccctgctctctgtcaccctggctaagcccagtgcgcgggttcctgagggctgggactcccagggtccgatgggaaagtgtagcctgcaggcccacacctccccctgtgaatcacgcctggcgggacaagaaagcccaaaacactccaaacaatgagtttccagtaaaatatgacagacatgatgaggcggatgagaggagggacctggctgggagttggcgctagcctgtgggtgatgaaagccaaggggaatggaaagtgccagacccgccccctacccacgagtataaagcactcgcatccctttccaatttacccgagcaccttctcttcactcagccaactgctcgctcgctcacctccctcctctgcaccatgaccacctgcagccgccagttcacctcctccagctccatgaagggctcctgcggcatcgggggcggcatcgggggcggctccagccgcatctcctccgtcctggccggagg

SEQ ID NO: 18067 - DNA, 2300 bp, Homo sapien
gaagagttctcagagactctactacgagagtcggtgtgaatcctggcttgggagttagagctggctcgagtctctgctctctcacttttgtgctgcttaacctggataaggctttcgctctctccagttggggtattaatagcctttggtgaccttgaagaccattttcagttctgagggtgatgggtctgtggatggaccagaactccaggcccaacctgacacctgaacactgaggtttttgtccaagattccggggtcccctttgcccctttttggggtaggggtgaggagtgtcaggttccctctcccaggtttgactctgaagggatgtgcatccgttctgctcttacctctgggatgaatgaccaggggagatgtagcagtgacaaaaccctggttctgctgagacaaggaattgcctgccccagtggagctcaggcagaagcaggctgtctctgggctcctcacctcaacagagacactgcagagcaaggccagtggccagcaccgagggatgccccacagcaccctgaggaggccccgtcttggtgcccagacccctccatcctccctccagtcctcggtgctggaccaggctctcaggccaaggccatgcccaccatgggcagacctcctgccagtgatcgtggggaggtgggtgagagttgggtatactggccccgcctgcaggcatggtgggagcctggagagggccagagttctgggttctagttgcagctctgcagcttaaagcagagtgactttgagtgaatctctacgctcacagaactgtatggcacacactgggctctccatgcatgcctgagtgggcccataaccagtgctctcccccagctcagctggatgaatggagctgccaggcctagcctgggatctgtggacacaggagagagaactgctgggaacggatccccggctagtcctgtttctacagggtagggggggactctgaggcccaggtggggtcaggggtcatacctggctgtagtggcaggatggggctccctcccaccagcctgcaggtggggtgcctgtgattaggagagggcggtagaggagtggcagagctaggtgtggggctgtggtgttcttcagctgggagtgtggggggcgcagggccctgcttaggggtgcgggatggtgccagtgtgtagaggtgagtgtgaggagcaggtggctggaggggcaggatggggaggctgaggggcagggctggccctcggggaagggccggtggggtccttcgcgcatgtttctttgtggctagtggtgtgtcatccccttttacagatgagaaaactgaggaccaaggggctataggaccagcctgtgctgtacagttggtaagggcagagcagggactcagtgccgcctgtctagctccatggccagtgctgtttgtatggtgcacacacttctggagatcccgggggctcaaggcagcctctggaactggaattagatccaagaggggaaagagagttataggatttttagaacagaagggactctgcagtcacccagtccagcctggtcactgaggggaaacaggcccagaggtgggaggtggggagcctcaggccacacagcaagcagagtgaagacaggaactctgcccctgcccagagtgggacatgtgggatccccacaactgctccccaagacagcccaggatggcatcactgagctctctttcagccaaggctgtcactgtggggcagggagttcttctgaagggctgactcactgcctggggacgcagttgccacaaagccacctgtgccaaggcccgactggccccgagggctccaggaaagggagcctgattccccaccgcctagcctgagtcaccaccgaactcgcatttctgtgtttttctctcggccccacacccccaaagctgggtgggaactctgagccggcacacagcagagttgatcctgggctgaataatccagagtgaggagttggacgggaccgggagtgatgaaatccagaggggaacctggagtcagcagttaggagggccccgccttccccagctgcatataaaggtctctggggttggaggcagccacagcacgctctcagccttcctgagcacctttccttctttcagccaactgctcactcgctcacctccctccttggcaccatgaccacctgcagccgccagttcacctcctccagctccatgaagggctcctgcggcatcggaggcggcatcgggggcggctccagccgcatctcctccgtcctggccggagggtcctgcc

SEQ ID NO: 18068 - DNA, 2300 bp, Homo sapien
gctcctgcctgatgttccctgtgcctccctcctccatcgcctgcagccacagtgaccagccaccaggtgtgccatcgtggaggaagtccaggttggagaggtggtcttcttctgtgagcaggtccacttctccacccactgagacccctttctgtctgcgacagccccacctcgagggccacggcacagccatcagctccagctcccagcatgctactgccacgccccgagtgtccgtctgggccccggtgcatggcctgttgtctttctgtatctactttctgcagcccctcactgaggaggcctcctgggtttgtccagtgcctactattaaagctttgctccaagttcaatgcctcgtgtgatctgatctgctcattggtttggggcagtgtgggctgagggactgggggaggtggagtttattgagtgtttgggtatgggcttgtcacctgccaatctgttctgcccactccatccaggcctggggctcctggaaagatgagaggggaggaggcggaaagattaagggtggagggatgggacagccccttgtattgggaaaagtttctaagaatcagcccctgagtccctgtcacctgtggctggtccctgggagggccacacagactttccaaggatggtgcctgttggggagcactccctgcctcagcccagggcgggttcaagagcagaaggagaggggcttggtggggaggggcttctgaaggagtggtccatggcattgatgagtgagagggcatggcagtgacgcagccagcccaggaaaccagaccggctctgccccagctcggggtgtgtgtggggcggggtggccgctgtgcgtgtacgcgtagggggcatcctgtttgctttggtggcttggcagccactgggctattgaggaatgtctctcggctgctggcggggccgtctgggcctgtctgggaagtggaagccatcggcagtctgaaacatgaccacattccacccagcgggcctggcgggaccctgggacccagggccgggcttggggtggtgggcagggcagggtggggctgtggggtggggcacatggcccacctgaggagccacatcttggggagcctggagtgggaagggggctggctggggtctctgtaagagcctcttcttgggcaatgtcctttaggtttcctgtgggctgagacctgagataaatacccgtcacctgaccctgaggtctcttggggtacagaagggtgaggggagtggaagggggcatccccctctcagttggcacagcccaccatttccccatcctatagctgagcccctgtttgcccaccccagcctggagtgtaaacctggggaaaggtttacacgaagagactgggttagcaaggatttctagggatggggcagggtcagaagctgactggatggaactgtagcccctagagtgcattcctgggtgtcaggctctgcagaaggggccagtgtggacacggcacccctctggagccccaatttctttatctgtgatgtgggttggtctccgaggcttgatggcatttctatgctgtgaggtgggcctggtgggtttgggctcagtttccaaggcaggataggctctcggtctcctctttctcttcagcacccagccccggggccagcaccgtgggtggagcagtgtggggtgaaagacagcaactttggcgggggggtcagctgacactgcaacccatttccccaccagacagggttgaggcgggccaggctggggtggtggctgcctgggagggcctggggacggtgacgtcctgccttctcctcttctccgtattaggtcatgggaaagcatagctggagggcccgcctgaatcacaggtgacgggcctgagaccagaggcacgcacacgcacggcactcagcacgaggatttggagaaatgaggcaaattcctgatgatgggcggggagggggcccccagccacctgggagctggcaggtggccagtggtgatgaaagcccaggggaatggaaacagaggagcaagcctgttgtaatcgctacgcccacttggtggcctataaaggaagcgggcgaaccccggcagccctacacaacttggggcccctctcctctccagcccttctcctgtgtgcctgcctcctgccgccgccaccatgaccacctccatccgccagttcacctcctccagctccatcaagggctcctccggcctggggggcggctcgtcccgcacctcctgccggctgtctggcggcctgggtgccggctcctgcaggctgggatct

SEQ ID NO: 18069 - DNA, 2300 bp, Homo sapien
gtgactcactcctataatcccagcactttgggaggcagaggcaggaggactgcttgagcccaggagcctgagaccagcctgggtaatatagtgagaccccatctctatttaaagtaaaaaaaaatgcatctattgaacatctcctttccatagggccccagatcattctacgccctctgcctccccacaacatagtaggggtgatattaggggacactgtccccaaaccctagctctgctcaaattccaggcaggtcctgtctgtgctgcgctctccagcatgctggcttttctgcactctctgcagaggagactgagggggagtcaaggtggggctggcacccagggcactgggggaagcttcaagttctcccagccacctccctgggcctccccctctcccacctgcgctgggctccagcagcctctggggctggaagagccattggacctctccttctttacccctttgtcttccatgggggccaagctgctgccgctgccggggctgcaggcctgggctgccccttgcgggtgccagggatctctccctgctgggggtggaggacaggcccagacaggatgtgccacagcccagaggacctctgtgtggccctccagccggcccctgtcaagccttcctccctggctgggagagtgggagctgccgaggccctggcttcaggcccggctctgatgccaacattgggttgcccgactgcccgctgctcaagcaccctgtgtcttggtgtcctcaaggcactgttgtgagggtctcaggaggaatgtttgcattttcctagccctggccagggagtggccccacgctctggagggccagggaggccttcctggggtcccacttctatctctgctgagatctgagctgtgccctcctgcccggctggcccagctggcccggcctgtcctcagcatgtgaggcttctctgggttgggggctagagggggattcacaggcagtagagcctctaacgagcagtagcaaaggggcctggggggggggtcagtggcgtggggaaactgaggcccagagaggaagaggagcaggctcgcggcccaaagcctgtcaggggtgaggaagcttgtgggggctaaatggtggtattgggggttggaggccttggtgattttagaggcagaaagaagagtaataaactctctgctccttcaaattgggcctcaagactaaggtctgggtactctggaagtggggttcccaggcagggtgagcactggcggtgtgggctctacggggaggcagaggggtggtggcaccccacgacctggccccctccctagggccctggctttgccccacatttgctgctggaaggcggggcagtcccttttgtgagcccagagtgaggcccacctgggtagcccagctggcctaggggaggatggggcctgggaagggaggggttgttaggagaggatggggatggggagggtcttggtttcgtgtctcttcgtgtgtgagtgcctgctggtgcagtcttgactctggcggctcaggtgagcacgggttttactgggtctctctcctccccgaagacagtcctggattgccaggaagtccttccagatgtctaacctcgtgctcatggtggtctgaccttgctctctagccttggttttgaacctccccccatccccgcccagcaccttcacaggctgggcgggagcagtaaaatcagggctcaaccgctctcttccagatagctcctgccattcccagctggcacagtccccagctggcactttccgtgagagaccacccactatctgagcaggaagtctttccagcagtgtggtctcatctgggagctctgggccacatggaaaacccaactccctccctgtccccgtatgcgggcagagagcccaggccacccatgcacttctctcccctctcctgttccgcgggccctggctgccctgggaagctccacattcagacaggcctggtgcagacgccggtgtcctggcagcacctaaatcattagtgccgcggagattaggatactaatctccttgttgggtggagcggtgccagccaccagcctgcggatcatgctgctcttttgcaggggccgttcctcggggcatgacgctggctcctgcacagatcctgctcctctgtggccttcctgggctgccctcccctcctccgggactgctctggactgacattgctcaggttcgggtgaggagggaggctgccctaaccctttggcctcagacccctgctcccagccccacctctgcttcctgttttg

SEQ ID NO: 18070 - DNA, 2300 bp, Homo sapien
ccgcctctcagtaattctttttttttgttgctgttgttgagatggagttttgctttgttgcccagactggagtgcagtggcacaatctcagctcactgtaacctccgcctcctgggttcaagtgattctcctgcctcagcctcccaagtagctgggattacaggctcttgccatcacacctggctaatttttttttttttttgagacggggtcttgctctgtctcccaggcaggagtgcagtggcgcgatctcggctcactgcaagctccgcctcccaggttcatgccattctcctgcctcaggctcctgagtagctgggactacaggcgcccgccaccatgcccggctaatttttttttgttttttagtagagatggggtttcactgtgttagccaggatggtctcgatctcctgacctcgtgatccacttgcctcggcctcccaaagtgctgggattacaggcttgaggcatcgcgcccggcccacacctggctaattttagtatttttagtaaagatggggtttcaccatgttggccaggctggtcttgaactcctgacctcaggtgatccacctggctcagcctcccaaagtgctgggattacaggcgtgagccactgcgcctggccccgcctcccaataattctaacacgagtgtgagaggctagcacctctggtgctagaatgagctaggggagtgcgttcattttccattactgctgtaacaaattatcaaaaacttgggggattaaagcaacacacatttatcctcttacaattctgaagccagaggtccaacatgggtcttagggtgctaagactgaggtgtcagcagggctgtgttccttctgcaggctccaggagagacttgttccttgcctttttcggcttctggaggctgccgcactccttggctcagggccgcgcgtcagtctgacctctgcttctctggttatgtctccttctcgggcattgactcctgtctccttcctgttaagatcccttgtgaaccacagcctcacatccgcaaagtcctttttgccctataaggtgcatatttccaggttctggggattcagatatggacatatttggggtttattattttttagcttttattttttgagacggagtctcgctctgtcgcccaggctggagtgcagtggcgcgatcgatcttggtttactgcaagctccgcctcccaggttcacaccattgtcctgcctcagcctccccagtagctgggaccacaggcacccgccaccacgcccggctaattttttgtgtttttagtagagacagggtttcactgtgttagccaggatggtctccatctcctgacctcgtgatctgcccacctcggcctcccaaagtgctgagattacaggcttgagccatcgcacccagcatatttggggtttattattctgcctaccacaggcagggcaggatgacttctcatggcagggaggctttgcccagccagcttttggagtcaccgaagctttattgaatcactagttactacaaggcctgtgacagctacatattgactcatttaatctcatgaagagtttgttacaaaagtctagtcctggctgggcttggtggctcacacccataatcccagcactttgggaggctgaggtgggtggatcgcctgaggtcaggagtttgagaccagcctggccaacatggtgaaacccagtctctactaaaaatagaaaaaattagctgggcgcggtggtgggcacttgtaatcccagctactctggagactgaggcaggagagtcgcttgaacccaggaggcggaggttgcagtgagccgagatcaagccattgcactccagcctgggcaacaagagtgaaactccgtctcaaaaaaaaaaaaaaaagtctagtcctttcattctgcagaggaggagggtttgagcctaaaagaagaaaaatgacttgcccaagttgggcaagagtccagatttgaccccaggttcttggacttggagctctttgcatgacatcatagagtgtgatcatagctaacacaatgcctgaccctgtggttgtgaagattagaaactctggtccctctccatgaaactttgctgaaaaaagtgcgtcaaccagaaacactcaataacaaggctcccagggaccctgggttctgaggcagagatggcagggaccacagtgctgcaggagtttagtggagggagcttgctcctggctggctggagggcagctcagcttcctggatggaggaagcaggcctgtatggcgggctggggctcaggcag

SEQ ID NO: 18071 - DNA, 2300 bp, Homo sapien
cacatatatacacacactcatatacatatatatatatatacacacacatacacatatatatatcaggtacacctagcatttcctccctcagagtttttctgagttttctggtgggcacatgccctgccccacagtggactccttcctaccctctgtcagccagaatgctgcctccccagaggccttctctgaccaccccatctgaaggagcctggccctttcacatcaccctgtttacctcctttttggcacctctcacaatctgtcattatccttttttttttttttttgagacatagtcttgctctgtcgcccaggctggagtgcaatggcgccatcttggctcactgcagtctcctcttcccgggttcaaataattattgtgcctcggcctcccgagtagctgggactacaggcacacgccaccacgcccagctaatttttgtatttttagtagagacagggtttcaccatattggccaggctggtctcgaactcctgacctcgggtgatccgcccacctcagcctcccaaagtgctgggattacaggcataagccacagcgcccagcctcattatcttattatttgtttagtggctctctctcccgctggccttcaactccacaagggcagtgaccctgactgtcagggacataaaccagcagtccatgggcatgcatatttttgtttggcttgcagtgttgtatcaaaaattcaatttattcctgtaatcccagcactttggaaggccgaggcaggcagatcacctgaggtcaggagttcaagaccagcctggccaacatggtgaaaacccatctctactaaaaatatttttaaaaaactagccgggcgtggtggtggatgcctgtaaccccaactactcgggaggctgaggcagaagaattgcttgaacccaggagacggaggttacagtgagccgacacagtgccactgcactccagcctcggcgacaaagtgagactctgtctcaaaaaaaaaatcaatttattggcaatatttaaaaatcaagagattttatgtaaacacctggatttcctggcactcttgaaaaagatctagcacaatgggctggaggtgagcggccactgcagcccgtagttcttactccagcccccagtccaccccattacatcacacttggctgtttgcactccttgatcctacttacctgcctatccccggaggcctttgagtctaaaattcctggtctcttttcaccactctacttacccctacaactgagtgttgaaataaataaactgaaagcaagaaaggttgactgttttgaaggaaatatttcatctaaactctaggaaggctctactccacacaagctgtgccacatgaaggacgccctctggtgccagaattattctcgggggggcccagaaccagttactataccttgaactcatgccaatgagctgggcacactttttccttagatggattaatctaatctaaatgaaaattttagatcggattaacccactttagaataaatctaaatggcaatctaaattatgcggttaccgttttgattatattattgtatgttgattaatcaaagtgccgccctaaatcccgctgtgactccgtgggtagtagggtgggtaggtaggtgggtttgacacaacggggatttctcgtgtttgggaggctcatcatctaaatcctctctaaggagtgttcatttaccatatgaaactccccttttcgagaagacagggatgcaacagggtcaagaaggtggaacgtaccaaaggacacagtgcgtaggcgcgctcgaaacctgggccggtattctcggcacccagacaccgtccactcgcactgcgcaggctccgagacagatcaagctttccctccccctcccagctctcctagagtcaagaggacgccctcctgccgcagacttcctgcgcaagcgccatcccatgtccccgcctccaaaccaattggaagcggcgccgcctgggcgcttggggcacgacgctgtgggtggggtcaggacgtgagggcagcgcgctggcgtcagaggcgcggctatataactaaacacaggcaccgcccctctgccccagtcactgagccgccgccgaggattcagcagcctcccccttgagccccctcgcttcccgacgttccgttcccccctgcccgccttctcccgccaccgccgccgccgccttccgcaggccgtttccaccgaggaaaaggaatcgtatcgtatgtccgctatccagaacctccactctttcggtaagctatgggaaa

SEQ ID NO: 18072 - DNA, 2300 bp, Homo sapien
gtaaacttagtagtcttgcattactcaatgacagggacatgttttgagaaacgcatcgttaggcgattttgtgttttctacgaacatcatcgtgtacttacgcacacctggatggcacagcctactacatgcctaggttatatgacacagcctgttgctcctaggctacaaacctgtacagcacgttactgtgctgaaattgtaggccaggggtgtcgtatcttttcacttccctgggccacactggaagaattgtcttgggccacacataaaatacaccaacaatagctgatgaactaaaaagaaaaaaaaaaaagtcaccaaacaaaactcatgttttagcaaaatttattagttcgtgttgggccacattcaaagccatccacacaagcttcttgtaggccattgtaacacaatgttaaaaggtacagtaaaaatacagtattataatcttattgtgtagcacggctgtgaggctcattgttgaatgaagcatccttaggcagcacgtgactgcatgcagatatgtgtgctgaaagaactttgcctttttaactaaattaatggacccaggaacagaacttggtcttttacttgccattcattgtccttcataagggatggcctcccaacacttaacttcagctcttcaaatacttgtcattaaaccttctaatactacaaacttactacccagagtatacacattcctagcgatttgtggatcttaacccacagcatgaatgcccttgttatagcccttgcatttactctccactctgcgcccttaaaccaaggctgttactactgagggggcgccaagatttccaagcaacccattctccaggacactgattaacagcacagcatgactctggctaaatgcttgcaaaaacagttgacctgctgggcatggtggctcatgcctgtaatcccagcactttgggaggccaagacaggcagatcacttgaggccaggtgttcaagaccagcctggccaacatggagaaaccctgtctctactaaaaatacaaaagttagctgggcatggtgcctgtaatcccagctactagggaggctgaggcacgacaattgcttgaacctgaggtggaggttgcagtgagccgagattgtgccactgcactccagcctgggcaacaagggcaaacctgtctcaaaaaacaaacgaacaaaaaaccagttgaccagagagggacaagctcataaaggtttttcttggccaaattcaggcccgttgagaagctgtgggtgtggacgaatcctccactgcccatttctatggttcctttatatgcacaagatcgactatatataaataatctgcaagtcaggtatttctgaaaacaagttttatttaaataagggtttaaatacattacacataacattaaaactgaaggggaaaaaaaaaccaaaaaccagtttgttacttcacatggcattgggcagctgctgctattaagttgcaagctctacagctagctacatgactgatggatcagtttgagatttgttcccttgtcaaaagtttaactctgatagaaggttggcctcacattctgatgtttggacatcccttagctaggatatgtctggtcgaacagacctttgtggcaagccagatgtcctatcacctcgctagcggtaagagggcctctttgagctctgtccacctagtcaggttggagacaccaggggatctaccaccaaaagctcccttctagtagtacagctggtgcttctgccttaccccatcctctcctctcagattcaccgaggactgttcaggtggtaacattctcttagggtagggaactctgcagagggagagctgaggaggttccggccatagttgtttgtaatcttagggctctgggcttggctgaaacatgacggtattgcttggtttcaggcttgacactgccaggcgcctattgcttgacctctgtttaaatgagggacttcaagactagacagcatggctcttttcagtttattgcatgaaggagttacactagtccaagttaaaagcggaccccaaatggttacattatacaagctgtgaggtttttaaacctgtgacaagggagagaagggaaattctactcattgcaaggaaatcctcacttaagcttcagtgagccacaagcacttaaaacccatgaaccttcagctgatcgtccttagccagtccaatctgaaaagacaaaagggcaaagttttaaatgggggacagggagagttaaagcctccatttctaatggcaacaaccctgtctt

SEQ ID NO: 18073 - DNA, 2300 bp, Homo sapien
ttctcctgcctcagtctcccgagtagctgggattacaggcgcccgccaccatgcccagctaatttttgtatttttagtagagtcaaggtttcaccatgttggccaggatggtctcgatctcttgacttcgtgatccacctgcctcagcctcccaaagtgctgggattacaggagtgagccaccaagcctggccaaatagtgacattctaaccattgcctatggaataggagacatgcttctatttgttgaaattgtcatccctcatgtaaccagcctggggaagaacattcaagggggcataaccccctccatgggcacaaactgagtcttgggctctggtacaaccagggttctactgaaaacttatcatttcccattagtgttaccatagcaacacgaatgtcttcattcattcccctagtgtatgaacagagctacactcaccccacctgttctcccaagccccctcaaagtcctttcatctctgagattctgtgattcaattaattatcaccaatgcctgcactgctttttgtcgttttcatttattccatctgctgagtcaccgtgtcctgctctagatgagagtggttattcacaacggttattcagccgtcagttgccatggacaccgcacagcctgcttccttcatcacccattaattctcagcaaggctggctgtaagcatgggtaccactgcagttacccaatacccaaggggatcaaactctcccagaaaaggtgggggcccaatgacgcatgaacaggagcaaaatctctgctctcaacagtggaaaagtaaaaaacagcctacggctcattacatctggtcaaaccatgtggaggcagcagtttatcaaataagtcaacaaggtaccattttgttttctggtccatctttggcaaatgctttagtctgtttgctaaccatttgaaggtatattttgatactgaaaagttgttggctgggcatggtggctcacgtctgtaatcccagaactttggcagactaagctgggccgatcatgaggtcaggagttcgagaccagcccgcccaacacgatgaaaccccatctctactaaaaatacaaaaaattagccaggcgtgggggcgtgcgcctgtaatcccagctactagggaggttgaggcagaagaatcgcttgaacccaggaggcggaggttccagtgagccgagatcacaccactgcactcctgcactccagcctggtgacagaactagactttgtctcaaaaaaaaaaaaaagttgttatgcagattactagctccccttgaaagcaaaatgaaggaggcttcaaaggcaggaccctccaggaattggttctgcatagggggtttgcaagtggtggtgcatgggcagctgacctagaagacacggggcagctacaagccaaacccagcccagcacagagggcctaaggagaagaaggcaccaagggtgttccatggtagggggagggtgaaaggacttcagaggtgaccaggatgtgagccactagaaggagagaacagggccatcagcccacaacccattgctcctggtaacacgttatgtttgcagagtccagtggaggggacggggaatcaatacatcaccccacattcacacgcttgccaaacatcagtggatggcgaaatccactttccctgaatctaagcccatcgggttcactccctcacctaccaccacccacaaaggtccctatgtagttcgagagataagtgccaggcctctgacccccaggatatggtgggaagcattgctcctgacccagggagcttggttcctgcccctcaggtacagctggagagctgccgccaccccgctccagcccctcaccatgaaggtcaactcccctatccttcccccacatcctggatgactgactgacactaaatgaaagggcggggcagggtgatgggctgtacctgtgccccaccccattcctctcgcctggactcatatggcagggtaggggcggggtggggggacagttgggagggaccttgagggctttataaggcaggcctggagcatcaagcagagcagagacctgagaggcaccaggcccagccgtggcaccacacacctcccagctctgcaggtgagaaaacccaggaggagaggggagaggctaggaagtgggttgacaggtcctctcccccatcaaggtaccaggccactggccagagtctggggctcaccccttggggtctccagagctgggaccctttctttatcccaggatggaactaggtcttggctccagtacctacc

SEQ ID NO: 18074 - DNA, 2300 bp, Homo sapien
acggggtttcactatgttggccaggctggtatcaaaatcctgacctcaggcgatccacccgcctaggcttcccaaagtgctgggattacaggtgtgagtcactgcgcccggccaattcttgtatttttttgtagcgaaagggttttgccatgttgcccaggttggcctcaaattcctgggctcaagcaattcaccctcctaagcctcccaaagtgctgggattataggtgtgagccacagcgcctagccttctttctgttttcattttgttacctctcgttatttcctcactcctctttggtctctctcaccccctctaccaagaccgctctttttttttttttttttttttttgagacaagtcttgctctgttgcccaggctggagtgcagtggtgcaatctcggctcactgaaacttctgcctcctgggttcaagcaattcccctgcctcagccttccaagtagctgggcttacaggcttgttccaccacaccgagctaatttttgtattttagtagagatggggtttcactatgttggctgggttggtctcaaactcctgacctcaggtgatccacctgccttggcttcccagagtgctaggattacaggtgtgagccactgtgcctggccccgcaagaccgctcttgccgaggccatgaccccagctcaccaaggttgcccatgaccccagtttgccaagctgagtctctgtcctcagtctttgcctggcccaacagcaccacccaacacaggtggccactctctacatgaaacattttctttactttctaggacccaactttcctggttttcctctacttcactgccccactcatcccagtcttcctttgatgcctcctcttcttctttctgccctctgaatcctagggggttagtcctgggcgctcttacctgtcttctctcagtctcttggggatctcaccagtctcatagctttaaatggtcatcaaagaacaatgactcctacatttaaatctccagcccggtctctcccctacattcagatttatacatctaattgtctacccaacatttccagtaggatacttaaaaaaaaagtattctatttatttatttattttgaggggtaggctcgctctgtagccccagctggagtgcattggcacaatttcggttcactgcaacctctaccttccaggttcaagcaattctcctgcctcagcctcttgagtagctgggactacaggcacacgccaccatgcttggctaatttttgtatttttagtagagacagggtttcaccaggtggccaggcttgtctggaactcctgacctcaggtgattcgcctgccccggcctcccaaagtgctgggattacaggcgtgagccactgcgcccggctacagggagacttttaagaggcgtctcccaaggagaacaggggttcgccagcatggcaagaggagggcaaagcgaactagggttggaggtgaagaacagttaatccaatcaaatggaagacgtcgagtggcgcgagcactggggtgtgagcgcgagggtcagggttgcagcgccaggcagggttgcagcgccaggcagggttgcagcgccaggcagggttgcagcgccaggcagggttgcagcacgttggaagcgcactggagtttggaatgtctctcccagtcaaccgggaaagacgcagcgctgccctaatgcactggccaccccagaccgtatgcacaacgttgggttggcagcttctacaccagggaaggcacccgaaaccccggcgcggcagctggggaggggctgcccccagccagggacccgcgagtgctggggcagccgcggctttgggcagaaccattctccggagatggagagggcagaaaaaatctttcgctcccatcccaactcggagccatccggaacttgcactcgcccttcttgccctgcttttcttactgtgctctgttccgtcaccactagctcccctcccgcgcggctctgagtcccgcttgccactagttgcttctcggcagcccccacccctacgcgtggtccggcccggcggctggcgcaggttataaaggtcccgccgcagcagcggacggcagactcgagatgcgcccgaagaggttgggccggtgctgcgcggggagccggctcggacccggggacccagcagcactcacctgtgcaccttcgccctcagccagtcccgctccggagccctctgcgcagccgcaggcacggggcactggacagagagtaggatcccgagccacctctggatcccagttcctctcggaag

SEQ ID NO: 18075 - DNA, 2300 bp, Homo sapien
tcccaggagtactccatctttcgggaaaaaaatcccaccccagcacaaagcctatgaaatgctatacaaatatgtgattactactttggggcaaggatgaataagcccaaagaagcatcatgcctgacgctgagttggctggccggtgaaggcgtctgtcccttcccttggtatccctatgacttacctgttggacaggtagggggaaggggagagtaatgagtctcacctgctcagagcaagggtggggcaagacacaccccatcccttccattggttttttccttagtcttactgacagagccttgtccaatcaggaggaagtaactttctatctgccaatagatgcaatgttaggatgagacctcaagttagagtccatccctagagccgactggcagtccccggggccaatggcaagcggataaacagaggcggccgtggaagaggactggaggcgaggctccgcccctccacgggacagtcaggcgagatagccagtgagctcgcaccagagggtgggcgtctcccccaggggcggagcttcgaggtggcgaggggcgtggcttggctgtcaggtctcttcgccttttgttcggttactgagttgctgccttggccagagtccggagcagccgccgcccgaccacgccgagctcagttcgctgtccgcgccggctcccaccccggcccgaccccgacccggcccggtcaggccccatactcaggtgcgggctatcgggggcgcaggtatcgttggggacagaggggtggcgagcggccgcggggccggtcccagccgtccctgggcaggtgagggccggtgccatcgagcgccaccctgcaccggcggcagggggcgcgctggggtcctgggcgcggcgacttgggggtcgcgcggttcgggccgagcgcgcctcggagctccgcgaaccagagatctgagcaaggcggggagggatccggacaggtgcctccggggtcgcgcctcccccggggcccgcgcagctcgcccgacgccgcgtccctgactctcgccctgggctggcgggggagactttgctctgcttcgactgcgtcccagggctcacgctgcagtcaggaatttaccgtttggggaacttgctgccgctggtctctttggggccaccctcaccccaccccacgcgtcatcctcgctttccctccctccctactcccccaggcctgggtggggccctattgtttgcgcccagcttgcccaactgtgggggccgagcgcacattttcccagcgactctggccccacctgccgagcaggtgagcgcacggagtccagaggccctgccctccagctcccagagcctcgtcgatactacctgcggcgcctccctccacgccggtgggagcccggctctggcttcttcagcggaggtgggatggagtgactggggggtgcagggctcggctcagtgtccagctggtgtctggcacccgtggctcgccctggggtctggggggtggggtctgtgcacggatgaagaattcagggtcacctggcccagtttccagtagctgtggctgccagagtgttggtaggggaacaggacccgtcttctctaacctcttattgttggaaaaaatcacccaaaacaaactttgcaggaggaagtattcacagcagctttatctgggggttttcccgtctccttgcccaaaacttcctttaggcttagggggtccttcctggtgcaaaaccccttcccccagccggcccctggctgaacctgggccggtgcctgggctccgaccctgtcttccctgcccccacattcatcctgttcgctgggccccaggggcctgaggtaggggccggggtggggggtggaaagtgctgagaggggaagcagcttcttccttctcttcctgcctcctgggaccaccacaccccctcagacaaggcctgcgtaagtggttgtctctcaagctctgccccctccccaggaatgggggtggggcagggctgggccaaactgaggaaggtggggggagtggttgttcttgtctttttttttttgcctctaccccatcccccacattacttagctggctggttattgaggcagaagcgcatgaggctgtgggacttgccttccatttgatttctgaattgtgaaggtgcatgctttctggaggcctgcacagacctttcccacccgctttcctgaaagaatttgacagggaaagtgagaccgcaggaaggctttttgggggaaggtttcttcaatgctagactctctcaggcagagctgcatcgggcc

SEQ ID NO: 18076 - DNA, 2300 bp, Homo sapien
cttctgcttatccttctatgagctctttgaaggttgggatcatttttatttcctgtgtcaccaggttttattttctgtgttcaccagtgcctaacatacagttgacaatgaatactcaagtgttgaatgaaggaatgtttgtagggcccttggcacaccatacagccacgagcagcattcatgtcatcaaccacagaaaggaagtgcccttgtcttcttaagctgcctgtgagaagtcctttttatttttttgagacagagtctcactctgtcacccaggctggagtgcaatggcatgatctcagctcactgcaacctctgcctcccgggttcacgccattctcctgcctcagcctcccgagtagctggcattacaggtgcccgctgccatgcctggctaatttctgtattttcagtagagatggggtttcaccatgtcggccaggctggtctcgaactcctgacctcaagtgatctgcccaccttggcctcccaaattgctgggattacaggcatgagccaccacgcctggccgagaagttctctctgatctctaccccaggctctcctatcgcagaggggtgtgctgcccggtttatttttttcttttcttttttttttttttgtttgagatggagtctcgctctgtcatgcccaggctggagtgcagtgacatggtctcggctcactgcaacctccgcctcccaggttcaagcaattctcctgcctcagtctcccaggcagctgggattatagttgcccgccaccacgctcggctaactttttgtattttttgtagagatggggcttcaccatattggccaggctggtgttgaactcccgacctcaggtgatccacccgcctttgcctcccaaaatgctgagattacaggagtgagccactgcgcctggcctgccccgtttctttcatgccagggctggatttccttcagatctgctgcttgatgtttccaagcccaccaaagcctcctgacaccaatactgtatttttgtgccaattaattgttctgtctctcctccaagtgtttgtgccttttctctgccccttccccattgccttgacattttatgtctatgctcctcttccatgaggggaacagctggtttgatggtccttcaaatgagaggaaggaggttctagcttggggtgtgccactttgtagttttgtgacttctctgaacttcggtttcttcatctttacaatgagggtcgttttctcatcctaactatttttcagagctgtcacaataattaaaaaaaaacataccgttaatttaaatttctaacctttagcagtttctgagtgctttcacaaacctgacctcatttaatccccacatactccagtgaggtagatatggctaatgtatccagtttacagaagaggagaaacagggtgaagtaacttgcctaaaatcataccaagtgggagaagaccaaacctggccttctaattctaaatcccaggagtactccatctttcgggaaaaaaatcccaccccagcacaaagcctatgaaatgctatacaaatatgtgattactactttggggcaaggatgaataagcccaaagaagcatcatgcctgacgctgagttggctggccggtgaaggcgtctgtcccttcccttggtatccctatgacttacctgttggacaggtagggggaaggggagagtaatgagtctcacctgctcagagcaagggtggggcaagacacaccccatcccttccattggttttttccttagtcttactgacagagccttgtccaatcaggaggaagtaactttctatctgccaatagatgcaatgttaggatgagacctcaagttagagtccatccctagagccgactggcagtccccggggccaatggcaagcggataaacagaggcggccgtggaagaggactggaggcgaggctccgcccctccacgggacagtcaggcgagatagccagtgagctcgcaccagagggtgggcgtctcccccaggggcggagcttcgaggtggcgaggggcgtggcttggctgtcaggtctcttcgccttttgttcggttactgagttgctgccttggccagagtccggagcagccgccgcccgaccacgccgagctcagttcgctgtccgcgccggctcccaccccggcccgaccccgacccggcccggtcaggccccatactcaggtgcgggctatcgggggcgcaggtatcgttggggacagaggggtggcgagcggccgcggggccggtcccagccgtccctgggcaggtga

SEQ ID NO: 18077 - DNA, 2300 bp, Homo sapien
ataggaggaaagtctaggggtggtgggaatatggggaaggcaccctgggagtctggggcaggtgagaggcttctgagtgagaacagacagcagcctcagggagaagaagagggtcttttgggcaaatgactagacaaccaacaactgcagagcacttgacagtttatttttatttttgaaacggagtttcactcttgcccaggctagagtgcaggggcacgatctcggctcactgcaaccgctgcctcccggattcaagtgattctcttagcctcctgagtagctgggattataggtgcctgccaccacacccagctagtttttgtatttttagtagagacggggtttcaccatgttggccaggctggtcttgaactcctgacctcaggtgatccactgcctcagcctcccaaagtgctgggattataggcatgagccaccatgaccggccaacacttgagagtttataagtcactttatcttatgtggtcctttcaccaacaccatgcagctggcattactggaccgatttttcagatggggaaactgaggcttatagggcaaggggctgttggtcttatgactaataaaaagtggcaccaggacttgtggctctcctcactggagagatcctggcatccactggggctggaatggacagcctccagtgttcctgcagctcggagatgccaagattcagacagagccaggagtcagagcagaggggctgagaacccaggggccaggagacccttcctgggtacacatagcagagaggctaagggcctctaattcactagagccatcattctccagctgtgtgagcttgagcaatttatctaacctctctgtgactcagatttcttgactgtaaaatggggatgacagtaataggtaggcatggctgggcacagtggttcacacttgtaatcccagcactttgggaggcccaggcaggcagatggcttgagcccaggagttcgagaccaacctgggcaacatgacaagaccccgtgtctacaaaaaatacaaaaagttagccaggcatggtggcgcgtgcctgtagtcccagctactggggagactgaggtgggaggattgcttgagcccaggaggcagaggctgtagtgagccgagatcacaccactgcactccaacctgggtgacagaacaagaccctgtctcaaaacaaacaaaaacatacaaaaaattagatgggtgtggtggtgcctgcttgtaatcccagctactcaggaggctgaggtgagaggatcacctaagcctgggagatcaagcttgaggtgaccataattgcaccactgcactctagccagggtgatagagtgagaccctgtttcaaaaacaataaaaagacaataacagtgaggcttagatgagttagtcagggcctggcatagggtaagtgcccactacatgctagctggcattatgcttgggtgggataaggagcccattaggtattctgggaggtggctgggtagcaggggtgctggactgaactggaagatggagttgactctgaaggggaagtgccagagcaattcctcacccctgtcctgctgcagtgaatgatgtgcgccaggctgcccgcagcgccgccagctacatgctcttcgaccccaaggacagcgtcatgcagcagaacctggtgtattaccggttccaccgggctcgctggggcctggaagaggaggacttccagccccgggaggtgggcactgctttctggggcacttgctggatatgcactttgtaaaaaatgaactcctggcggccgggcgcggtggctcatgcctgtaatcccagcactttgggaggctgaggcgggtggatcacgaggtcaggagatcaggaccatcctggctaacacggtgaaaccccgtctctactgaaaagaaaaaaaaattagccaggcatggtggtggacgcctgtagtaccaactactcgggaagctgaggcaggagaatggcgtgaacctgggaggcagagcttgcagtgagcggagatcgcgccactgcactccagtctgggtgacagagcgagactccgtctcaaaagaaaaataaataaataaataataaaaaataaactcctggcttccatggaaggcaggatgggaaatggaaagaaagaatatgagttgaggttagagtcctggcttcagagcccagccccactgctgtgtggtcctgggaagaccatggccctttcctaatctattgcctcacctgcaaaatggcagtgatactgccacctcaccagcagtgtccagacgagg

SEQ ID NO: 18078 - DNA, 2300 bp, Homo sapien
gccctctgcctggaaggcctatgaacccaagcttcccaaaccctttagggatgtcactgcctctactcactgatccagccccttggacactcccagctggggcccctgcacccagcgtctttctcaacagacaaggccttcctcccggctggctcctccgcattcgcagtgctccacgtgcatgaaggggacatctgccttaccgggccctgtgggtgagaggaccgcccaccgtggtctgggtggcagatacctgctatggccgggtagaagtccttgaagtccacctgctcatgggccccttcacagccggccaggcaccgggcaaagactgccaggtactctgacaaggcccgctccatgtcctccgtgctgctgcggaaatccccgctgttgtagagcttcacagcccggaggaacacggcctggaaggggcgtggcagggggagtcagggcgcccccaacatctcccctcctctactagccctcctctacaagcctcctcctgaccctccaccccacctcgtagggctgggcctctaggtccgtgagggactcgtcggcgacgtccagcatcccctgatagtagttgagatacttggcggtcagctcgtgcttcgggttcctctggaggaaggtgtaggccgccgccaccgccttctccagccggttagcctggtcggggggtagggggtgggggagcgggtcagcaagaccggagctcgcggccccgagcgcacggcgggcttcgtgccttgggtgaagataacgctccttcgaccgatctgtggggagccacgacgcccagcccgagacaggtccccgggtgggggcgggctcccaccttgaacagcgcgtagtgcaggtactggtagggcaggcggctctggaagtcacgcagcagctgccgcggcgggtagggcacctggaaggcgggcagcgtccgcttgcagcgccgcaggcaggcggctcgctccaggacgcggccgaagagccgcagctcgcaggcccactcgtctgcgcggccgccgtcgggatcgggcttggccgcgggcgcggggccgctgcagttggcgtggcagaaggcctcgctgtcgcgcaggagccggtgcagccgcagcgccgcctccaggtagcgcgcgctctcgcgccagctctctccctcgtactgctccagagcgtgcccgtacgccgcggccagcggcatcaggtcctcgggcgggaagccccggaagctgtacttctcgtactgcgccccggcgctgcccagcagcaaccacagcagcccccacgccacccgagccatgcccgccgcgccgccggctctccggagctgagctggctgccccgcggacggaaggggacagggccgggccccgggcgggcggcgcgcccgctgggtcttagcgccgggcacgaggcggcaaggtggggcggggcctgggtcacgacgtctcccctcttttcccagagggtccgatagtgtcgttaagtcctctccgtcggcccgggctcctgccttgggggtgtcccctaggtagagaatgcgtcggggagcgcttcccgccagagatgggaagcccaggaagcccctccccatgcaaacagtgcccccgcctgagatcaggacactgagtgagggccgcctcctctgcgctgcccatacgagaaggaagccctggagccgggccttccgtcgctgcgccctcctgcaccctccgagtgtctcccccgcccacgtcggaggcacacacctgctgtcacctgcacaccttgcgctgccaccaccccccactccatctccgtgcccgtcacatcccaagtcacaaagtccttctttcagtccagcttttgcgggaccaagctgctcttccctggagatgccttcccttggagtacagctggggtcacggatgagcacggagatgcctctcacactccgcggcttcaccacccacctggaggggactagaattcgaagtgcccgcgaaagaagcaaggttcatctccgcccggctttaggacccgggggctccggaaaaagtcattgaacttttttttttttttttcctttggtgtccactcagagttctcatctttcccgagcctctctccctggccaggccccaggtctcgcagccagggatggagatggggggagggggaacctagagttctttgtagtgcctccctcagactctaacacactcagcctggccccctcctcctattgcaaccccctcccccgctcctcccggccaggccagctcagtcttcccagcccccattccacgtggacc

SEQ ID NO: 18079 - DNA, 2300 bp, Homo sapien
cagaccaaaggcctgggtcagaccaggaggccaccttacaaaccccaaggctggcaaaaatgggcggcctgtgcctctggcctggtgtacctaaaatggagagagatgagggttccaggagaaccagagagggaggaatgaaattcctccaaggagcccagggtggcatgtccgactgtgtgacacgtagacagggcctccgcagggagccacgcgctacccccaggtccagccggctgtcttcttataatacccaccagcctttttccctgcccaccagccgctgaaaactcccaccccctccaaaaaaaagttctattccctcttctctgaccacaaaggcactgaaaacagtggaaccagaaggggagtcagggtgggtggaaaggtacggggtccaggctgatagaccatcccagggttcttaagcagcagggaccacccccttccccccaacactgtagatcagaacacccctctccatcaggtcattacatacagccctggtaactacacaaggcagttcaccttgattatcgagtcctttccgggatgtggagagcttgtgagaaagaaatgggatcctttgagaagtgagggtttggaagtgggggcaggagggtatctttggggagatgggtgtctgggaggccccaggggtgctgtctagggttagagtattgggatgcagagcttaaaagaggcaacaaggaaacaggaccccgggttcaggggacggagtggtgaatccgggggcgcccaaccggggttaccttgaatcaaacttcttgccatcttcaaaagtgccgttgtagtggtagcgcacaaaatcccccatctgcacttcccggggacaggccctggggatgtggtacctctcgatgaccacatcttccagggggcccccggccgggctggcgcggcccagccccctccccacggcctgcaccaccagtagcagcaactgcagcagggggagccggaggaggctgtggctgggggggcccgcggggaacatggtgcctggagttgggaccgccggcagtgagggcgagcgagggagtcgccaccaacctccttccccccgcctcccagaactggctccccctcttcctgtcctctttccctacccccgccctggctggtccacgtggaatgggggctgggaagactgagctggcctggccgggaggagcgggggagggggttgcaataggaggagggggccaggctgagtgtgttagagtctgagggaggcactacaaagaactctaggttccccctccccccatctccatccctggctgcgagacctggggcctggccagggagagaggctcgggaaagatgagaactctgagtggacaccaaaggaaaaaaaaaaaaaaaagttcaatgactttttccggagcccccgggtcctaaagccgggcggagatgaaccttgcttctttcgcgggcacttcgaattctagtcccctccaggtgggtggtgaagccgcggagtgtgagaggcatctccgtgctcatccgtgaccccagctgtactccaagggaaggcatctccagggaagagcagcttggtcccgcaaaagctggactgaaagaaggactttgtgacttgggatgtgacgggcacggagatggagtggggggtggtggcagcgcaaggtgtgcaggtgacagcaggtgtgtgcctccgacgtgggcgggggagacactcggagggtgcaggagggcgcagcgacggaaggcccggctccagggcttccttctcgtatgggcagcgcagaggaggcggccctcactcagtgtcctgatctcaggcgggggcactgtttgcatggggaggggcttcctgggcttcccatctctggcgggaagcgctccccgacgcattctctacctaggggacacccccaaggcaggagcccgggccgacggagaggacttaacgacactatcggaccctctgggaaaagaggggagacgtcgtgacccaggccccgccccaccttgccgcctcgtgcccggcgctaagacccagcgggcgcgccgcccgcccggggcccggccctgtccccttccgtccgcggggcagccagctcagctccggagagccggcggcgcggcgggcatggctcgggtggcgtgggggctgctgtggttgctgctgggcagcgccggggcgcagtacgagaagtacagcttccggggcttcccgcccgaggacctgatgccgctggccgcggcgtacgggcacgctctggagcagtacgagggagagagctggcgcgaga

SEQ ID NO: 18080 - DNA, 2300 bp, Homo sapien
ccatcagggatgacatcccctaaatcccaacccctgcctcactcctagcagtcaagggctcagggctgcacttctggctactaccctatatctgaatttgcccaccaagcagacaggttttaagtctggactgtttccttctcagtgttgttatgaaggcttaagctctgcattaagtttctacaagttccacagcatcaggtcatatggttttcctcagggtcaatgttaatgtgtgctgaactggctggaggactgccaggccctgtgagaagcctacgttcattcatccatgtccttggagtcctaacatcagccttagcaagtaggtcctgtttttgtctccacttttcagataaggaaagtgatgcctaaagagacaaaattctctgtccatggtcatagcctggatttgaaccagggtcttgggactcttggagtttgtaggcttaccccaatatatgcctgcctctaaagtcatggccactaatttcctgtgggctgagttgtgtgtttcagaggagggtctaagaaacactgacttctttcagtgtgctgtggggtctgtgtgtaactgggaccctagatttacccctgaggctggcatacagccctgccctgtccccgctaacaaaagtggacttgctggggcagaccaaaggcctgggtcagaccaggaggccaccttacaaaccccaaggctggcaaaaatgggcggcctgtgcctctggcctggtgtacctaaaatggagagagatgagggttccaggagaaccagagagggaggaatgaaattcctccaaggagcccagggtggcatgtccgactgtgtgacacgtagacagggcctccgcagggagccacgcgctacccccaggtccagccggctgtcttcttataatacccaccagcctttttccctgcccaccagccgctgaaaactcccaccccctccaaaaaaaagttctattccctcttctctgaccacaaaggcactgaaaacagtggaaccagaaggggagtcagggtgggtggaaaggtacggggtccaggctgatagaccatcccagggttcttaagcagcagggaccacccccttccccccaacactgtagatcagaacacccctctccatcaggtcattacatacagccctggtaactacacaaggcagttcaccttgattatcgagtcctttccgggatgtggagagcttgtgagaaagaaatgggatcctttgagaagtgagggtttggaagtgggggcaggagggtatctttggggagatgggtgtctgggaggccccaggggtgctgtctagggttagagtattgggatgcagagcttaaaagaggcaacaaggaaacaggaccccgggttcaggggacggagtggtgaatccgggggcgcccaaccggggttaccttgaatcaaacttcttgccatcttcaaaagtgccgttgtagtggtagcgcacaaaatcccccatctgcacttcccggggacaggccctggggatgtggtacctctcgatgaccacatcttccagggggcccccggccgggctggcgcggcccagccccctccccacggcctgcaccaccagtagcagcaactgcagcagggggagccggaggaggctgtggctgggggggcccgcggggaacatggtgcctggagttgggaccgccggcagtgagggcgagcgagggagtcgccaccaacctccttccccccgcctcccagaactggctccccctcttcctgtcctctttccctacccccgccctggctggtccacgtggaatgggggctgggaagactgagctggcctggccgggaggagcgggggagggggttgcaataggaggagggggccaggctgagtgtgttagagtctgagggaggcactacaaagaactctaggttccccctccccccatctccatccctggctgcgagacctggggcctggccagggagagaggctcgggaaagatgagaactctgagtggacaccaaaggaaaaaaaaaaaaaaaagttcaatgactttttccggagcccccgggtcctaaagccgggcggagatgaaccttgcttctttcgcgggcacttcgaattctagtcccctccaggtgggtggtgaagccgcggagtgtgagaggcatctccgtgctcatccgtgaccccagctgtactccaagggaaggcatctccagggaagagcagcttggtcccgcaaaagctggactgaaagaaggactttgtgacttgggatgtgacgggcacggagatggag

SEQ ID NO: 18081 - DNA, 2300 bp, Homo sapien
ggctggagtgcaatggagcaatctcaactcactgcaacctccgcctctgcctcccaggttcacgtgattctcctgcctcagcctcccgagtagctgggattacaggtgcacaccaccacacccggctaatttttttgtatttttagtagagaggggtttcactatgttggccagactggtcttgaaaaaggcgggtgggtattataagaagacagccagctggacctgggggtagggcatggctccctgcggaggccctgtctgtctacgtgtcacacagtcagacatgccaccccagcctcgtgatccgcccacctcggcctcccaaagtgctgggattacaggcgtaagccacggcgcccagccttaatttttcatattttagtagagatggcgtttcaccatgttgctcaggctggtcacaaacttctgagctcaggcaatccaccctcctcagcctcccaaagtgctagaattacaggcgtgagcccccgcgcccacacaacttagaaaactttttttttttttgagacagagtcttgctctgtcccccaggctggagtgcagtagcgcgatctctgctcactgcaagctccgcctcctgggttcacaccattctcctgcctcagcctcccgattagctgggactacaggcgcctccacaattttttttgtatttttagtagagacggggtttcaccatgttagccagggtggtctccatctcctgacctcatgatctgcccgcctcggcctcccaaagtgctgggattacaggcgtgagccactgcgctcggccagaaaactttcttaacccatggccccttcaattaaaaaaaaaaaaatctcccatcctcactttacttctgaaaacttaaaataaattaaaagtgtatataattggctgggcacagtggctcactcctgtaatcccagcactttgggaggcccaggcaggcagatcacttgaggccaagagtgaccagcctgggcaacatggcgaaagccctctctactaaaaatacaaaaattagccagatatggtggtgcatgcctgtgatcccagctgctacttcggaggctgaggcaggagaatcgcttaaacccgggaggtggaggttgcagtgagctgattgcaccactgcactccagcctgggtgacagagccgagactccatctccaaaaatacatatgtataagtaaaaataaatacattaattaaaagtgtataactaaaaacaaacaaaagccatggcacttttagaataggcttttttttttttttttttttttgagagggagtctcactctgtcgccaggctggagtccagtggcacgatttcggctcattgcaacctccgcctcccgggttcacgccattctcctgcctcagcctcctgagtaactgggactacaggcgcccgccaccacacctggctaatgttttgtatttttagtaaagacggggtttcactgtgttagccaggattgtagaataggccttttcaaaatgtgaaaccagctcccaccccacctctgctctcccgtcttttcttggagagccaatagtataatggcaaattttagaactcagctgactacatattagctgtgtgaccttgggcaaggcactgagtctctcaagtctccattgctctcattaagaaaaatgagaacaagaatgcccacctcacaggggagacaaagaagatacggaatgtaaaatgccaagcatttaatcccatatagtaatgctcctctgcccctccgtgctgtacgtaccactccccacttgctgtcagcaaatagtagcagccatcaggcccgggcatcccacccaaccccgtcccagggcaatagcagcccttgtcctcctcagggacttgcctttcacaacagtccgttctcttaaggtgggcgtcacggccgacctaggagggggacttgaaaaggaggtgagaagtgtgtgtgcgtatccacacctggctatagggaggggggattgtgtgcgtgtgtgcaggcacacctgtgcatctgtgccaccatgggcagtgtgtgtgtgtctgaggtcactgtatcccatctgtccctccccccccagctatgatcgcaacaccttggtggccatcgtggtgggtgtggggcgcctcatcactggcatggaccgaggcctcatgggcatgtgtgtcaacgagcggcgacgcctcattgtgcctccccacctgggctatgggagcatcggcctgggtgagaagggctggggcacaggccgggggtggaggagaccacgaggcagaat

SEQ ID NO: 18082 - DNA, 2300 bp, Homo sapien
gcatcggcctgggtgagaagggctggggcacaggccgggggtggaggagaccacgaggcagaatcagggatcctggggtgagaaaactgaagtgcggagatgaggagtgacttgcccaatgtcacactgtgcacgcagtatgaagagtggcagctctggctggggcagtagctgacatatatggtcccagagttttgggaggccgaggtgggaggattgcttgaacccaggagttccagaccagcctaggcaacatagtgagacctcgtctctacaaaaaataaaataaattatccaggtgtggtggtgtgtgcctgtagtcccaactactcagaaggctcaggtgggaggattgcttgaccccgggaggctgcagtgagccatgatcatgccactgaattccaccctgtgtgacagagcaaaacccctctttttttctttttctttttttttttgagacagcatctcactctgttgcacaggctggagtttagtggtgcgatctcggctcactgcaacctcagcctcctgggctcaagcagtcctccctctcagcctcccaaatagctgggactacaggtgcacaccaccacacgtggctaattttttgtatttttagtagagatggggtttcgccatgttgcgcaggctggtcttgaactcctgggctcaagccatccacctgccttggcctcccacagtgctgggataacaggcatgagccactgtgtctggccccctatctcttaaaaaaaaaaaacaaaaatagtggcatctctgtccctggtttgggtctcttggtgctgggatgagaggaaggggaataacagggccctggctgggatcgtggttggcagagcagaactctgagacctccacgctgctgcgctctcacagcggggctcattccaccggatgccaccctctacttcgatgtggttctgctggatgtgtggaacaaggaagacaccgtgcaggtgagcacattgctgcgcccgccccactgcccccgcatggtccaggacggcgactttgtccgctaccactacaatggcaccctgctggacggcacctccttcgacaccaggtgaggggctggaggggagccctgaggcactggggactgtggcatggggagcgggaatccggggcccagcctgcctctcccacctccacctcattttctgcagctacagtaagggcggcacttatgacacctacgtcggctctggttggctgatcaagggcatggaccaggggctgctgggcatgtgtcctggagagagaaggaagattatcatccctccattcctggcctatggcgagaaaggctatggtgagggtgggcaaggacacaaggggaaattccgcagaagagggaaaaaccaggcctccacatacagttgctcaggttgtatactgcacgagggcatccaaccaaggactcaaggtgggatgaaatctacccttggtgctactaagaaggggtgctttggccgggcgtggtggctcacgcttgtaatcccagcactttgggaagccaaggcgggaggatcacgaggtcaggagatcgagaccacggtgaaaccccgtctctactaaaaatacaaaaaaattagccgggcgtggtgggggcgcctgtagtcccagctactcggagaggctgaggcaggaaaatgacgtgaacccgggaggcggagcttgcagtgagccgagatcgcgccactgcactccagcctgggtgacagagcgagactctgtctcaaaaaaaaaaaaaaaaaaagaaggggtgctttattctgattcacacgaaggctcagtatgagccggtggtggccctggggaaaacccagctcaggtcttactggaggagcaagaagcagggctgctgatgggcgggaaagggctctggagagtggggctagtgtcttgcatggtgcccactgggccttcctgagtcaagaaggagcctcggcttgctccccaattttatggttcaagccctatcccttccccagggacagtgatccccccacaggcctcgctggtctttcacgtcctcctgattgacgtgcacaacccgaaggacgctgtccagctagagacgctggagctcccccccggctgtgtccgcagagccggggccggggacttcatgcgctaccactacaatggctccttgatggacggcaccctcttcgattccaggtcaggagggtcttgaggtgggagggcgggggctgggtgaaacgtggacgaagctgggggtcactctgagctgcctggaaggggagggcccc

SEQ ID NO: 18083 - DNA, 2300 bp, Homo sapien
cgaaccaacccgctctccttcaagctcccggccatttcttggggcagagagctaggaggggtccgcggcagagcaaagcgggaaggcccaatgggcaggaagcctctccagccgcccccagcccggccggcccccgcacgccccagaggtacctgtaaccggtctccgccgcccttgcggagggcgcccacgatctcctgcacccgcccaggctgccgcatcaggaccgtggccttcatcagggtgctcacctgtcccgagacccgagagaaccactgacccctgcgccacgctgggcccgaggggagcccggggctcgctcgggcgcgcgtgtgaggcggggccggggtgcgcgagggggcggctactggcctgggtgaagcggcggtgcctcggtgaccagctggggggctcgaagcgccccgggggtcggagtccgggcccgccccactccggacgcttcctccctcctcacctcctctgccatcccgttcgaggcctggtcggcggctcgcgggacaacgacagccccgcgaccgcactgcgcaggcgtcgcctcccgcctggagcccgggcgggggttggtggggccgggggcggggcgggggtggggccgagaatcgagcggtcccggagatggccgcgatccgggtgggcttgccggttgcgctaggcaaactggaggagggttctatttattatgaagagcagggtgaaggtcccaaggtgttggggttacgtgggtaggtagggttctgccactctttgtggaggaaaagccttgccaaacgtggtcatttccaggctgaaagtttgtgacaaaaacatgactggggctgggcgcggtggcccatacctgtaatcccaggactttgggaggccgaggcaggatgatcgcttgagccgaagagttcgagaccagcctgggcaatatgacgaaaccctgtctctacaaaaaatacaaaaattagccgggcatggtgacacgcacctgttgtagtcccagctactcgggaggctgaggcacgaggatcacttgagcccgggagatccaggctccagtaggccgagatcataccactgcactccaccctgggtgacagatgacaccctgtctcagaaacaaaaacagaaaaaccacacggctggatgggaggagagatgaaggagccataaactgaattctgttaatcacccagaaagggctctgttaactaggccattcctcattccagaagaaactgagtgactaacccatccagcgggctgggagacccgggacagctttctgaaatgtaatcagcgttggctgggcacggtgcggagcacttgtaatcccagctattcaggaggctgaggtgggaggatcacttaagcccaggaggtcgaggctgtagtgagttatgatcacaccactgcactccagcctgggtgagagagcgagacccgtccctagaaaaagaaagattttttttttgagatggagtctcactctgtcgccaggctggagtgcagtggagcgatctcggctcactacaacctccatctcctgggttgaagcgattctcctgcctcagcctcccaagtagctgggactacaggcatgtgccaccacgcccagctaatttttgtatttttagtagagacgaggtttcaccatgttggccaggatggccttgatctcttgaccttgtgatccatccacctcgtgctgggattacaggtgtgagccactgcgcccggcctaagaaagaaatttaatcagttttacttctcccttcagcctcaattgacttggatttccttgagttcggtgtctagggagccaagtgttgggctgtggaaggtagatgaatgctccagggatagagacctgtatcaggtgagtaacaggagctggaatcaataaacactcagatggtgctagtggtcatggttctgttttgggttcaaggacacagaaggaggtgtgaggtggttttcagcctaagtggggtggtaaggaggggagaaggaagaggacaagtccaggaggcagttccagaacctgagagcacaatcctgtgtgatctcactgcagggccaggattctggaacttgggttgcctgatagaccctatacaaaagatgtagtagggaaaaggagcgacagctggctaaaggggccccccacaaccctccccgacaccctaggaaagcagcctctctccgctgtcccagggtgccatggagatggagagcgcggcggcctccacacgtttccaccagcctcacatggagaggaagatgagtgcgatggc

SEQ ID NO: 18084 - DNA, 2300 bp, Homo sapien
gcccagcagttgaaggctgcagtgagctatgattgcatcactacactccagcctgggtgaaagaatgagagcttatctctaaaaaaaaaatttttttttaatttttaaggagcccagagctttgacagtgtccctaaagttaaggtgatggggtgggaaacagaaaatggatcaaagtgtctcaaaatgagcccaattacccctttggctgaatttggcaaccctgttatacctaaagtaggaactgcagctacagaggatgttcttatgggcactgaactcaaagccattgaccttgatgaccacgtcgcagagcttgccctctagtctaagctcgttgaagatctcacaggccatcgcactcatcttcctctccatgtgaggctggtggaaacgtgtggaggccgccgcgctctccatctccatggcaccctgggacagcggagagaggctgctttcctagggtgtcggggagggttgtggggggcccctttagccagctgtcgctccttttccctactacatcttttgtatagggtctatcaggcaacccaagttccagaatcctggccctgcagtgagatcacacaggattgtgctctcaggttctggaactgcctcctggacttgtcctcttccttctcccctccttaccaccccacttaggctgaaaaccacctcacacctccttctgtgtccttgaacccaaaacagaaccatgaccactagcaccatctgagtgtttattgattccagctcctgttactcacctgatacaggtctctatccctggagcattcatctaccttccacagcccaacacttggctccctagacaccgaactcaaggaaatccaagtcaattgaggctgaagggagaagtaaaactgattaaatttctttcttaggccgggcgcagtggctcacacctgtaatcccagcacgaggtggatggatcacaaggtcaagagatcaaggccatcctggccaacatggtgaaacctcgtctctactaaaaatacaaaaattagctgggcgtggtggcacatgcctgtagtcccagctacttgggaggctgaggcaggagaatcgcttcaacccaggagatggaggttgtagtgagccgagatcgctccactgcactccagcctggcgacagagtgagactccatctcaaaaaaaaaatctttctttttctagggacgggtctcgctctctcacccaggctggagtgcagtggtgtgatcataactcactacagcctcgacctcctgggcttaagtgatcctcccacctcagcctcctgaatagctgggattacaagtgctccgcaccgtgcccagccaacgctgattacatttcagaaagctgtcccgggtctcccagcccgctggatgggttagtcactcagtttcttctggaatgaggaatggcctagttaacagagccctttctgggtgattaacagaattcagtttatggctccttcatctctcctcccatccagccgtgtggtttttctgtttttgtttctgagacagggtgtcatctgtcacccagggtggagtgcagtggtatgatctcggcctactggagcctggatctcccgggctcaagtgatcctcgtgcctcagcctcccgagtagctgggactacaacaggtgcgtgtcaccatgcccggctaatttttgtattttttgtagagacagggtttcgtcatattgcccaggctggtctcgaactcttcggctcaagcgatcatcctgcctcggcctcccaaagtcctgggattacaggtatgggccaccgcgcccagccccagtcatgtttttgtcacaaactttcagcctggaaatgaccacgtttggcaaggcttttcctccacaaagagtggcagaaccctacctacccacgtaaccccaacaccttgggaccttcaccctgctcttcataataaatagaaccctcctccagtttgcctagcgcaaccggcaagcccacccggatcgcggccatctccgggaccgctcgattctcggccccacccccgccccgcccccggccccaccaacccccgcccgggctccaggcgggaggcgacgcctgcgcagtgcggtcgcggggctgtcgttgtcccgcgagccgccgaccaggcctcgaacgggatggcagaggaggtgaggagggaggaagcgtccggagtggggcgggcccggactccgacccccggggcgcttcgagccccccagctggtcaccgaggcaccgccgcttcacccaggccagtagccgccccctcgc

SEQ ID NO: 18085 - DNA, 2300 bp, Homo sapien
caatttttgtctttggtttgtttgtttgtgctagctaaataagatcttattaaggacaagtggaaaaatcaggtgtagttgcttagctgttttcctgccaacgagttatgactcctttgtcttgaggacttacgttttgaacatgctttaagcaccaattttatttgcacatttactttgatattctttttcattttttattaaatgattggttttggcaagatctgacttctgcattgagccctcatctgcaggaggcatgtgcaatagtgagactgaaatttgaatgaaaacactcaatatttcagcaagataatttgagaatgtttgcattgatattttcttatgtttatctagaaatgccagtttccttcctagaagatgtgactgatgagaaattttttactggctcatgcattttttgaatatttttcattagcagctgtttatagactttaagccttcaatctgaggtgacggtagttggcaaaagtatagatctttagctaattgactaaatacagagcaagttacatgtgtgaactttgtttctctaagaagaaaagtattagtgtagactgggaaatcaaaggcatttaaaattttttcaacatttttttcaggagttgcaggattatttgaggatatgttaatgagtgtaaataatgcctatgacaatcgacactcaatgccttccattttaatttttgctctaatgcatattatatagaatcttcattattccttttctctttttttttttttttttgctcatgttgcccaggctggagtgcagtggtgcaatctcggctcactgcaacctctgcctgccaggttcgagtgattctcttgcctcagcatcccgagtagctgggattacaggtacccaccatcacgcctggctaatttttgtgcttttagtagagacagggtttcaccatgttgaccaggctggtcttgaactcctgacctcaggtgatacgcccgcctcagcctcccaaagtgctgggattacaggcatgagccaccgtgcccagtccattattcttttctacaagaaactgtttttttccaaaatgggaaggaagtcacaatttagagaaatgttgctaaagagaagccttattatttctgattgttatattttatccagttgccccacactttcaaactttgcctgagcctaggataccaaatttgggtacataattttggcttttaaaggtttatgggctgggcacggtggctcatgactgtaatcccaacactttggaggaggctgaggtgggcagattttgagcccaagagttcaagaccagcctgggaaacatagcaagatcctgtctctacaaaaagtagaaaaattagctgagtgtggtagctggcacgtgcctgtagtccttcctacttgaagccaaggtgggaggatcaccagagcctgggaaggttgaggctgaaatgagctgtgatcatgccactctaccttgggtgacagagagacggtgtctcaaataaaaattaaaaagatcactgaagctatcttttatttagttttatacgttattcgaattatcttatgtctcctgagctttataaaagttagcactcaaattgacttttttttttttttgggccaggggatggggtcccactttgtcacccaggttggagtacagtggtatgatctcggctcactacaacctccacctcctggatgcaagccatcctgccacctcagcatacggagtagctgggactatgggcacgcgccaccacgcccagctaattttttttttgtatttttggtagagatggggtttctccatgttgccgaggctggtctccaactcctgggctcaggagatccacccgtatcagcctcccagggtgctaggattaggtgtgagccaccacgcccggcctcaaaataacttttttttttttttttgaaacagtcacgctttgtcgccctggctggagtgcagttgcgcagtctcagctcactgcaacctccacctcccgggttcatgtgattctcctgcctcagcctgctgagtagctgggattgcaggtgtgtaccaccacgcccggctaatttttgtatttttaatagagatggggtttcaccatgttggttaggctggtctcgaactcctgacctcgtgatccgcccacctcagcctctcaaagcgctgggattacaggcatgagccaccatgcccagccctcaaatttactcttaatgctcagttaatataaaggattcctaacagtttacaatgtggttttcttgtttttgt

SEQ ID NO: 18086 - DNA, 2300 bp, Homo sapien
gcgttaggatgttgctttctttttccattagttaaacatttttttctcctttggaggaagggaatgaaacatttatggcctcaagatactatacatttaaagcaccccaatgtctctctttttttttttttacttccctttcttcttccttatataacatgaagaacattgtattaatctgatttttaaagatctttttgtatgttacgtgttaagggcttgtttggtatcccactgaaatgttctgtgttgcagaccagagtctgtttatgtcagggggatggggccattgcatccttagccattgtcacaaaatatgtggagtagtaacttaatatgtaaagttgtaacatacatacatttaaaatggaaatgcagaaagctgtgaaatgtcttgtgtcttatgttctctgtatttatgcagctgatttgtctgtctgtaactgaagtgtgggtccaaggactcctaactactttgcatctgtaatccacaaagattctgggcagctgccacctcagtctcttctctgtattatcatagtctggtttaaataaactatatagtaacaatgaaggcatactgctggctcctggcatccatatcctttgatctgtattcctttgtaactgtacttttttccagacagggtatcactctgtcgccccagggctggagtacagtggcaccatcacagctcactgcagcctccatctcctgggctcaagcagtcctcccactccagcctcccaagtagctgggactacaggagcatgccaccactccaggctaacttttgtattttttgtggagataaggttctgctgtatttcccaggctcttctggaactcatggactcaagcaatccatcctccttggcctcccaaagtgctgttacaggcgtgagccactgtgcctggcctggcctgaactgtactaatagtttcagtatatatggttttaaaaatgctcatctacggtcaggcgtggtggctcatgcctgtaatcccagcactttgggaggctgaggcgggtggatcacgaggtcagcagatcgagaccatcctggctaacacggtgaaaccccgtctctattaaaaatacaaaaacttagccaggcatggtggcgggcgcctgtagtcccagctactccggaggctgaggcaggagaatggcgtgaacccgggaggcggaggttgcagtgagccgagacccgcgccactgcactccagcctgggcgacagagcgagactccgtctcaaaaaaaaaaaaaaaaaaaaaattagcctggagtggtggcgggcgcctgtagtcccagctactcgggaggctgaggcacaagaatcgcttgaacccgggcggcggaggttgcaataagcgaagagcgcgccactgcactccagcctgggcgacagagcgagactccgtctcaaaaaaaaaaaaaaaaaaaaaattagcctggagtggtggcgggcgcctgtagtcccagctactcgggaggctgaggcacaagaatcgcttgaacccgggcagcggaggttgcaataagcgaagagcgcgccactgcactccagcctgggcgacagagcgagactccgtctcaaaaaaaaaaaaaacaaaaaacccaaaacaaaacaaaaacaaaaagaaacaaaaaaaaaaacggataacgagtaactcattcatccctcatccacttagctggggctagatcttataaaaatcctgtattgccactcaaggctttaacaacaggtgatggtctaaggtggctttactcgacaaaatgactgcagagagcatgctacccactaaggaaaggaagcgagccatactcgcaccgacgccctgggggtaggcctggggcgaagtcttctggactgggcgactgttactgacggacctcaccaaggcaggcagagctgctggaggcgaggcggcgctgctggaggcgaggcggcgctgctggaggcgaggcggcgctgctggaggcgaggcggcgcatgtgcggccggcgggcgacctggccccgccccgcgcgcactatttaatcccagaatccctctgtgtcgtaccaacagccgcatcgttccgaggctgtggaggccgggcgcagcggcgtcaagatggcggctgcggcagtggcggcggcggcggcggcggccgcggctgcatctcttcaggtactggagatggagagcatggagacggccgccgccggctcggcaggactggccgccgaggtccgaggcagcggcacggtggacttcgggcctgggccggggatctctgcaatggagg

SEQ ID NO: 18087 - DNA, 2300 bp, Homo sapien
ttaacagtttttctgtcgttcgcttgcagtatggaaatagcagttgaaatgagatggaaaacttggtaactttggtttcccaaatgaatcttatgggtaaaagggccaaggtcaggttgaggggacatattggtcaccttcggctagataatacctcattccgcagtaacagacaactccaaaaatctcagtggcttaccacagcaaaggtttatgtctcattcacactacatccactgagggtttgctgtgcctgttctctgccatctgtgccgaaagaacagccgccgtctgggatgtgctggcctcacgtcagcaggataacagcaatggcaggaccacgtgcaggctcttaaagccttacatgattcaccttcactcacatttcattggccaccgcaagtcaagtggttatttgtgacatcactggggcaggaagagtgacaatatcaaggcatatctgattgggagagaccagtgggaaaggacagtaaatatttgaaacagtttatatagtctcacacagggccggtcatttctatgtccttatattgtgctttggttagaaaccaaagagcaagagatgaggtcactggcagctgctcagggccttatggggacagctccttagcagatccctttaccctgggctccttggctctgtagctccagcaacctcatttatttggtcactccactggcctaggtggggagtattaacatgaaggtcatgcatgtgattcaggacaccaccttctaggcagccaaacacttggccatctcaggtgatacccagaggttgcttgatgagcaaggaccagctcagaaccaagcagggaaggtgggtggctctgagggacattccatccaggacttgcttgactttgctcagccagccccagctcctgagcatataacaacatgcctatgtacagcacagagcctctttctaagataatgctagacttgcactccacactcactcattcactctttgagctccccgctttctagaggatgtactgacccagctatctcttttgctgagggctgaagttgctttggtattcgatttggtatgtccctagatcatcttcctccccaactgacaggtggttaatttcattcacagcaggtctagagttttccctaaaattttgggaatactttgcctccccacactaaacacgtgtttgtttagtgttgaactttgtcacagcttgagtaggcacagagctggcgggggcatggctggaggctggaacctaagactcttgagttggagagtggttaactttcagacctctgctgctcaacactgtaggacctggccagttccctgaacatctcagggctcagtttcttctttgcaacttaaaagtgagaacctaccaaggttgttttgtgtcccaattgagatatgagaggacttcaaaagccagcctcatggcattagcacaattggtgccacatggaatggtacacgtgggccaggttcctgaatcgccgctgggatatgtccagttctacctacctgtaacacaagtatgaacaaacacatcccagcagtgtgtgagtgttcctctgtaccgttgggttcatttctagataaacaacccagacatgcgagtgcagatcctcaaagattacgtcaggcagcacttccctgccactcctctgctcgattatgcactggaagtagagaagattaccacctcgaaggtaacaaagaaaaaacttcctaattccctcacgttggacaagtttattggaggaaacaggagccacgttacattttgattatgcagctaaaagcaaacctagttttctagaaatgttatttttgtttcataactaaatttaacagacatgcactaaatgtcaactaggtgttgggtactttgctagatgctgggaattgaactgagtcagacacagtgtcgaccagtggggctggtagaaggtttttaaatgatggtcacaattcgtagtaatagtagtgacagtggaaaattatgaagaaaaaatgagaaataatgataaatgctttgaatttttttgccttcccagaagccaaatcttatcctgaatgtagatggtctcatcggagtcgcatttgtagacatgcttagaaactgtgggtcctttactcggtgagcattgtagctgttttcttcttcattacgtttgttgatttttgttgtttcctccaaactataaaagtaatgcatactcataatagaatatttgaaaaataaggagaggtataaagaagaaaacaaaaattgcctgtaatgcta

SEQ ID NO: 18088 - DNA, 2300 bp, Homo sapien
gaagtttgtccctaggcagtgactgtgactatgggtgtttttggtacttggagacaccatcaagtgtcttcaaggcatgtggggccctgcgtagccccttcttcccaccccattaaggcaccttttcatgtgcttccagggaaagcggggaggggtcctaggatctgggacctggtaaagggggtaccccaagggcctacctgttgctgtctggtccccaggaagcctacattgcagacctcgatgccaaaagtggggcaagcctgaagctgaccttgctgaaccccaaagggaggatctggaccatggtggccgggggtggcgcctctgtcgtgtacaggtgaccgaagggggttgctgaagggatgccagcccagtctacccagcatcaacatgtgtgtagcctgggtgggtggggtcctgtcactttggtgtgggaatttggggcagaggaaagcagtggcatcccagagggcttcgagggatgttggtgagggcctgtcctgcacccagtgtcttctataaccttcttgtttgtgtcaaaatgaagctgttttatgagttttaattctgaaaattacgtgctccatacaaaggtacagaaaatgagctagaaagtgaaagttgcctggacatttccccatcctctccctgaccaggtcaccccagttagcaagttactgtatgtcctgtcaagcatatataaatatttatactctttgctttatagaatattaggatcatattctacaccctttacaataattagcagtttttttcactttaagcatggtagacacctgctcacttctagatgtgcaatctgccattcccttctgtgtgtgactggcactatttcctctggctgcagcacactttctcttgggtagcccgtcagggactcctgcagtgtgtgattttgcttgtctttgtgttagggaggtgctcattgttcattttacctgccattgtctgtccagggctccccagtgccttagggctggcagagtgcactgcccagaagagtctgatgtagcaccattaacctgcaggccagacttgcatgggaattgggggctggagatccaagaggccggttccacaggctaactccagtgttttgagggatccgtgtgtcctcccaggcaccaggctgccactccctgccccaagtgtgagagccatcactgacttctgtctccttggcagcgataccatctgtgatctagggggtgtcaacgagctggcaaactatggggagtactcaggcgcccccagcgagcagcagacctatgactatgccaagactatcctctccctcatgacccgagagaagcacccagatggtgagatacttgcacacacacatacctgtccccacttccccaggacagcccagcaggctgcaatgggacagcttcgtctgaggagtcaccaaggctgtgtgtggtcctttgcaacttgaggctaatcattgaactttggctctcagtttctctgactgcacagagggcagggaccacatctatcagtgggaggggactgagagggcaagaggtgatgtgtgataaagcccttcaaacaagtgcaggggaggaggtggctgtggcatgctcctgctacaattgcagtaaactcagtttatccgattgcgataaactctgattgcaataaactcagtgaccctcttatattacctggcctctgtgagtctcagtgcccctttaccacctgtgttttggagctctgcataccagttcttctttccttgagccagagagggagagagattccctccagagatatctagaaaccaacctggatttttggatgttggttaggagttatgtagtgctcctgtgggtttgttctgacccctgtctggtggcataggtaatggagagttgagctgataaagtggaatgtctggagagactgtcctactcactccccagtacctcctggcagatgggggaccctcattcaggggaacaagaacttcctcagttggattgctgggaagatgctcaagtctacctatgtaactgtttttgattctctcttactccaaatccaggcaagatcctcatcattggaggcagcatcgcaaacttcaccaacgtggctgccacgttcaaggtaacagttgcaacagtggtgcagtttctggggaaagtggtttggggaaagcagggaaggggccttgaaagcagagtttgagccagagccaagttaccatgagttcccaggtcaggtagggagctcttgccccagggtctcttaaaggggtggagaagaca

SEQ ID NO: 18089 - DNA, 2300 bp, Homo sapien
agttttggtcttgttgcccccgctagagtgcactggtgcgatctcggctcactgcaacctccgcctcctgggttcaagcgattctcctgcctccgcctcctgggttcaagcgattctcctgcctccgcctcctgggttcaagcgattctcctgactcagcctcctgagtagctgggattacaggcacctgccaccacgcccagctaattttttgtatttttagtagaaacagggtttcacctgttggccaggctggtctggaacgcttgacctcgaactcaggtgatctacccacctaggcctcccaaattgctgggattacaggcatgtgaatcaccacgcccggtctttttattttttgtagagatttgatggtggtggtgggggctcttaccatgttacccaggctgtacttgaacttctgggctctagcaatctgcctgacttggccttccaaaattctgggattacaggcatgagacagcatgccttgcctggagtgtatctttttttttttttttttttttttgagatagaatccttctctgtcacccaggttggagtgcagtggtgcaatctcacctcactgcaacctccacctcccgggtttaagcgattctcatgcctcaacctcaagagtagctgggatttataggcgtgtgccaccatgcctggctaatttttgtattttttgtagagatggggttttgccttgttggtcttgaactcctgacctcaagtgatcccccaccttggccttccaaagtgctgggattacaggtgtgagccaccaagactggccacccccattttaggacaagagaagagaggtgataaggaactgctatttcaaaaagatgaatgggagggaagggaccagaaagtgacatcatcagggaacacttgattcaggcatgggtagcaagttcagttaccttactcctggcagcaacaggattgggggagggggtcttggagaagattttgtctgcaaatgtcgcaacactgttgcagtgtgagtatgacccaaagtgcttggcagggggacaggcctgctgcttccctgcattctgggctgacctcttcacctgagtcggtcagtggacgcttttggcctccttcctggagctagacagctgttaggcttagggagcagctccggacctacagggttggggtgcaggtagggagggaggctgcagcatgtcagagtggtaaatacatgtcctgatttccaggactgatttcacatattctgccccacaagttcaccagcacctgtcagattggatgtcccagtttttggtttggaaaattcgatctgtctcaggtaatggagaagggggagacagcagttcattcattccagtgtctaagcctgtggttggtgggaacaagagactgtctgggatggctccagcccttcgctggaatctcgcattgaattcctagctccgccctgatccgtgctgaggcgagcaggtgagtgggacggacagcgctgtgcctgcaccctcctagccccacttgcttaccgcggcccctgccttatcccacactgggaagtatgctctgttagcctcggctcagccttgcctcatcggcccagtggggagagtccagggaggagagaggctccacgtgctaaaggaaagcggcctgccagacactgctgcttaaggagactgtctaagcaatcggattcggtgcggccgagatgcagacgtccgtttctcccaagggaaggagcaagggtactccaggtcccaaagctgcgttacagccagttgggctaatcctacccgcccctcccccaactccccgagtggcaatctgtccagcccctcaagcgatcaggccacaacccccagcaccgcgcgttctcctcccagcctagcccggcccatctccccacccggggccccgccccggccccgcaggctcccaagaggcggtggatgggccagcgggactacaagtcccagcaggccccggggcccgccctcgtggggcggagccaagccagcagcgaattgggaggagccctggcgctcaggctagggaacgcgtgtggccaatcgcggggccgttctcgccgcgagccgatgggggcggggaaaagtccggctgggccgggacaaaagccggatcccgggaagctaccggctgctggggtgctccggattttgcggggttcgtcgggcctgtggaagaagcgccgcgcacggacttcggcagaggtgagcacgggaggctgttttcgctggctggagcccgctcgccctaggagcttcctgcct

SEQ ID NO: 18090 - DNA, 2300 bp, Homo sapien
tcttaaaatcagcttgttaattactgaaaaaaaaaaaaggctgctggggccaggcacagtggctcatgcctgtaatcccagcactttgagaggctgaggcgggcagatcacctgaggtcaggagttcaagaccagcctggccaacatggtgaaacctcatctctactaaaaatacaaaaaattagctgggcatggtggtgtgcacctgtaatcccagctactcaggaggctaaggcaggagactagcttgaaaccgggaggcggagattgcagtgagccgagatcacatcactgcactccagcctgagtgacagagtgagactccaccataaaaaaaaaaaaaaaaaagctgctggagttctgattggaactgcactgaatctgtagatctcttccttgcaggaggtttttttctgattaatcctggttgctccagcaacagtcctcaactcatcaatgagcccaccttaacttagaacaggaccagtttcactgcaggtccttaaacctgttgctgctccttaaacaccctgtgaatgtacacacctccagcctttgcacatgttatttccttttttttttttttttttgagacagggtcttgctttgttacacaggctacaatgcagtggcccaaacatggctcactgcagcctcgacctcccacgctcaagtgatcctcctgcctcagcttcctgagtagctgggactacaggcacacgccaccacacccagctcacttttgtatttgtggtagagacagggcttcgccatgttgcccagactggtctcgaactcctgagctcaagcgatcctcccacctcagtctccaaagtactgggattacaggcatgagccaccacacctagctctcattctctacttacgtctactgggctccaccatactcaccctcagctcaaatattacccctctatgaacatgtctctaacccatcccagaccctggctgaatcattcatttgcctgggtttcacaccactttgtcctcatctccctcacaggcacacagaacttttaattactagttaatatcacttaagtggccgttacttgtttatacatctttctcccctattagataaaactccttcaagcagggaccatattatttcttatattttgaattaaaccttttgagataatcatagattcatatgcagttcataagaaataaatacaaaagagatcccatgtacccttttcccagtttctcccaatggtaacatccttaaaaactttagtacaataacacaaccagaaaattgacactgatacaatccactgatcttactcaaatatccccagttttacatgtatgccgtgtgtgtgtgtgtgtgtgtgcatttgtagttaaagacatctttttactatttaaactttaacaatgacattaggacgttttggaagtaacgtagtaaaggcagttaagcaagctacttagggtatcgttggagcccagaagaagcacctagtccacttttggaggagtggtgatggtgagggaatggggaaggacgtcagaatatgccttggtcaaggcccgctactagtagctgctcaaataactgcgttaaattatgttgaacccaacgttattttccatgttttcttatgcaaatcctcgcatccctgagtgttccattattttcatatttatttggcaggtggaacattcgaggctgggagcccttacatgccccgcgagaggtcacgcagttaggaagtgacaggagcgaagtcagcccaagtctgctgactccaagcccagtgctctctccccctaatggcggtacgccgtgcacatatccttaccacgtatgcctcatccctattcggaactttgcctccaaccctcttcctgttttcttggctgtcttacaagggagccttttcaggcagcaactccagagagaaccgccagagcgtgcaacagcaaacactaaccagcccagccgtcagccacgcaatcatcactccctggcccagtgcgcggcagaactggcgcaagcgcacgccggcaggttgtacccagaatccgggcccttgccagacgggggcggaaccggaagtcgctgtacatctcatggttgctaagaaacggagcttccacaaaccagatagaggttctccagcttttctttgattgtctctgctttagcgtctctaaatccggtcaccatgtcggaccccgaaggcgagaccttgcgaagcacctttccctcttatatggccgaaggcgagcggctctacctgtgcggggaattttctaaagccgcg

SEQ ID NO: 18091 - DNA, 2300 bp, Homo sapien
tttttttcttctttcttttttggagacgggtcttgctctgtcacccaggctgcagtgcagtggctggattttggctcatcacagccccaacctcctgggctcaagcgattcttctgcctcagcctccgggtagctgggactacaggcgccaaccaccacgcctggctaatttttgtatttttagtacagacagggtctcactgtgtcgcccaggctggtctggaactcctggcctcaagggatctgcctgcctcagcctcccaaagtgctgagattacaggcgtgagccaccgcacccggcctgacatgaacaaacttttatctttcttcccgcttttctcttatttttcagaagcttcactgtatgaagatagaataataacaagagagaaggacatgaggagagtgagagatgagcccgagaaggtggtgaagcagtgggaccatagtgaggatgagaaagagacagatgaggacgatgaggcttttggggaagctctgcagagcccagcaagcggaaagcagagtgtggaagcaggaaaagccagaagcgatttgggagcagttgccaagggcctgtcaggagaattaggcacaagatcaggagaaacaggcaggaagctactagaagctggcagaagagagtcaagagaaatttataggaggccttcgggagaattagagcaaagactctcaggagaattcagcagacaggaaccagaagaactaaagaaactttcagaagtgggcagaagagagccagaagaactgggaaaaacacaatttggagaaataggagaaacgaaaaaaacaggaaatgagatggaaaaggaatatgaatgaagccatcggtagagatgaggatcaggaagctggtgttcagagggatcatgggattttattaaactggattttcaagcgatttgtctgttataggaaaaatgagggttttacttctgctgctttccatcactattttgccattaaataggtgtctttcactcttgcaaaccctgagtctgtcactttgcctcttcacccctgcccattcttggaagagcatcgtggaagaaatgagaaaggtgccaagaagaaagggtttcaggagggtgaagatacgggcgctacagggaacaagaagtcacagggaggagaggggaaggcctgggaggagaggtgcttcccacacaccggtgactgactgagtccctccagtgcgcaggacagcggggaggctttatggatggaacagtggtggggcggccccagctgtcacaggtaggagaatgccgcaagccagaaccaagcgaatgctgggagtgaggccaaagataggggagtggcctgggagtcgggagggcagacagactccgcctctgacacctctgggtggcataatcaggtaaatcaggctctccaagctggcttctcctctgaacaatgggatacctgcctcaggggttgctgcgaggactgagtgcttagcacagcacttggacaggaaactcaaaaatccaacggagctctcagtggtttcacagaggaggtggcagctgaggatctggcctcagaggatgttaggatttcactccgttactcatctgtccctttggccattgccatcctggtctgtctccacagctcctagaaggaaaggtcggggctgagactgactttcggctggcacagggcctggacgaatgaggccagtgaggcatttcagatgcagagtttaccggaatgccagcaaattgcatgataatattttaatccaatgtggtaaaaaaaaaagtttttaattaatgcaaaagtccatgatgaataaaatatcaaaaattaaagacaggatccgactttgcacgaccctgcctcactcacttcctgctaatccacgggaccggggagggtgactgagttacccctcaacacgcagaaaaagctagtggccgctcagctcgcaggcgcagtgggtgggtgcgcgtggggagcaggcgcgcgcagggggcgggaccgggccgaggttcccgcgcgcggcgagagtttcgggttttggttcgcagcgcctgcgcgcagaggagacggcccgcccccagcccgcccgggtgcccgctccgccccccgggctatgtaaagcggccgggctcgggtcgtgccaccgctggactcccgtgtccctccgcgcaggcgggcggccccggagcgctggtgccggcagaggcggcgacggtggcgcccctcctcatcatggtgagaggccgggcggggccgggcacggggtagcaccagggcgggaaacgagt

SEQ ID NO: 18092 - DNA, 2300 bp, Homo sapien
aataaataactatgtttaagtctgtcgaaaacagtgctatatatgagaaacataaaagtctgataagaatgcatttttttctttttttaattgatttttttttttttgagacggagttttgctcttgttgcccaggctggagtgcaatggcatgatctcccctcaccacaacctctgcctcagcctcctgactagctgggattacagcatcaccccacctggctaatttttgtatttttagtagatggggtttcaccgtattagtcaggctggtttcgaactcctgacctcaggtaatccacccgccttggcctcccaaagtgctgggattacaggtgtgagccaccacgcccagtcttttttctttttttaattaatttttttctgtcactatttgaactacaggaataatgcatgttgtcatgtttaatttacagttacattttcttagtgacagataaaataatttgcattctgcaatcaatgacttttttttgagatggaatctcactttgtcacccaggctggagtgcaatggcccgatctcagctcactgcaacctccacctcctgagttcaagcgattctcctgcctcagcctcccgtgtaactgggattacatgtgtgtgccaccacgccccgctaatttttgtatttttagtagagacagggttctgccatgttggccatgctggtttcaaactcccgacctcagctgacccacctgcctcggcctcccaaagtgctgggattacaggtgtgagctactgcacccagcctaatgacacttaaattccatgaaataaggtagtttaccttattttgttgtactgctatcaaataccatgttttgtgtgatgtggtcacattacagcataacctattttattatatgtcttcaggttcatttactccaattttatgatagactatcctctaaggctgtgattgaagaaatgtatttgcttaagataggaggctatgaaatgaagtccaaaatagggacactctacatcagagatttacaatgagtagggtgagtttttaaaattacctatggccagcccggcacagtagctcacgcctgtaatcccagcactttgggaggccgaggtgggcggatcacgaggtcaggagatcgagaccatcgtggctaacagggtgaaaccccatctctactaaaaatacaaaaaaaaaacaacaattagccggatgtggtggtgggcacgtgtagtcccagcaactggtgaggctgaggcaggagaatggtgtgaactcaggaggcggagcttgcagtgagctgaggtcgcgccactacactccagcctgggcgacagagcgagattccgtctcaaaaaataaaaaataaataacctgtggccaaatccctatttacagtataaagaaccactgaactctttccaaatacaagtaaatctctacaattaatttaagctccgtctgcactgggaggaattttgtttcccattgtgcagctctttaatgatgtataagggttgatgatgcttagctttaaatatctaggaagaagtaggaacaacatgaaagctcaaaattaagaacagagactggactctggtgtcctggcttctctgatatcccaggggcctattacactttgtcaggcccctcagctcccagcagatcaggaacttgagatctggctgtggtaaccaccctcaagcttgataactattcattgcgtccgagtacttcttatatttcgaactcattagatagtaaaaatctcagaatcctgatttcagatctcatgaactaattctacatcaccgcctcaaattacccagcctgaagacacaacgggcttggtatgaagatataaagtatgttgcaaagagactgagggcactgtagatatcttgaacaaaagggtcagactaacccgcagctgataaggaaagggctccaaacttctagaaccttcttgtcaattctgctttaggattagaacaagtatgactacccacaactctgttccaaccccacttccaataatctggcctaactgttgccagaatctagagcgttctcgaaaaccactcactcagcagctcccttggctagtccgactggcaatctcgaaccactgcggctgcttcggagtgccaacagcgcccaagcagttgccctcttccttggtgcttaacttaagaaagaacagtgctgggaaggataaagatcacccaggaaggacaggggaagaggagtctgacgtagagaacacgagataagcccctcgctcttcctttttttctctgt

SEQ ID NO: 18093 - DNA, 2300 bp, Homo sapien
ttctccatgctggagtacattggtgtgatcatagctcactgcagcctctaactcctgggctcaagtgatcctcctgcctcagcctcccaaatagctgggactacagatgcatgccaccacacccagcctattccaagattttaaaaaatgatgagcgcctgaatcgggatggaaaggtggagatagatttgggaaatatttggtaggagaatcaacaaaacttggcaacaaattggaagccaagagtgagaatggtttaatccatttaacaagatacggaatttaggaaagataataattacatccaacatttgttttttctgttgttgaggtgtgggtagacaatgaaaaagttaaatttaaatatggtaagccttggggatttgtgaaacatacaagagatatccagtagatagttggatatacagctgtggaagctgaagaaaggtctaggttggagatatgaaaagttgagagtcatcaacagatggaagtaaagctgtgggaataaatgagttgccttagatagaacataaagtgggaagatggtgagacaggttggctagcattagactggactatgagccactggcaggcagggcaggtggtctgtaagtcttgtgccctcacaacctagcacagagtaggcgttttggaaagggctgagtgattggctcaacgaatgacccctcctttccaacctagtgagcttgtcctatccctccctactcagtggtcgctgtggtttcagctccctccacactgggataggcagagtatgagcattggcacatgctgttttcctggaacaaacaggtaaatccttttaaaattcctttgccctcttcttattttactcttagctttacattgtaaagctactcctcatactcctccaatttaaccccagaaagctccaatttaattcagctccacaaatagtcgtttgggtgagggaataacaacaaagacagttaaactgtgcccttgtcccctatgaattctcaatccagaccgcattcggcaaggcaagcgtgatgagtagagagtttatataagaggtgggagtactggggacacaagagcaaggacctcaccccgcgagcttccttataaactccagggcagggtctggggcgccatgtgtcagctttcctaggcttaatgctgagatggcactcccaggcggctgacatgaaaggagccttgtaaaagggtcagcgtcattagggtgatgaaccagttggtgtttggagatccggagtggatgaaaggcgcagggtgaagacgccctgcgttcccctggcttgactgggcagggcttccagagaacgatgaaagctgggggaactgagctcaaagtgtctcttgactttcccgggaagaagctgtggacacactccaaggtcggaaaggtagcagtggggactccttccctacagagtcttgggtcacctggtccccacgcaacccagactccacggagcctttcaggaagactctctaggattggaagttgctatggcaatgaggctcttggaatactgaaagcagccaagccctagagaggctaccaccggtacaccccgccttcccacccacgggtaaagtggcgccgcctacgcaccggcacagcccctgggctcccgccccggcgcggagaccaccgtggacatccgggggcgggaggccgctctggccccaagcggagcctctctctggtagacgagcccgagggagcccttctgggcgcggcgccgcggagctgctctatgctccaaccggaagtgctcttcaccgccggcctcccacccagctctctggtcccggcggtaagatggcggctgccgcggagtgcgatgtggtaatggcggcgaccgagccggagctgctcgacgaccaagaggcgaagaggtaaccgggtagcagggtagtagaggaggcgacctgcagctccgtggctcagggaaactcgttcctgccatgatgcagcccccagctgttgaggcgatgccccgccctccgcaaacacccccccatctgagatcaaggccggatggaccccctgaaggggcgctcttgggggtcggccttcctctcccgcttccgcctggcgtaggagctgaggcatggccttgttctccagctgagaggacgatcgtccttataggagaggccgagtctccgagggcaatttcagaggtctggtgcgaggtgggggaagcggcgcggcgtcgatgacgacttccttacatcgcccccgacccccgcgttctcttgttaacttctgtgcattgttg

SEQ ID NO: 18094 - DNA, 2300 bp, Homo sapien
ttagacatggtggctgcccatcagaactcacggtctagagaagctagatgtctaacaactactgaggtgctgtggagcacagcaaaagggcatttaacgttgagtcagcagacactgaagggcctgggggaaagggtgttctagggtggaggaaacggctacaagtcatggcattttctgaaactatgagaacttgggttcaatattggtggtagaaaggacctaaatattggtactcaaattaaattatttaaaaaaagaaacagataatcaaaggctttgtgtggtaggccaaagagatcaaattgacggcaatggaaagccattgccaatgaagagacatgatcagtccctgaggaaggtcactctggcagaagagggaagactgaacagagatgaaattagagaccgattaggagactattgatgtattccaagtttttttttctgttgttttgttgttgttgttgttgccgtttttgagacagggtcttgctcttttctccatgctggagtacattggtgtgatcatagctcactgcagcctctaactcctgggctcaagtgatcctcctgcctcagcctcccaaatagctgggactacagatgcatgccaccacacccagcctattccaagattttaaaaaatgatgagcgcctgaatcgggatggaaaggtggagatagatttgggaaatatttggtaggagaatcaacaaaacttggcaacaaattggaagccaagagtgagaatggtttaatccatttaacaagatacggaatttaggaaagataataattacatccaacatttgttttttctgttgttgaggtgtgggtagacaatgaaaaagttaaatttaaatatggtaagccttggggatttgtgaaacatacaagagatatccagtagatagttggatatacagctgtggaagctgaagaaaggtctaggttggagatatgaaaagttgagagtcatcaacagatggaagtaaagctgtgggaataaatgagttgccttagatagaacataaagtgggaagatggtgagacaggttggctagcattagactggactatgagccactggcaggcagggcaggtggtctgtaagtcttgtgccctcacaacctagcacagagtaggcgttttggaaagggctgagtgattggctcaacgaatgacccctcctttccaacctagtgagcttgtcctatccctccctactcagtggtcgctgtggtttcagctccctccacactgggataggcagagtatgagcattggcacatgctgttttcctggaacaaacaggtaaatccttttaaaattcctttgccctcttcttattttactcttagctttacattgtaaagctactcctcatactcctccaatttaaccccagaaagctccaatttaattcagctccacaaatagtcgtttgggtgagggaataacaacaaagacagttaaactgtgcccttgtcccctatgaattctcaatccagaccgcattcggcaaggcaagcgtgatgagtagagagtttatataagaggtgggagtactggggacacaagagcaaggacctcaccccgcgagcttccttataaactccagggcagggtctggggcgccatgtgtcagctttcctaggcttaatgctgagatggcactcccaggcggctgacatgaaaggagccttgtaaaagggtcagcgtcattagggtgatgaaccagttggtgtttggagatccggagtggatgaaaggcgcagggtgaagacgccctgcgttcccctggcttgactgggcagggcttccagagaacgatgaaagctgggggaactgagctcaaagtgtctcttgactttcccgggaagaagctgtggacacactccaaggtcggaaaggtagcagtggggactccttccctacagagtcttgggtcacctggtccccacgcaacccagactccacggagcctttcaggaagactctctaggattggaagttgctatggcaatgaggctcttggaatactgaaagcagccaagccctagagaggctaccaccggtacaccccgccttcccacccacgggtaaagtggcgccgcctacgcaccggcacagcccctgggctcccgccccggcgcggagaccaccgtggacatccgggggcgggaggccgctctggccccaagcggagcctctctctggtagacgagcccgagggagcccttctgggcgcggcgccgcggagctgctctatgctccaaccggaagtgctcttcaccg

SEQ ID NO: 18095 - DNA, 2300 bp, Homo sapien
ctgcgcctttcatccactccggatctccaaacaccaactggttcatcaccctaatgacgctgacccttttacaaggctcctttcatgtcagccgcctgggagtgccatctcagcattaagcctaggaaagctgacacatggcgccccagaccctgccctggagtttataaggaagctcgcggggtgaggtccttgctcttgtgtccccagtactcccacctcttatataaactctctactcatcacgcttgccttgccgaatgcggtctggattgagaattcataggggacaagggcacagtttaactgtctttgttgttattccctcacccaaacgactatttgtggagctgaattaaattggagctttctggggttaaattggaggagtatgaggagtagctttacaatgtaaagctaagagtaaaataagaagagggcaaaggaattttaaaaggatttacctgtttgttccaggaaaacagcatgtgccaatgctcatactctgcctatcccagtgtggagggagctgaaaccacagcgaccactgagtagggagggataggacaagctcactaggttggaaaggaggggtcattcgttgagccaatcactcagccctttccaaaacgcctactctgtgctaggttgtgagggcacaagacttacagaccacctgccctgcctgccagtggctcatagtccagtctaatgctagccaacctgtctcaccatcttcccactttatgttctatctaaggcaactcatttattcccacagctttacttccatctgttgatgactctcaacttttcatatctccaacctagacctttcttcagcttccacagctgtatatccaactatctactggatatctcttgtatgtttcacaaatccccaaggcttaccatatttaaatttaactttttcattgtctacccacacctcaacaacagaaaaaacaaatgttggatgtaattattatctttcctaaattccgtatcttgttaaatggattaaaccattctcactcttggcttccaatttgttgccaagttttgttgattctcctaccaaatatttcccaaatctatctccacctttccatcccgattcaggcgctcatcattttttaaaatcttggaataggctgggtgtggtggcatgcatctgtagtcccagctatttgggaggctgaggcaggaggatcacttgagcccaggagttagaggctgcagtgagctatgatcacaccaatgtactccagcatggagaaaagagcaagaccctgtctcaaaaacggcaacaacaacaacaacaaaacaacagaaaaaaaaacttggaatacatcaatagtctcctaatcggtctctaatttcatctctgttcagtcttccctcttctgccagagtgaccttcctcagggactgatcatgtctcttcattggcaatggctttccattgccgtcaatttgatctctttggcctaccacacaaagcctttgattatctgtttctttttttaaataatttaatttgagtaccaatatttaggtcctttctaccaccaatattgaacccaagttctcatagtttcagaaaatgccatgacttgtagccgtttcctccaccctagaacaccctttcccccaggcccttcagtgtctgctgactcaacgttaaatgcccttttgctgtgctccacagcacctcagtagttgttagacatctagcttctctagaccgtgagttctgatgggcagccaccatgtctaactcgtccactttctctcagtatatggccctgcaccaggcacagacagatgatgctcagaaaacatttgacgaataaatgattgagtaaacgaagagttactgtactctgatcgcctttacagagagaacatctgggcctcagagacaccagaacacccagcggcccgcgtccagggagtctagaaccttgggctcccgcgcacacccaggccaggtcctggccgtcattctcccgccggcctctgggggagctgcgcggtccgcgctctctctccgctgccggaattcgtcttgcctgacggaagctggggagcgggcaggcggcgggggcggggcctggaggagcctacaccgactctggaggaagactggagcctttgcggcggcgctgcccctcccctggtccccgcgagctcggagggcccggctggtgctgcgggggccccgggaggtacggacctgggaggcgaggctcgtccggcgctaggatcggcctccgcctccgggccgctttaggtgg

SEQ ID NO: 18096 - DNA, 2300 bp, Homo sapien
aggcgtgagccaccctgcctggccggtatctagtttttattcatctctcacaaacattcatcaacattcattatatctgtaagattcatccatgtttttgcgtgtagctgtagtttgttctctttcattgctgtgtagtactccaccgtggatcataccactatttttttttaatttaaattcttaaaagctctttttttttttgagacagggtctggctctgtcacccaggctggagtgcagtggtgtgacctaggctcatccacctccctggctctcaagcgattctcctgcctcagcctcccaagtagttggaactataggcatgtgccaccatgcctggctaatttttgtatttttagtacagatggtgtttcgctgtgtcacccagtctggtctcgaagtcctggactcaagtgatctgctaaccttggcctcccaaagtgttgggatcacaggcgtgagccactgcgtctggcccataccactgtgttttttttgtttgtttgtttgtttttgagatggcgtttcactctgtcgcccaggctggagtgcagtggtgtgatctcagttcactgtaacctccaccttgcaggttcaagcgattctcctgcctcagcctcccgagtagctgggattataggcatgtgccaccacgcctaattctgtatttttagtagagatagggtttcaccatgttggccaggccagtctcgaactcctgaccttaggtgatccacctgcctcggcctcccaaagtgctcggattacagacatgagccaccgtatccagcccgcaccattgttttttaaaaatctgctctcctgttggtggacatgtgggtagtttcagttttatgatattatgaatagtgttctctgaacattctagtacatcttttttggtgatctctgtttaagttagcaaataaggatatgagggctgtgagggctttctgagaccactgtgtccaacttaatgatttcagatggggaaactgaggcccaagtctgcccagtgagttggtagaaaagtggggcctggaattcagtgctggtcatccaccaggggccctccaggccacctccatggtcagagctgaagatcgtggtctgcagcgtcatcttgggtctcacactcttccatctctgcagcagttcctgcagcccctcctcttgggcctccactccagccaccaccaactccagaccctacatgcagggagccagcccactcagagctcttggatgctgcctcctcatcctcttcttcctcctgcccaccttgctccccagagcctgggagagaggcaccggggcctgagccagcggcagctgccgtgggaagcagcatgagtggggaaggcaggagtgagaaggggcacctctactgccccacgtgtaaggtgacagtgaactcggcctcccagcttcaggctcacaacacaggtcagtagtcccaggagctggagcccagggaaagggtgggacagaagctaagcctcgccagatgagggcaggcttgagttcctgggtgcttcgctcaagggttggatggcggaggctttgtgcttgtgtgttactgaacggacgtttctgggtcctcccattactccttggggaaggagaattgggaagagaagtctgaggcagcaagaactgaaggtcgctaaatctctgaagggtcactccacaggagacaggagacatctgcctctctccttagattacacccagaaggaaaggactgagatcaaagcaaaggggaaggcagctatttgtagtgcagaaaggcctttcataggaggggctggcatgaaaggacagaagctgggaggggaaaccacgtgtggctggagggcgatgtgtgcacagagcagccgtgaggcttacagggagagccaaattgcatgagtgtggagggggtctctgtggcccctgcaaccccttcctgctgctgagagactgccttcttccctctccaggagccaagcaccggtggatgatggaaggtcagcgaggggctccccggaggagccggggccgcccggtgtccaggggaggtgccggacacaaagccaagagagtcacagggggccggggcggccggcaggggcccagccctgccttccactgtgctctctgtcagctccaggtcaattcagagacccaactgaagcaggtgggagaagtgaggctgtgactggggttggagccaggggagggggttggggggcagggcagcagagggagggaccctgaagagagcaggcagggcacagcagagcaggctggagaag

SEQ ID NO: 18097 - DNA, 2300 bp, Homo sapien
tttttataagggtaccagtcactagatcaatcccacccgaacccagcatgacctcatcttaactaattttatcttcaaagaccctgtttccaaataaggtcacattctgaggttccagatagatgtgaattttgggggagacactattcaactaactacaacccctctgatggtaaatacgatcctgacttttctcagcatagatcagctttacctatttttggtgaaacatagagtgtgcaggggtttttttgtatctgttttgttttgtgggttttttttgttttgtttgtttgttttttgagacagagtctcgctctgtctcccaggctggagcacagcggtgcaatcttggctcactgcaacctctgcttcctgggttcaagccattctcctacctcagccttccaagtagctgggactacaggtacctgccaccacgtccagctaatttttgtatttttagtagaaacggggtttcaccatattggccaggctggtctcgaactcctgaccttgtgatccacccacctcggcctcccaaagtgctgggattacaggcgtgagccaccctgcctggccggtatctagtttttattcatctctcacaaacattcatcaacattcattatatctgtaagattcatccatgtttttgcgtgtagctgtagtttgttctctttcattgctgtgtagtactccaccgtggatcataccactatttttttttaatttaaattcttaaaagctctttttttttttgagacagggtctggctctgtcacccaggctggagtgcagtggtgtgacctaggctcatccacctccctggctctcaagcgattctcctgcctcagcctcccaagtagttggaactataggcatgtgccaccatgcctggctaatttttgtatttttagtacagatggtgtttcgctgtgtcacccagtctggtctcgaagtcctggactcaagtgatctgctaaccttggcctcccaaagtgttgggatcacaggcgtgagccactgcgtctggcccataccactgtgttttttttgtttgtttgtttgtttttgagatggcgtttcactctgtcgcccaggctggagtgcagtggtgtgatctcagttcactgtaacctccaccttgcaggttcaagcgattctcctgcctcagcctcccgagtagctgggattataggcatgtgccaccacgcctaattctgtatttttagtagagatagggtttcaccatgttggccaggccagtctcgaactcctgaccttaggtgatccacctgcctcggcctcccaaagtgctcggattacagacatgagccaccgtatccagcccgcaccattgttttttaaaaatctgctctcctgttggtggacatgtgggtagtttcagttttatgatattatgaatagtgttctctgaacattctagtacatcttttttggtgatctctgtttaagttagcaaataaggatatgagggctgtgagggctttctgagaccactgtgtccaacttaatgatttcagatggggaaactgaggcccaagtctgcccagtgagttggtagaaaagtggggcctggaattcagtgctggtcatccaccaggggccctccaggccacctccatggtcagagctgaagatcgtggtctgcagcgtcatcttgggtctcacactcttccatctctgcagcagttcctgcagcccctcctcttgggcctccactccagccaccaccaactccagaccctacatgcagggagccagcccactcagagctcttggatgctgcctcctcatcctcttcttcctcctgcccaccttgctccccagagcctgggagagaggcaccggggcctgagccagcggcagctgccgtgggaagcagcatgagtggggaaggcaggagtgagaaggggcacctctactgccccacgtgtaaggtgacagtgaactcggcctcccagcttcaggctcacaacacaggtcagtagtcccaggagctggagcccagggaaagggtgggacagaagctaagcctcgccagatgagggcaggcttgagttcctgggtgcttcgctcaagggttggatggcggaggctttgtgcttgtgtgttactgaacggacgtttctgggtcctcccattactccttggggaaggagaattgggaagagaagtctgaggcagcaagaactgaaggtcgctaaatctctgaagggtcactccacaggagacaggagacatctgcctctctccttagattacacccagaagga

SEQ ID NO: 18098 - DNA, 2300 bp, Homo sapien
tggaggctatctgtgggactgccgcccagccacaacatccaaaccctagcagcagggtttggaccatcaaatcaccaagcacttatgaccacaccagggtgagatctatggcgcgttagtttgttagggctcccataacaaagtgccacaggctgggtggcacttaaacagtagaagtttattgtctcagttctggatcctaaaagtccaagatcaatatgtgtcagcaaggctgggcgcagtggctcataactgtgatcccagcactttgggagcccgaggctggaggatctattcagcccaagtgtttgaggttacagtgagctatgatcacactgctccacttcagcctgggcaacagagcaagaccctgtctctctctcttttttttttttctgagacggagtcttgctctgttacctaggcttgagtgccatggcacgatctcgactcactgcaacctctgcctcccaggttcaagcaattctcttgcctcagcctcctgagtacctgggattacaggcacccaccaccgcgcctggctaatttttttgtatttttagtggagacagagtttcaccatgttggccaggctggtcttgaactcctgatctcgtgatccacccacctcggcctcccaaagtgctgggattacaggcgtgagccactgcgcccagtcaatttcaccttttcataaggacaccagtcatgtatattggattacgggcccaccctataccagtctggccttatcttaatagcatctgcaacgaccctatttccaaataaggtcatattctggaagtgctggggattaggatgtcaacatattgaattttgggggacataattcaaccaatatcacatagtgagtctcagatgttcagtgacagtctcatttcatggtctgggcacaatgacacccacactatggcacagctacactacgacatgcacacagagtgagtgacatagattcacctcaacaaacgatggggtaacagacatttgcagtgacccaggtacatcatgacagacacacagggtgacagacttcactcacaagctgcaagagacagacacactatgtgttaataacagctgattggccgggcaccagtggctcacgcttgtaatcccagcactttgggaggccgaggtgggcggatcacgaagtcaagagatcgagaccatcctggccaacattgtgaaaccctgtctccactaaaaatacaaaaattagctgggagtggtggcacgcgcctgtagtcccagctactcgggaggctgaggcaggagaatcacttgcacccgggaggcagaggttgcagtgagccaaaatagtgccactgcattccagcctgggcaacagtgtgagaccctgtctcaaacaaaacaaaacaaaacagacaaacaaacaaaaaacagctgattttgtagggcaccgagaagcatattacatagattatagatcagctcatctaatccccacaatgtgtgtatgacttaggaactgttattgatcactcccattctacagaggtatagacgaaggaactgagctcaggtcacacagccagtgagtgacagagctgagatttgaacccaggtatgaatcagcatggagctcctgctcttggctgggcatggtggctcatgcctgtaccccagcacttagggatgccgaggcgggcagaccacatgagcacagaagtttaagaccagcctgggcaacatagcgagaccctgtctctattgaaattttaaacatacataaaatttcaaagagctcctgcccttatcgctgtgctcctctgttccatccacacacagtccccacacttgtcacgacagacatgttatgtgggatcactgctcacaaaaaggacaagcagcttactgagaatgggggtggcatctggggactacaggcaggtttttggccttgggcttgtaaaattaattttccttgttcagatgcgggctccactgttggatgtatagtcttgtgaagacattgtgacatcactggactggtctgatctgcaaagtaagcatgggcctcagaacacaggaaatgccctctggggagatgagcttgtctgctcaggttgccataacaaagtaccacagactcagtggcttcgacagtggagatgtaatttctcacagttctggaggctagaagtccaagatcaaggtgtcaggagggttcatttcttcaaaggcctctcttcttggcttgaagatggtcttccctctataactatctgtgtctaaatttcctcttcttataaaga

SEQ ID NO: 18099 - DNA, 2300 bp, Homo sapien
gcacacgtgtgtagacctgttctacgtctacatgcatatatgtgtgtgagtgaggaggggcaggccaggatcttggctcttgctctgctcccttggggaagttatgaggggaggtgctggattaggtggcgttgcagctgggtgggtgcagccagtggctccgactgtggccctgggaggggttgttgttggggctggagttggcccctcagtcccttccttccctcagatcatcaagaagctgattgagcgcaaacaggcccagatccgcaaggtctacccggggctcagctgcttcaaggagggcgtgaggcagatccctgtggagagcgttcctggcattcgtaagcaggggtctcagttgcagggtagtgggggcacgatgcttggggtgtggactggcattcttagagacattctcccacttcccactttgcaggagagacaggctggaagccattggggaaggagaaggggtgagtgtcaaaggagccgggttgggggtggggcagagggacttggagcctcagacttggtgtctctcgccccaggaaggagctgaaggaccccgaccagctctacacaaccctcaaaaacctgctggcccaaatcaaggtggggagaccaggtttcctttccagggcccctgcaccaatggctgtggcctcttgatgcagtgtggggtgggtagtggtctcgggctggcgtgggcgcagcagggctgtccccagcccggctcttctctccagtctcaccccagtgcctggcccttcatggagcctgtgaagaagtcggaggcccctgactactacgaggtcatccgcttccccattggtgaggaccttccattccatccccttccctcctcttctgtccccacacctgctcctgccctcactgcgccctgcagccccagggggcccaccctggtggacagccctgccgtggtcttcagcctcttaaagctgtgctccgtctcctgctgccccagacctgaagaccatgactgagcggctgcgaagccgctactacgtgacccggaagctctttgtggccgacctgcagcgggtcatcgccaactgtcgcgagtacaaccccccggacagcgagtactgccgctgtgccagcgccctggagaagttcttctacttcaagctcaaggagggaggcctcattgacaagtaggcccatctttgggccgcagccctgacctggaatgtctccacctcggattctgatctgatccttagggggtgccctggccccacggacccgactcagcttgagacactccagccaagggtcctccggacccgatcctgcagctctttctggaccttcaggcacccccaagcgtgcagctctgtcccagccttcactgtgtgtgagaggtctcctgggttggggcccagcccctctagagtagctggtggccagggatgaaccttgcccagccgtggtggcccccaggcctggtccccaagagctttggaggcttggattcctgggcctggcccaggtggctgtttccctgaggaccagaactgctcattttagcttgagtgatggcttcaggggttggaagttcagcccaaactgaagggggccatgccttgtccagcactgttctgtcagtctcccccaggggtggggggtatggggaccattcattccctggcattaatcccttagagggaataataaagctttttatttctctgtgtgattgtttctttggtgtagtcccagccttagcaggctcaccttggcccccagggacctcttgcaaactggaggctgctctccccagcaagcctcaggcctggtcctgtgctcctggggtgatgggtcctacctgcctgcagccccccacctctccctcctccaggctgctcctgatccagatgccagggcagcaggggtcagaacctcctgccttcaccttaacctgggtggatgtggttacaactgactgcagaagggccagagcgtagaggatcctgtagcactgaaagagtgcttccctgttagcacacgtggttctttttcttggggcagggataggagattcgtaagtcggctcagctggctcctcccctcagtttcagtttccatttctgatttctgctctctgcgctgagcacagcggcaccaggctgagctaagcagggccgccttgggcaggcctacgtggtggtgcaggcgagacccaggctgggcaaggcgcaggtgtagcctgtgttactcccacccccccccacccccaccttttggccacagcaggcttctgatgagttttg

SEQ ID NO: 18100 - DNA, 2300 bp, Homo sapien
ggtaacggtgaaaatggaccggagaaggcttcgcccaaagacatgagtggtttcgtagcgggggaggctatcacagctctggggcacgtggcagtaacagagccatctggagtagggggtcgagggggagacaggtgagggcggaaaccactgaacccaggctgggcctgcaagcctcccccgaagctgcccctggctgggcctacctggtgtaattgaccttgtaggtagccacgtcctcagcctgagacctctgccgaaactgggcaggtgtctcaagcttccagtagttaaggcagagcaagaacatctttgagagctcgaacatcgtctgccgctcccggggagccaggtgactaaacttgtactgcacaaagttcagcacaccctgagaaggggtgggtgggggataaaaccaggaatgaggtgtgagcagcccgcagggccttcttagacaaaggaagatgctccctggccagggacaaggttctccttctcctctctctctcgggtgctctctatagaaaagctctgccccctccctaccaccatgcccaccctgaggttagcacaaaacacccttccttctctgaacctccccagtgttctcagcttgaggagaatggagaacacaggctccccactcctccaagctgtccccaattctcctatccgctatctccaattcccctatctcacctgctcaatattaggtttctcaaatggagggctgcccagggacccctccaccacaggccgggtcatctgcaggatgcatttccgcagtagctagagagaagaggaagggggcatagaggggaggggggcagagctgcagacaacccctcaaggccccacctccttcactcacaccctcctttagtggaagctcaccttgaagaggtagaaatagacctgcttggtgtctgtgtcctcttccttgtgaacagacatgaagagattctccacatccaccaccatccccagcagtcggtttatctcatcctctgacacattctccaagtgggatacgtggtcagctgcaagacagatggcagagttaggaaaaattgatagaagaaatcaacaaggcttcttgaccctcttcacagccaagcaagatacacactctgttcctccaaccagtgtgaccaacagtgagactgactgctccgatatcaaccgttgggttgcctgggcctgttctgggctgagagatttcctttctccccccttggtgcacacccccccccaacccaatccctccttcgaggcatctttgattttttcagagatgaagctttgtggcacttgtcaccctgtccaagcaggacccagcacctgcccccagctccaagggcgctgcctgccttacccaaggggtgctcacaactgcggcacagctcactcaggttggcagctggctgctgcagatccatgcggggtgcagtggggggcttggggtttttccagccattacacttacaggtttcattggcctggaggtggaaggatcagtcaatgacctatacctctggggcaagagccgctccgcagccagagctttgaccccattcccaccagagccctgggatgccccaagccccgccccttcaccccaggccccgcccccaccttgcaagccgagaagacccctagcttctcaagcttcttggcgcgcggcagcccccggacttgcgccttcctctgactggcgcgctgctgctggctcaggccaggtcgagccggatcccccccgctcccggcccccccacttcctaccccgggccccccagtccctgtgctgccggctggggctgcagctggggcaggggctggtgccggggtgggagtcggaatcggggctgaagccgggctgggtgcaggagtcggagttggggcaggggctggggactgaaggggccggggctgcgcagccggggccggggtcggggcctgggaaggttccgccatggcctcccccgcagcggagagcggcgccgcgctcccagccctagggccgcatgggcaaccagcgctcagtgcgcaggcgttgctgcgcggcgcatgacgggagttgtagtcttcccgcgccttcccctcactgcctccagcttccagacttttctgtcctgtctcttggcccctgacagccaagtgaggcctgagtgaaggccccacattgacccctcttcacttgtaatctcttttaatggagtccgggagagtcacgatggctgtcctcttggggacaaggagtcttggggagaatcgtggggtctgcctctttcacgcgcctg

SEQ ID NO: 18101 - DNA, 2300 bp, Homo sapien
accaccaccttgagggtgcctttcctgcctcctgtgcctccagtccctctacctctgacttccatccccagaaaagacaacggacaccaaggctgctgcacatcgcgtcgtttgtttaccgggtcaggttggaagccttagagccgaggctcccgagtctcggggacggtcctgtttgggcttcagggagggccagcgccacacactggcctctgacccacagctgcccggagggggtcaggcagcaggtcatggcggtaggactcaggttggacgggagcattttccggtgcaccttctgtgacatgcggtaactgaccctttccgggtccctgacgtccagttgctgctgtccggtcaccatcagccattggccatccacctgcaccaccagttcctccggggcgaagccgtgggcatccagcttcatttggaaaccgtctctggcatggtcattgtcctcctgagccgctggactgtccctgagcagccgcaccggcattgtggccacccggttccgttcagcaaggcccacgctgggacaccgggatgccacccggctctcgttggagaaggtgttaccgactctctgcatccgagtcagcaactaactgctgtcaaagggcgcgaggctcccagcgcagagctaggcgcacggacgcccggagaggagggacctcgcgcggcctacccgagctcagctccgctcgctcggttcccttcgcttctgcaaacgcaggcggagttcgggatcagccacgcccatcttacctccaagagccagactgtcagcgccctggcgcgcccgcagctgctctcctcccagactccgaccctttctccgcccttccccaccttcgttaatggacccggggaggccgcagctgtgaaggaactggatccacgaccaggccagacccgagggagccgcaccctggcgcagccaacagcagattgatcccccagctggaagggggctgtcttgccttctaaggaccaggcctggggcaaggattgttcctagacagagccaggggagggcggccttcctgggtcatccaccctacctctccctgaccacccacaaccccacgcggacacgcgacacgaggaggtggactggtctctccggctgcattaattcttcccggggcgtcctgtgctgcaggctgtggtctgggctctggggccacaaagatgaagacgcagttggggcttcaggagagtggctcccagtgcacagagaaagacctagccctcctccgcctcaccctccacgtcagtagccttcttggtgaccatcataaccacagctatgcctctggtgctgttatttgataattttttttttttaagagacagggtatcattatgttgcccaggttaatctcgaactcctgggctcaagcgatcctcccatctcggcctcccaaagtgctgagattacaggcgtgagccacctcgcccagcctataaactttattttttatttttttgtagagattggtggggggggtctcccaatgttgcccagcctggtctcgaactcctgcagggctcaagctctcctcccgcgtgagccagccacccggcctgataaactcctttttgttgagtgatactattaaatacatacatactgaaaagcgcagaaaaaggtgcaggtgaatgtcaggaggagaacacacccaagtcaccaccacactactgcagaactgttgctacatctcatctctaccgcagctgcaattccgtgtccggagccgcgtggggcagggcctgtgcgggagttgggggagggggttaagtgggagacaggcgcgtgaaagaggcagaccccacgattctccccaagactccttgtccccaagaggacagccatcgtgactctcccggactccattaaaagagattacaagtgaagaggggtcaatgtggggccttcactcaggcctcacttggctgtcaggggccaagagacaggacagaaaagtctggaagctggaggcagtgaggggaaggcgcgggaagactacaactcccgtcatgcgccgcgcagcaacgcctgcgcactgagcgctggttgcccatgcggccctagggctgggagcgcggcgccgctctccgctgcgggggaggccatggcggaaccttcccaggccccgaccccggccccggctgcgcagccccggccccttcagtccccagcccctgccccaactccgactcctgcacccagcccggcttcagccccgattccgactcccaccccggcaccagcccctgccccagctgcagcc

SEQ ID NO: 18102 - DNA, 2300 bp, Homo sapien
aaagaaagaaaattttaattagctgggtgtggtggtgtatacctgctggaggctgaggcagtaggatcttggaagctgcagtgagctgtgatcacaccgctgcactctagcctgggcaacacagtgagaccttgtttctttaaaaaaaaaaattatttccttccatcagcactctttgagttcctagtatgcacataggcactgtgaggaaggcatctctaagaagcagaaagcacagaccttgtctcttcattgactgaggtgaaatgagaaagcgtcttaaactatgaaaaattgaaatgacataactttgaaatatttacatggtatttctggttgctaattgagacccaccaccccgtacttccttccttgtacttttggggaagaggtgggccccatttcaaacctcttttcctttggttctctccagaaaggaaactgttgtttctggctagtgaatcattcttcctgaagctcactttttaaatgagttgctgggagaacttggatgtggaaaacgatttgaggttgaacaaaacaagccctttgctgtcagcttcttgcatgaatgtggaccatttgcttcccacagatacctcctgttcatccacattgctgtcccttaaccatgagggaatgtacttcccttgctcaggggcagatcggggctctccctgggatcttagactccattatgcaaagggcagcctaataaaaaccttttctttccaacccaggttcaaatgctgaacagtgttcagtacttaatacctactcacaggacctgtttgtaaaacattctgtatatattctgatgtctgttgacatcagatgtatatgtctgatgagacatccacttatgtcttctagaggcttctagagataggctcctcatgtgtctgcaattccaaaacttaacaaaaacaaaaagttgagcctctgaagctgtcactaaccaagtgattcagatgtcgggactggaacaccagctgttggggatgcaggacttggtctctgccctcccacacctcctgcctcttctttctctccatcgccccatctctgccagtagagaatggaactgaggtctctattgaaaaagggaaagttggtagctgtgctgactgtggcagagctatgactttggtgtgtgtttctgtgtgtgtttgtttcggtgtgtgttttgttttggtgtctgttttggtgtgtatttctgtgtgtgtgttggcatgtgtttttgtgtgtgtgtgtgtgtgtttcagtgtgtatttgttccggtgtgtgtgtttctgtgtgtgtttgtgtgtgtgtatcggtgtgtgttttactatgtgtttgtttctgtgtgtgttttgttttttaatgggtgcgagactttggcccatcaaaaatgagagaactagggaagaaggatcaggatgagagagtgaaacattgctttgattctggtgcacagaggcacacagtccagccctagactgaaagtcggtcagtccttctgaaggtggcaggagaaaaatggctatgttaataacaacttgtgctggccaggccctggtccctgaatggccatgaggttggccaagcaccttctctgaggagctttctaccaggacctcttgggcccctgtctgcctcaccactgtggtcctggctaccagactggaacttcattattgatctaaatcctagtgtcttcctgagcttttgttttgttttgttttgttttaattttgccccaaaagcctgttgacttaactgtcaccaggctgtcacacattcattcatcgcctgtgtgtgtttatttgtaggtgaatgtacatatttgggatccagaagtcaatgtgtttgctcagaaccatgagcctgaagttgggagaccattctcctctttacagctcagatggtggtagagccggtagacatctagtatagcccagtggggcctcctgacctctagtggggagggcagggaggtgaggtgaggggaagcagtcagctaggtcttcagtgaggccagagggaaagatctgtaatttaagaaggacacagcgggtgacggcctctgaactaactcagtacttctcatttctcccttacagttggaggtccccctccccactaagtgcctctttgcatagcaccagtccccacccgcacgctctctggaccactacagctggacgggcaatggcgggtcggggaggcgcagcacgacccaatggaccagctgctgggaacaagatctgtcaatttaagctggttctgctgggggagtctgcggtaggcaaatccag

SEQ ID NO: 18103 - DNA, 2300 bp, Homo sapien
ctctcaaggtggtctcttctgctgctagcaactcaaaaatcccaacagcactccctatcctttccctgaccccagaccgctgccaagcctgttctcccccattacaacatggtctcactcagggcctggactgctccaaaactcgcccaggtctccagctctcctctaccacccaacaccctgggctcacttttggataggaaataaactctttatttttgtagttattggctctgggtgtttctgggggttactctgagagccccagggctttggaggagccaacacagcaatcactccccaccctcaccttcgttgtaccccagggcccagttgctatctctaggaagggcagaggcaccagccaatctacttggcaccacattcacaccaccaggggccccagggttgaggaagaaacttaattagtcactatgggcctattatacccccttctctcccctgcaccccagtcacagccatgtatgcacacagtatgtgggaaggacagagtcctggctttggcccacctccagccttggaaaggtgggcctaggggactacccatccctcctgtataaggaactgttccagaactgggtatggcaagggggctgggggaagagcttgtcaccagccagaacctgctaggaatcccactctgccccatcccctctgtcctcccaacaagccctctcttccctcttccttttcacttctcatgaacactggcgcggaagtggggattgtgtgttatgggtgtaagaaagagagacgccctgatgaccagatggaactagatgtgggcacagttttgtggcaggttgtccaagacaggtaaattctccagctgaggctccaggatatgcctggtgttggcgttataggcacaatggccacagctgtctccggtgagctttgattccacacaggttttcagtagtgtcccttgaggatgagatgcaaaagaagaggaggtactggtttgtgttgagaggtaagggtgggaggaatcaggagcgggcccagtccatattgagaggagcagaaaaaacaaatattcctgatccatagagggggagagtgcagagtgggggtggttctagtctttatttacggatggagagggccgaggcagaggttgtccagctctgtattccgcgtcagagagaagagctgaccctggctaggagcaggggaaggcagaggcagagatggtctttgtgccggcccccgcacacaccaagtaggaggtggtggcagaagctctccctttgatctcacccagcatcctgcagagaactcttcctgcagcgctttcctcaccttcccaatcacagacgcccctggcaatcgggcggacagtgcagacaagggcttctccagatcagcgagttcacaggactgaggcctcgcgtgcatattcattcgcaccacgttttttctttcccaattctgcacacacaatcctctgccttcttccaacgctccaccacccgccttccctcggggcgtccggaaccggcggtgacgcggatggcagggttagccttaaaaagttcccggccgtaggctgggcgcggtggctcaggcctgtaatctcagcactttgagaggccgaagagggcggatcacctgaggtcaggagttcgagaccagcctggccaacatggcgaaacccccgtctctactaaaaaatacaaaaattagtcgggcgtggtggtgcgtgcctataatccagctcctcgggaggctgaggcaggagaatcgcttgaacccgggaggcagaggttgcagtgagatcgcaccactgcactccagcctgggcgacagagtaagactccgtctcaaaaaaaaaaaaaaagttccggccgggctccgcctcgcagtcagccggctccaccctaagcccaagtcccaggcagccactgactcctcccagcgctgcgaactacaagtcccgcgatccctcgcgcgctccctaccgccactcccgcgttcctaccggcgccgctgggtaggtcggccaagagtgcctcccattggtctccgcactgtcaatcacctgggagtattgaggggcggggcggaggtggagatccggatccggagcggctgaaaggcggaagtggaggccggagcctgggacaccgccggcggggagagaagcggatcccgtccgagccccggccccaagtaacgccgccgccccggagccgccgtgagtatgcttgtcccaggacctggtgtctcgcctgcgttgaagcatctccagggcagcccttcctcccgcccagccc

SEQ ID NO: 18104 - DNA, 2300 bp, Homo sapien
ggaaggggtgggagtcaatcctgctgaaaaggcagggaatttgaacttcaacaatgagtcatccagaatggctgcatcatggggtatagggtgtggggagtggagaggctcaggaagggacacagttacagtcagtgcagcacagctcgcaaaggctctcacaaatcatcgggctttgcactttatcttgtaggtaacagagtcatgggacattcttaagcaggggcagtacaagattttactgcaactccagccaaagacacctgttactggtgttcccaaaatccatatgttgaagtccgtacccgtggcacttcagaatgtggctgtatttggaaataaggtccttccagatgcaattagttaagatgaggtcatactagagtagggtgggcctctaatccactgtgactggcgtccttataaaaaagggaattggaacacagaaacacacacagggagaacccatgtgaacatgaaggtagagattggctcctacaagccaaggaacaccaaaaattgccagcacccccacccccagaagataggggagaggcatgcaacagattctccctcatagccttcagaaggaaccaacgctcttcacctgaccttgcttggacttctagcatccagaactgtgagacaataggtttctgttgtttgagccactcactttgtggtactttgttatggcagtcctaggaaactaatataacatccaaaagtagagacacaggctaggctccgtggctcatgcctgtaatcccagcactttgggaggctgaggcgggcggatcacttgaggtcaggagttcaagaccagcctggcaaacatggcgaaaccccatctctactaaaaatacaaaaattagccgggcattgtaatgcacgcctgtgatcccagctactaaggaggctgaggcgggagaattgcttgaacccaggaggcagaggttgcagtgagctgaggtcatgccactgcactccagcctgggcaacagagcaagactccgtctcaaaaacaacaagaacaagaacaacaagaacaacaacaacaacaaaagtagagacacagaaaaatgtggcacttcttagcaatctaacatcccagataatacctagctcagagggtggggagaatttagcctgccctccttgcccatagggttcccactttcactgcttcagctgttttgtcgtgggaagcagccaccctcagccacagaactcagctgcctcaattttctgcataggtagtgagaaagtcctgtgtctagtctcactttggtccctcttgctgctgtactggttccatcttggagaagttagaggtcaaagttcacatgtgcatccttggagatttgcaagccatgactctgcccacctcgaaactatctttttcagaggtagtttctcccaaacttgcctccagcctctcttccacttgaagggcagcagagaggaggattaagacagtaggaagagggaaaacaggcaggcaactgcccttcaagacacttattttgtaccaaagacatgcattatggtattacattctcacggtaactgcatcaggtaagaattatcagctccattttacagatgaggaaagtgggcttggagaggatatcacacgattggtgtctagagctgggactctacctggtggactccaaagctcttttcattccaccatgctgtgtctcagtaggcagagttcgccagggtgtcttgggaaaactgaggcaggaggtaagaatggtgctttctagagttggggtttcaagccttcccattgtccattctctaccagcaaactagcctcttaacccttgctgtctcacgctggagctactggcctgtgggtgctgcgaaatatgtcaactccagtaggcggcactgtgaaccagacaccagcccagcgtggacgccgcgcgggaaaacccgcgaggtggagccacaaggagcagccagggaaccacgtgtggaggcgtggccagcctggaagagggcgggtctgttattcaagccccgcccatcatttcaggcctcccctcccggtgggcgtgccccgaattctctccccgagagacacgcgtgggccgctcccctctgggaggagggctgcccagaggggtgcgggtgtcgctagcggcccctccccgtgtggggccacgtggcgggtgcgggccgagcccgaggggaagaacctggcccgtggggaggtgggggggaccgaaacggcgctgagccgagccgagagctacggggttcggagcagaggcagcggcagcggc

SEQ ID NO: 18105 - DNA, 2300 bp, Homo sapien
gatgacatgtgttcttcaatgcatggcggctcactccgtgttgactgtagagtgggactacattcctcccctccaggtagcctgagccagggagaaagctggggaggtagaagctttctatcagcctctggtagaaactgagtttggtcaggcacagtagctcacacctgtaatcctagcagtttgggaagctgaagggggaggatggcttgagccagggatttgagaccagcctgggagtcccagtctctacaaacaaatttaaatattagccagggattgtggcatgcatctgtgtggtcccagctacttgggtggctgaggtgagagcattgcttgagccgtggcatttgatgctgcagtgagctatgattgtcccactgcactccagcctgggtgacagagtgaaaccttctcaagaaagaaaataaagagggctgggcgtggtagctcacgcctgtaatcccagcactttgggaggccgaggcgggcagatcacgaggtcaggagatcgagaacatcctggctaacacagtgaaaccccgtctctactaaaaatacaaaaaattagctgggcgtggtggcgggcacctgtagtcccagctgccaggaggctgaggcaggagaatggcgtgaacccgggaggcggagcttgcagtgagccgagatcgcgccactgcactccagcctgggcgacagagtgagactgtctcaaaaaaaaaaaaaaaaaagaaagaaaagaaaaagaaaagaaaatgaagaaagagagaaggccaggcatggtggctcatgcctgtaatcccagcactttgggtggctgaggcaggcggatcacctgaggtcaggagttccagaccagcctgaccaacatggagaaaccctgtctctactaaaaatacaaaattagccaggcatggtggcgcatgcctgtaatcccagctactcagaaggcagaggcaggagaattgcttgaaccctggaggtggaggttgcagtgagctgagattgcgccattgcactccagcctgggcaacaagagtgaaactccgtctcaaaaaaaaaaaaaagaagaagaagaagaaagaaagaaagagggagagagtgagagagagaaagaaagaaagaaatgcaggaaggaaggaagaaggaaagaaggaaggaagaaaaaaaaagcgggggggcctggtgcagtggcccacgcctgtaatcccaacacttttggagactgaggtgggtggatcacttgaggtcaggagtttgagaccaccctggctaacatggtgaaaccctgtctctattaaaaatacaaaaattagctggttgtggtggcgtgtgcctgtaattctattcaggagctattcaggaggttgaggcaggagaatcgcttgaacccaaggcggaggttgcagtgagccaagatgaccataccactgcactccagcctgagcaacaagaccaaaatttagtcacacacacacacacagaaaagaaagaaagagaaattgggcttggttttggcttcttacctcccactgtctaggctgagttttcaaggttttccatctcagaggctagtggaaagggcagaagggagaaaaaaagctagggggagggggcagctaaggagcctttccatgaaggaagaaggtcctggagcctgacagtccccaggagcagcgacaagaagcaggggagggagaggactgctgctggctgctccaccccccacacacataatgtggggtctcgcgtctgcctctctcccgcccctaattagcagctgcctccctccatattgtcccaggccagcgcctcttttgtgctcccagattcctgggtgcaaggtggcctcattagtgcccggagaccgccccatctccagggagcagatagacagacaagggggtgatcaggggcacagtgatccaaccctggcctctgaacgccgcagcggccattccttgggcccagcctggagacggcccccctgcagcaggctaatcttagacttgcctttgtctggcctgggtgtggacgcaagtgcctgtcaattccccgccacctcagagcactataaaccccagacccctgggagtgggtcacaattgacagcctcaaggttcctggctttttgaaccaccacagacatctcctttcccggctaccccaccctgagcgccagacaccatgaaccttccttccacaaaggtaaagatccagggatggaggggtgactcaccatcccagagaagcaaaaagagtgcttgctcagagggctggaagaaaggccaaaggtgtct

SEQ ID NO: 18106 - DNA, 2300 bp, Homo sapien
caaaaattagctgggcgtggtggcacacacctgtaatcccagctgcttgggaggctggggcagcagaatcgcttgaacctgggaagtggaggttgcagtgagctgagattgtgccactgcactccagcctgggcaacagagcaagactgtgtctcaaaaaaaaaaaaaaaaaaaaaagataaactatatgtgacaagtcctcttacttgaggactcgttattgtttatcttgaaaacgtgtatgtaatgggttgtatgcgcttggctatacaaaaaagtaagatttcctcccttctttgcaagctcttagcagatcacctgtcatgtacatcacattgtggttgaatgcttattcaataataaaattgttttctttctcaactaccttgagggagaggatggggttttttttgttgttgtttttgttttgtttgtttttgagacggagtttcgctcattgcccaggctggagtacaatggcgcaatctcagctcactgcaacctccgcctcccaagttcaagtgattcttctgcctcagcctcccaagtagctgggattacaggcatgtgccaccacatctggctaattttgtatttttagtagagatggggtttcaccatgttggtcaggctggtgtcaaactcctgacctcagatgatccacccgcctcagcctcccaaagtgttgggaatacaggcgtgagccaccgcgcccagctgagttggggttttaagagttcttaagcttgcccctctcccagctcaagtggcttaatggcgttctttcccacacacacctttctgttccttcacctgcgcaagtttgaggaccatgctagtctggtcctaactgccccaactgccagcctgggctagcacccgacatgaagtcctgtaggcgacctgcccctttaagagcacccccctccttcagctcctccctcaggcctggtggccggatttcccagttggggcccagccttttaaagccatcgctccttctttctggccggatgtgtgctgagacccagagtcacccaggggtctccgtcacgtgccaggagtaggcagaagtgggctgtgacaggtgcatgtgggcatggaccccacagcctggggctcaggagggacaaggagctgggacagggtggatcccgagagaaagcaaagccactcgggagtgggcaagagatatcgttacgcagctgctgtgtgcccgaccgaccctgtccgaaacccttcctgtaccttcccttcctcttccttcttttctcccttttttttcttttctttttttttttgacagggtctcactctgttgcccaagctggggtgcagtggcacgatcttggctcactgtagccttgacatcctgggctcaagggatcctcccatctcagcctcccaagtagctgcgactatgggtgtgacaccacgctgggctagtttttcaattttttgtagagatggagtctccctatgttgctcaggccggttgcaaactcctgggctcaagtgattctcctgcctcagcctcccaaagtgctgggattacagatgatagccacctcacccggcccacccctaccttctgaaagaggcattcttattcttattcccattttgcagatcaggaaacagagctcagtgcagcccactaaattgctcagggccctacagctaacaagcggcagaggcaggatctgcactcaggtcagtgggactccaaagctttgatagtctctcctttgcatcacctgccccacagggtcctgccttcttcccaatttcatttttcctcggttttcctgtatgcagtagagcgtgggaggagaaatggataattgctgcatgcccccatatctcggttccttcctcttcccaggagctgcttggagatgctgctgtggccactgctgctgctgctgctgctgctgccaacattggccctgctcaggcagcagcggtcccaggatgccaggctgtcctggcttgctggcctccagcaccgagtggcatggggggccctggtctgggcagccacctggcagcggcggaggctggagcagagcacgctccatgtgcaccagagccagcagcaggccctgaggtggtgtctacagggagcccagcgcccccactgttccctcagaaggagcacaggtgtgtttcccagggtctggggaggtgacccaaagagaaagaaaccccacaggaccgtcagattccagagcctgatggcccccttacctcctccactgccaacggagtggcctgacccagagacccaggactggctt

SEQ ID NO: 18107 - DNA, 2300 bp, Homo sapien
tgcaatgagctgtgaccaggccactgaactccagcctggacaacagagcaagaccctgtctttaaataaataataaaagcaaatgcaagatctcagcgagaaaaaacgtgaaagtgaggtgagttagccagagtgagaacagacctgttgaaagaagctcagctgtgaagggaagagaggtgctcagcaagtagtagctctcttctcaaaggtatccagaggcaagtaaggggagaaagggagtggttttagtgttttgagagcctaggtcaagaacacaccagcctgggcaacatagggagctctctcgtctctacaaaaaataaaattagttgagcgtagtggtgcgtacctgtagttccagtcccttgggaggctgagacaggaggatctcttgagcccaggaggttgaggttgcagtgagctatgatcgcaccactgcactccagcctgggcaatagatcaagaccctgtctcaaaaacaaaaaacaaaaaaagagaagtttgtaattttccttgggataaaggcaacaggctaacacagatggtcacccagtaaccaggtaaagttaagataaactatatgtgactggctgggtgcagtggctcaggcctgtaatcccagcactttgggaggccgaggcaggtggatcacttgaggtcaggagtttgagaccagcctggccaacatggtgacatggtgaaaccccgtctctactaaaaatacaaaaaattagctgggtgtggtgatgcgtgcctgtaatcccagctactcgggaggctgaggcaggagaattgcttgaatctgggaggcggaggttgcagtgagctaagatcgtgccattgcactccagcctgggcaacaagaatagaactctgccaaaaaaacaaaaaaaaagaagtttgtaattttccttgggataaagccagcaagctaacacagatgttcacctaataaccatgtaaagttaagataaactatgtgactggctgggtgtggtggctcacacctgtaatcccagcactttgggaggccaaggagggtagatcacttgaggtcaagagtttgagaccagcctggccaacatggtgaaaccccatctctactgaaaatacaaaaattagctgggcgtggtggcacacacctgtaatcccagctgcttgggaggctggggcagcagaatcgcttgaacctgggaagtggaggttgcagtgagctgagattgtgccactgcactccagcctgggcaacagagcaagactgtgtctcaaaaaaaaaaaaaaaaaaaaaagataaactatatgtgacaagtcctcttacttgaggactcgttattgtttatcttgaaaacgtgtatgtaatgggttgtatgcgcttggctatacaaaaaagtaagatttcctcccttctttgcaagctcttagcagatcacctgtcatgtacatcacattgtggttgaatgcttattcaataataaaattgttttctttctcaactaccttgagggagaggatggggttttttttgttgttgtttttgttttgtttgtttttgagacggagtttcgctcattgcccaggctggagtacaatggcgcaatctcagctcactgcaacctccgcctcccaagttcaagtgattcttctgcctcagcctcccaagtagctgggattacaggcatgtgccaccacatctggctaattttgtatttttagtagagatggggtttcaccatgttggtcaggctggtgtcaaactcctgacctcagatgatccacccgcctcagcctcccaaagtgttgggaatacaggcgtgagccaccgcgcccagctgagttggggttttaagagttcttaagcttgcccctctcccagctcaagtggcttaatggcgttctttcccacacacacctttctgttccttcacctgcgcaagtttgaggaccatgctagtctggtcctaactgccccaactgccagcctgggctagcacccgacatgaagtcctgtaggcgacctgcccctttaagagcacccccctccttcagctcctccctcaggcctggtggccggatttcccagttggggcccagccttttaaagccatcgctccttctttctggccggatgtgtgctgagacccagagtcacccaggggtctccgtcacgtgccaggagtaggcagaagtgggctgtgacaggtgcatgtgggcatggaccccacagcctggggctcaggagggacaaggagctgggacagggtggatcccgagagaaagcaaagccactcgggagtggg

SEQ ID NO: 18108 - DNA, 2300 bp, Homo sapien
cttgacctcccaggctcaagtgatcctcccaccttagcctcctcagtagctgggaccacaggtgtgtgtcgccacaccgggctagaccctgtcctcttaatgactgcatagtccttgtaacctccatttgcattcctagagcatagcatttgttccaaaaatatttattgagtgtctgttctgggcttgaacacgagtaggaggatttaaaagtgaatagcatattgcgtctgcccttggggacagagacagaaacatgaaaacatgaaattgtccttcaacacaagaagtgctgtaatagaggcatgaataacgcggtgggaaacaaggagggaggtcatgctgcctgaagcaaatgtcaccgaagggcagacatcaagaaggcaggacattccaggcagagggaatagcatgtgtgcagggatgaaagctcacaagaaagagaaacatgagtcaggtgcggtggctgatgcctgtaatcccagcactttgggaggctgaggcgggcagattacgaggtcaggagttcgagaccagcctggccaacatggtgaaaccccgtctctactacaaaaatacaaaaattagccggatgtggtggtgtgcgcctgtaatcccagctactcaggaggctgaggaaggagaatcacttgaacccaggaggtggaggttgccgtgagctgagaccgcaccatttcactccagcctgggcaacagagagagactccgtctcaaaaaaaaaaaaaaagaaaagaaaaagaaaagataaaagagaaatatggagaacatggagcacctgagtgtcaaaacatcatgggcagtaactgtcagggagattgccagagagctcggggttggttggcgcatccatcctgcttcctgcttccttctctggcctccaagctccctgaacctactctgtgcaaagcactgtgccaggtgttggcccagagtatgggactgcagcagtggcctgggtagcggagaagggttttttgaccagctggagacctttgtggctggtgtcattctggaggtgaagagaaggccgctggaaagagctgcccagggaggactatgggagaacttgcagctctgggccatctctggacatgaacgttttgcatacacacaggggagctctgtgtgtctgagtgggggcgggaggggtccttctctctcttttggcccctgcagcttggcttctggagctttcctatgtcttgctttagtgctagcccttggagggttgccagggaaaccgctggccagctccgggagatagacgtagcagaggaaaggagagtgggtgactcagcctggcttcccacaaccgcaaccccctcctcagcacgtggaaaggatctgggggacccccttcccctggatcctacagatgaccctgtttattctttcttctctagagagagcagtccctcccgcagctctgactggtgggagccagccagattttcccaggaagggaaccggccccaggcgccccgtcccccgtaggttcaccctggaactcggacaggtgaattcggcctgggcgaatgtgaattcctgccgtgcccatgcaggcggcaggagccctggctgagacgccctcccgggggcaaacccaggataattattgatcggggcccctgtggacttctgacctcggcctcggcgggagaggacccggaacgcgggcctgggctcccagggagagaggtgggcgggccgcggagggggccaaccaaaacgaccacgacagtgcgccctagccctgctagtggtggtcgacccaacccaaacaaagcagcatgtgcttgcggtgcggcgtcggctagggagccgagccgggaagacaccccaccgccgcagaaagggggtgcgcgcggcgccggcaccggcaccgccgagcgcgccgccacctcgggtgtgccgagggggtccgggtccttcaagggcggtcgcggagggggcgcgagggacagcgggctagcgagcgcgcgccgggcggaaccaggaagcggggcgcgctccgggttgccagcggcgcgcgtccctgggcctccgcgcgtgagcggcgcgcgcgcccccgcgggccccggcgggaggagagtcggcggccggagccgtcaccccgggcggggacccagcgcaggcaactccgcgcggcggcccggccgagggagggagcgagcgggcgggcgggcaagccagacagctgggccggagcagccgcgggcgcccgaggggccgagcgaggtaggagctgcggggcgagccctgggcccggggccggggga

SEQ ID NO: 18109 - DNA, 2300 bp, Homo sapien
ctgtgacttggatttgggggtgaagagcagttaggggcaaggaggccagcctcggaccgcagctcagtcagacccttgacagtttctgatcttcctgaacccccatcccgtggcctcagttttctcctccacagcctggttccccaaaatcaccagggcactttgtggtgggaaatcacccacacaaggggacaaacaaggggactgaaagcaaaaagaaaccccaaatttgacatttctgggtagttgtgttatctggagccacgactacagtcacctcttcccaacccaactctgacacccttccctctactcccttgggtgccctttgcccatcctgggaaagttccatagctcctcctcctccccactgcatctcaaagggagaacaggcctgaagaaatggagagaaacccagacagaatcagagaaccagatggagacctaaggagacaagggagagacacagagagaataaaagccagagtgggggccgggcatggtagctgatgcctgtaattccagcactttgggaggccgaggcgggtggatcacctgaggtcgggagttcgagaccagcctgaccaacatggagaaacaccgcctctactaaaaatacaaaattagaaatacaaaattagccaggagtggtggcacatgcctgtaatcccagctactcgggaggctgaggtaggagaatcgcttgaaccttggaggtggaggttgctgtgagccaagatcgcgccattgcactccagtctgggcaacgagagcgaaactccatctcaaaaaaaaaaaaaaaaaaaaaacccagaaggggaaatgtgcaatgaaagacacagatattcggggccttacagtcagagaccaaatgagggatggtcaaccaagggcacagccactgggcacagggtcagggtgggaggcacgggagggctctgaaaacacagccacacacccttttaggcccatccttcccattctgtactctggcacctcaatgctagctttttaggacctaggactacccacactaaagccaagcccggcccaaccaagacagatgtttggtgggtggggctgcctgctggagcaacaggcctctgcaggccctggaggagaagtctagagaggtggctgcctggaagagagcaggcaggaccccctctcttaagcaggcacccccaccccatcaggtgcccagatgtcagtgcatggcaagggtggccctctgccctccagacctgggtgagaggacttgaaaacctgaggaatctgctcccatcaactgacttccacacctgcctgaagggaactgctggagggcacaggtgccaagtgggacccacccaaatgtggcaatgggtttgtatccagccaccgacaggctgcatgacggtggcaaagtcacttcccctctctggcctttgtttttccacttgtaaaatcatctttatggtcacttccagctgtggcacttggctttcattccagttgaccccctagctctgtgtctgaccctcccctgccaaatccattgctcagagtgggaaaggagaggagagggactatacttcctcctccctggggccccctgcagagcatctgggaagcaaggcttccctacatcctccatgcacccccttagagttttcaattcctttcctcgtgatcctgccaactaagacactgtgaccacacagagaaggtggggagaacgcagacattttggcttctgcagctttgaagttctttttttttttttcctctgaagttaaaagaatgaaactgggagaggtagtaaggggcaagaaaggagagtggaaatggagagaaaagggcagctctgagaagcagctggggagggaggcagatgagaatgcaccccccccaacagaacatgcagtcttggcccagctgtgctgtgagtgggcagctgggctggcccctcctctggtgctgccaacccgctgccaggcagaggggaggcccagaggagagggaagctgggcaaaggggatggaaggcgtccagcccgaccttaccaaaccccttgggcctcgtgggaaggggcctcttggagagggggactgaggctctagacaggatattcactgctgtggcaaggcctgtagagagtttcgaagttaggaggactcaagacggtccctccctggacttttctgaaggtagaaccagcctcataagtaactaggctgggtgaacgggggcgctggctagtttatggatcacagtcggctggtgaggccacgtgcctactgtgtggccctgggtggccc

SEQ ID NO: 18110 - DNA, 2300 bp, Homo sapien
acacacccttttaggcccatccttcccattctgtactctggcacctcaatgctagctttttaggacctaggactacccacactaaagccaagcccggcccaaccaagacagatgtttggtgggtggggctgcctgctggagcaacaggcctctgcaggccctggaggagaagtctagagaggtggctgcctggaagagagcaggcaggaccccctctcttaagcaggcacccccaccccatcaggtgcccagatgtcagtgcatggcaagggtggccctctgccctccagacctgggtgagaggacttgaaaacctgaggaatctgctcccatcaactgacttccacacctgcctgaagggaactgctggagggcacaggtgccaagtgggacccacccaaatgtggcaatgggtttgtatccagccaccgacaggctgcatgacggtggcaaagtcacttcccctctctggcctttgtttttccacttgtaaaatcatctttatggtcacttccagctgtggcacttggctttcattccagttgaccccctagctctgtgtctgaccctcccctgccaaatccattgctcagagtgggaaaggagaggagagggactatacttcctcctccctggggccccctgcagagcatctgggaagcaaggcttccctacatcctccatgcacccccttagagttttcaattcctttcctcgtgatcctgccaactaagacactgtgaccacacagagaaggtggggagaacgcagacattttggcttctgcagctttgaagttctttttttttttttcctctgaagttaaaagaatgaaactgggagaggtagtaaggggcaagaaaggagagtggaaatggagagaaaagggcagctctgagaagcagctggggagggaggcagatgagaatgcaccccccccaacagaacatgcagtcttggcccagctgtgctgtgagtgggcagctgggctggcccctcctctggtgctgccaacccgctgccaggcagaggggaggcccagaggagagggaagctgggcaaaggggatggaaggcgtccagcccgaccttaccaaaccccttgggcctcgtgggaaggggcctcttggagagggggactgaggctctagacaggatattcactgctgtggcaaggcctgtagagagtttcgaagttaggaggactcaagacggtccctccctggacttttctgaaggtagaaccagcctcataagtaactaggctgggtgaacgggggcgctggctagtttatggatcacagtcggctggtgaggccacgtgcctactgtgtggccctgggtggccccgggcaagcccctttccctctcaggacttccatttcttacctgcaaaattgtggagagggggagggctgaaacacatgactgccaagattctttccagttcctccgtcagggttgagtttagatggccggagtaaaagaaggagggaggtgctgcggtggtgggggtgatcttggcttcactagaatccccagttcttcccctctctacagttttgtctctgaggtcacaaaacctgtggcccccaagacacacatgcgcacacacgcgcgtgcacacacacaccccacacatttattttttaatctaggggctcaaaagatgacacgcgccagagctggaaggcgtcgccaattggtccacttttccctcctccctttttgcggatgagaaaactgaggcccaggtttgggatttccagagcccgggatttcccggcaacgcccgacaaccacattcccccggctattctgacccgccccggttccgggacgctccctgggagccgccgccgagggcctgctgggactcccgggggaccccgccgtcggggcagcccccacgcccggcgccgcccgccgggaacggccgccgctgttgcgcacttgcaggggagccggcgactgagggcgaggcagggagggagcaagcggggctgggagggctgctggcgcgggctcgcgcgctgtgtatggtctatcgcaggcagctgacctttgaggaggaaatcgctgctctccgctccttcctgtagtaacagccgccgctgccgccgccgccaggaaccccggccgggagcgagagccgcggggcgcagagccggcccggctgccggacggtgcggccccaccaggtgggtgacccggtggcgcgtcctcggcggcgcgccgagaggggacactctactgccgccccggcacctccggcacccggagctcgacggccgggcgcag

SEQ ID NO: 18111 - DNA, 2300 bp, Homo sapien
cagtggcccaagggacagaaattgcagcatttagccaagaggaatttggcggggttgtggagaaaggccagtgtctgggctgaagagaatttttgcaggtcaaacccatagtcgcagaggtagattttatgtgttactggtggggaggccaatgagggaaacagaggccagctcttgagaagtcagaagcagggcagggtttgaatgaatggaacaaagctatgggacgtaaagcccccaaacctgactctgaacctggtatatttctgagtttctctgtgatcttgaaaatgtcatattatgttgtctttagttttctatcagcggataatatggcctctcctatctgctattcatgattgtgagaaagaaaccaggcagggagtgtataaggtgtgtaagtcctttgtaagcagtaaatcactaaacaaatcctagaccctatgttatcagggaggcagttggccgcacgggatagcgtagttacaagagactataggcggagatgggggatatctgtcctgtggtgtagataaacagcctaatcaatacacacacactctacaggtaaatacagcaatttccatactgagctgtgtctaccagagggcaataggaggttctcaattctcaccaccagtgaccctatgaattgccctgtagatgcctctgtccctcattggatatgaggtggtacgagcggtctgaatctgtagacttagacaggcttcaggtatctggggaaccatgtgagtaaaaccttgtattgtttctggggctagaatctagtctccttcaaacactcagaaggatctgtgactgccttcaaaggttaagagtcattgatttttctcactagaaattaataagaacagctatccttggggagaaggaatgatgggggtagggaaagattttcatttaatatttttgacctttctgaacggtctgcattttctaaacaggaacatgtattaggttcattgaaaaaaaatatgtcaggggttagctgagcagtgagataatgggtcctttttagatttttgtctttatacctgttcgtattaaacaaacacaaatattaataacatatttttaaagacccaaaaaaataaaaattaaaaaccctgatagtatcagcacatacacagaaatcactccattatgcaaagttcatcctctattatgaaaggcaaaatgtctacatttcctatcaaccactggcttcaattcagtaaaacttgcataccaagtaggcaaggtggaaaagaaaaaggcagaacatttcatgtatttcaattcagacgcataaaaatgtcaagccctacacgttatcagctttcgtatacaccgtcttctgcattcgcctgtacgggccaatgggctagctggtcggcgtttgatgcttgaagtgatggaacggagtacggggttaaatccactaccctctccccacgcactctagtaattactctatttccacgtcatgtttccgggtgtgtgtgtccctgctcacgcagaaactgaagttcaaagcaggcggagtcacccatgttctttttgttgtccccagaacccaattcaggagttgggtccccagaggatctggagatacctggggactatctaactagctgattcccgcgtggtaagaggctctcaacctcgccaccacgtggtgccaagggccgggaaaagggagagcgggcaggagggagctgtatcaggggcatttaaagtgccttgacgtcacgcactgccaggaactcagctgagttttcagcaggacattccggtcatcttccctccctccccccgggcttctgtgcccaagtcctcggctcttccctcgctgtggcggagggaggagcaccgaactgtcggaacagccagcacaggggcgtatcagtctcctcttggctccgccctttctcctagctgctctcctcattggtcagtgggcggggcttcggctgtaccgcacacgcactgggacctctgggtggccgaacgagctggcctttcatgaattatgcatgacggcgtgcctcggccaggctggggctgggcgaggattggctgaaggggctgtaattcagcggtttccggagctgcggcggcgcagactgggagggggagccgggggttccgacgtcgcagccgagggaacaagccccaaccggatcctggacaggcaccccggcttggcgctgtctctccccctcggctcggagaggcccttcggcctgagggagcctcgccgcccgtccccggcacacgcgcagccccggcctctcggc

SEQ ID NO: 18112 - DNA, 2300 bp, Homo sapien
tcttgaaagagaaatggactcctagatcctgctcactgagattggtgtcagctgcctctgagggggcggtgggagggggaacacagggaaaggtgagttttagagagaggtgagacgtgggtttgtgggttgcttttgtttttgttttttttgtttttttgagacagagtctcactctgtctgcactcagacagtggattaccaactggcagattaccaacttactttagaatttaggagaaatgtattaaagtaatttaaattccttctactaaggattgaaaaagcttttggaaaaaagaggaattctactctgtagaattccactcaggctggagtgcaatggcgcgaatctcagctcattgcaacctctgccccccgggttcaagtgattctcctgcctcagcctcccgaatagctgggattacaggcatgcgccaccacgcctggctaattttgtatttttagtagagatggggtttctccatgttggtcaggctgaggtcgaactcccgacctcaggtgatccacccacctccgcctcccaaaatgagccactgcgcctggcctaatttttgtatttgtaacagagacggggtttcaccatcttgggccaggctggtcttgaactcctgacctcgtgatccacccgcctgggcctcccaaagtgctgggattacaggcatgagccaccgcgcctggcctaagagaggtgggcttttaaaaagggctttacaccaggcgcggtggctcccagcactttgagaggctgaaaccagcagatcacttgagctcaggagttcgagaccagcctggtcaaaatagtgtacaccccgtctcttaaaaaaataaaaattgaaaaaaataaaaattgaaattagctgggcgtggtggcaagcgcctatagtctcatctactcaggaggctgaagtgggaggattgcctgagcccaagaggtcgaggctgcagtgaactgtgatcagaccgctgcactccagcctgggtgacagagtgacaccctgtctcagaaaggggggttgggaggtgggctttattttccgtttgattgcccatcttaattctactctgttagggcaattctaaaaagaacttagaggagcttcgcagcccttcaccaccaccgtgaccccaaatacgttctctctttctccccccgccccccacaaacaaccccctaagcttacccctgagttagtaacctggttggggttggtgatgaggaaatccgagaggcctcttagaaaatattgtaaagggcaagggtccttttgtgctcaaaatctaggtaaaggcaaatacaagattttgcctataatttcagaatctcctggtccacccggctcccagatcttgaggattttcggatgagcaattcaagtgagagggaaacagagagcaacactcttagaacctgattccgttcctcagctcgcattcctccgcccgtcccgctcccgccgccagcggaggccctagtctcccgctccaactattccaaccatcccgggaagggtggggcgctcggctcttgggtccccctccgccgccccgcctcgtcgatctccccttctgccccggtccctccctttctggggtggggccagccaatcagcgatcagactccggagtttggcccgggagctggggagctcaccgatcccccgcccagcagttctggccgctgtcccggtgcgcacggacgtggctcgagtttcctctgctctccgctctcgcccgctagctctcctcccttccgctcctgcttctctccgggtctcccgctccagctccagccccacccggccggtcccgcacggctccgggtagccatggaggaccccacgctctatattgtcgagcggccgcttcccgggtaccccgacgccgaggccccggagccttcctccgctggggctcaggcagcggaggagccgtcgggggccggctcagaagagctgatcaagtcggaccaggtgaacggcgtgctggtgctgagcctcctggacaaaatcatcggggccgtagaccagatccagctgactcaagcacagctggaggagcggcaggcggagatggagggcgcagtgcagagcatccagggcgagctgagcaagctgggcaaggcgcacgccaccacgagcaatacggtgagcaagctgctggagaaggtgcgcaaggtcagcgtcaacgtgaagaccgtgcgcggcagcctggagcgccaggcggggcagatcaagaagctggaggtcaacgaggccgagctgctgcggcgccgcaac

SEQ ID NO: 18113 - DNA, 2300 bp, Homo sapien
caatgttgttagggcactaacccagtccctgcactgtcggtctcctttctgagtttgtgggttctctgtctgggttgaggaggccctgggtccccatagaccagtttttcactcttcctaatgataatggataccagactagaagtgaccttttgccaggaccatcatccagccagctggggaaacccaagtgtggtttcctaaggagggaaaagggttgccgcttttctgtgggaaagggagctggcgccacttcagacactcacagcaccagtgctgtgctagacagcaaaatgggggaggatgggcagcctccctatttctggactttctgcactaaggaccctccttgggcctgctcagaattgcctgctcccttgtacccagcatggatgaaaatatgctttggttaatcttctgaaacagcacatgggagttggggagtggctgtgggtgcctgtctccctgccccagtggaaggcttagagcagaaggtggaaagagcatgaaagcaggagtccagacctgggttcaagtgccaatgccaacactaacctgcgagtgatctctggcaagccacctgtcttctgcaggctttccttttcctgtctgtcaaatgagggggtgggatttgatggtctctccgatggcttactgttagtccctggaatcttgaaagagaaatggactcctagatcctgctcactgagattggtgtcagctgcctctgagggggcggtgggagggggaacacagggaaaggtgagttttagagagaggtgagacgtgggtttgtgggttgcttttgtttttgttttttttgtttttttgagacagagtctcactctgtctgcactcagacagtggattaccaactggcagattaccaacttactttagaatttaggagaaatgtattaaagtaatttaaattccttctactaaggattgaaaaagcttttggaaaaaagaggaattctactctgtagaattccactcaggctggagtgcaatggcgcgaatctcagctcattgcaacctctgccccccgggttcaagtgattctcctgcctcagcctcccgaatagctgggattacaggcatgcgccaccacgcctggctaattttgtatttttagtagagatggggtttctccatgttggtcaggctgaggtcgaactcccgacctcaggtgatccacccacctccgcctcccaaaatgagccactgcgcctggcctaatttttgtatttgtaacagagacggggtttcaccatcttgggccaggctggtcttgaactcctgacctcgtgatccacccgcctgggcctcccaaagtgctgggattacaggcatgagccaccgcgcctggcctaagagaggtgggcttttaaaaagggctttacaccaggcgcggtggctcccagcactttgagaggctgaaaccagcagatcacttgagctcaggagttcgagaccagcctggtcaaaatagtgtacaccccgtctcttaaaaaaataaaaattgaaaaaaataaaaattgaaattagctgggcgtggtggcaagcgcctatagtctcatctactcaggaggctgaagtgggaggattgcctgagcccaagaggtcgaggctgcagtgaactgtgatcagaccgctgcactccagcctgggtgacagagtgacaccctgtctcagaaaggggggttgggaggtgggctttattttccgtttgattgcccatcttaattctactctgttagggcaattctaaaaagaacttagaggagcttcgcagcccttcaccaccaccgtgaccccaaatacgttctctctttctccccccgccccccacaaacaaccccctaagcttacccctgagttagtaacctggttggggttggtgatgaggaaatccgagaggcctcttagaaaatattgtaaagggcaagggtccttttgtgctcaaaatctaggtaaaggcaaatacaagattttgcctataatttcagaatctcctggtccacccggctcccagatcttgaggattttcggatgagcaattcaagtgagagggaaacagagagcaacactcttagaacctgattccgttcctcagctcgcattcctccgcccgtcccgctcccgccgccagcggaggccctagtctcccgctccaactattccaaccatcccgggaagggtggggcgctcggctcttgggtccccctccgccgccccgcctcgtcgatctccccttctgccccggtccctccctttctggggtggggccagccaat

SEQ ID NO: 18114 - DNA, 2300 bp, Homo sapien
ttgacaacactcaagaccatcaaggaagacagcatggagggaaaataaatagaacactgaggaaagattgatggcaggagatggaagcaaacagaaaaggagttctgaaacaatattctttcaaagaagccgtgaaaagagttcaagggaattgaagtaagtccacaggaaaggctgtcttaaaagtggagtatgaaaaatttgtggttagcaagcagctgactgaggttaatttttttttaagtctcagaggaaggaaatgatattgtgtaacagttttctctaacttggcaggcttttaaatgtgggtcccgatctgtcttgccagaagggttgagagctagggagcagggagaaggagggtatgggtctctccaagactctgtgtcttaagaaggttgtattgaagtcaggttatatcttcactcacaatatgagacaataaattcaaataaaacgtccatttttgtccccttattttgtttaggctggtaaagcaggtttgatgatgtttttgtcaggttgacaaaattatcagcaacaagtttttatctggaatatctccctcattacacttgaatttcaacagggttccaccacccaggaagacagaataaccggttttctgagtttttcctgatacaattctggttatcacaaacgacttgagatccctactcttctttaaaagggcaagaaaagggaatcaatatcaatatttgataatggcatttaaaaaataatagacatcacttttgcgtttaaaaaatgtttttcaatatttaatttacaagttgagtacaagccataaaaaatgtttttaaaataaatttgaggaattgaaaactcctaagtggtcaattgagcccacatgaatctaccaaacaagactgaaatgtactttcacaacatatggtctgatgaggtttttcctgttaaacagagaaaaatagacccggggaagttgctggaaggcatgaaccatgtaccatttaaagagaggttttccatacttatgcaaatgagaccccgttaaagactctactacaggatctaaagctagccgctccccagtctggggctcaaatgttctcatctgtaaaataagggaaaagagaaagggtggtatatgtgtctgcgtattaattatttgagtgtgtgtgtgaattctttggatatgaaaataaagagagaagacattaattatttgggtgcgtatgtgtgaattaattctttggatatgaaaataaagagagggccgggcgcggtggctcacacctgtaatcccagcactttgggaggccgaggcgggtggaggccaggaccagtctgggcaacatggcgaaaccccatctctacaaaaaatacaaaaatagccgggtggcgtggtgcgtgcctgtaatctcagctactagggaggctgaggcaggagaatcccctgaacccgggaggcggaggctgcagtgagccgagaacgcgccactgcattcccgcctgggaaacagaccatctaaaaaaaaaaaaaaaaaaaaaaaaaaaaggccgggcgtggtggctcacgcttgtaatcccaacactttgggaggccgaggcgggtggatcacgaggtcagaattcgagactcagcctggccaacatagtgaaaccccgtctctacttaaaaaaaaaaaaaatacaaaaattagccgggcatggtggtgcgtgcctgtagtcccagctacttgggaggctgaggcaggagaatcgcttgaacccgggaggtggaggttgcagtgggccgagatcacgccactgcactcctgcttgagcaacagaatgagacttcaaaaaaaaaaaaagaaagagaaaagacaacctaccccagtataaggggtaagaaaaaggattcagggaggctcaggaacttaaggcctcgagcacctgcacctccagccccacccgctaaccctccccagcgtggagatacagcacaggggccaacatggcgtcagcacgctgggtctcgcctgcgacccccgtgactccgcactgctgcagcccgggcgaggctgcgccccattggccaactgcaatgaggtcattgcgggggcgggggccggcggcggcgcaggggcggggctttacggacgcaagcacgtcgaagcgctgctcctggagccgcggagggtgcgggtttggctgcggtggtttctgtggcggttgctgtggcggagtttggaggtgagtgggggctgtaggtttagcgcaacagggagcggccctcgatggacgtaggaaatccttctaagagcccccttgat

SEQ ID NO: 18115 - DNA, 2300 bp, Homo sapien
tacacatagatgtacacctacctgtacactcacagattgggtggtgattaaagggacagaatcggggaccagcttcttgttaggaatgcagtgttgccacggcatgacagcatggagcagttgagggaatggctgcccaggagaactcagaactcttgaaatgtagttccaggctgccatcattgccctgatattcaggccgtcagacagatgtgtgttgtaggccctgaacggcacagagagtggcagaacaggctacataaacagctcagcccagaattgtctttccagactgcctgccctcagtcacaacccccaccagggaagggaagcggccccaagactccttcctccttcacccactcgaggaaacagagttcctgttacgtggcatgaatgatgtcttttggccccagttaatccctctgagtcaccaggtggcctttgccaagtgctggagctggaagagatgatagagacactcatctggcgtcctgaggctctcctcacagctgttgaattctagaggtgcatttcagtgtcttggggcatggcaagactttggaggctccctgagcagagcagtggagatgcccaaaaagaaggaagaacctaggatggcagatggggccccccttgccctggggaacttcatgtttgtactttctcaggaagcacacatttccccagttcagcgggagagagtggggagactagcagggaaattgctttccagctttgtgctgggtggttggggtgagggtggccacggaaggaggtgaaatcaggctgacctcaagatagacccaagatgtcccagttctggccgctctaagtctctaaagcagcagctggtgggaggggcagtattgggcagtatgtcagggaggccacctgtctgctcacacagtacaattgatgtgcccctcccaggcatatatccctcttcctccttgctgggcccccatgggtagataaggtgactggaggggtgccaagaaaagggcggtgcccccacaggcatctgaaaacaaagctgctgctccatttgcccagtttgaagattagaatggttttgtgattagccaggagggggtgggggtcagagttctggacacctcactggagtcgggggtcagcataccctaccaaggctgacattcactcctaggtaatggcctgggaccctcaggtgacttgtccactctctggctatgtattgttgaatgaaaaggggacatgtaaatctcgtttcagctgttctgaaataacccttgccacatgggaacacagtctattcaacatgaagaattcaaacctaacacaagtgggtgagaagcaggaacccactgctaggccccaccgcgttccctcagaggtggtctcagtagctggaacttggagaagtagttttggtggggtgttgggacgtgggtgaatccaggtcctggtttggaattgctctggtgggaaccgtcagctaacgtcagttggaagctctgtgtcctccccctcctgagtcctgtttttcctggaggaccttggcccacccctgtggaatgtggggatgtggggaagaaagctgactgcttttactcccactcagaaaattcggttgcgctcttcttcaagggggtgctcctcagcctgcaccccagtgaaggggcctctgaggaactcccagtgccactggcaaacagtctgtaacctttgggccccagccacctcccagcccctgttctcttaattcctgccttcttggcttggagggaggaatctccatttgtaaaagctgagttagggaactagagggttcctgaagctttaaagcgcctcaaagccctcaccctgcacgtgacctgtcacctggagcctgccccagcccccacgcctgcctgttcttataggggctccggtgcctccagggtcacacagcaccatgtggaaactattcctcagggcagctctccttggcctttttatcccctgaatcatgcatttttctgcccttatttggtgtggtttggttgctgggcagctgtccagggtgagtttgcaggaggaagcacagccaagcagcctcgctctgcttatgggacagtcttcctcccaccctccctgagagtgaaagggccccacagagaccatcaggcatggatgctgaactgctgggaagggagctcaggctttttctttttagtccccaagagaagaattctttctcagatgtttttgtggttggagaatatttttgccattgctttgagaagacttcccctcctaactccccctctttcctt

SEQ ID NO: 18116 - DNA, 2300 bp, Homo sapien
gcattgcgttgtggaattgggaagggcacctgtgctggttgcacttgctttgattgaatgtggaatgaagtacgtagatgcagttcagtttataagacaaaaaagaaggggagtgttaaattccaaacagctgctttacttaagatgcgattacgcttcagagataccaatgggcattgctgtgttcagcagaaagaaatgtaaatgaaggctgacttgattgtggcatttagagggaactcctggtacctggaaatgtgaatctggactcttacctgtgtcatcaaagtagtgatggattcaatactcctcaaccactctcctaatgatcagaacaaaagcaaacaagaaatctctctataaaatgaataaaatgtttaagaaaaaaaaagagttcgagaccagcctggacaacatggtgaaatcccatccctacaaaggttaactgggcttggtggcacgtgcctgtaatcccagctactcaggagactgagacaggagaatggcttgaacctgggtggctgaggttcccgtgagctgagattaaaaaaaaaaatcatacttccctagtatctaaagttgatatctgattccaggcctctttcaactttttttgtttgtttgtttgtttttttgatatggagtctcgctctgtcatccaggctggaatgcaaatggcacgatcttggctcactgcaacttccacctccagcgttcaagcgattctcctgcctcagcttcccaagtagctgggactacaggcgtgtgccaccaagcctggctaactttttttcttttttttttttttgagagggagtcttgctctgtcccccaggctggagtgcagtggtgtgatcttggctcactgcaacctccgcctctccggttcacgccattctcctgccttagcctcccgagtagctgggagtacaggcgctcgccaacacgcccggctaattttttgtatttttagtagagatggagtttcaccgtgttagccaggagggtcttgatctcctgacctcgtatccgcccgtcttggcctcccaaagtgctgggattacaggcgtgagccaccgcgcccagcacctggctaacttttgtatttttagtacagacggggtttcactgtatgttggccaggctggtctcaaacccctgacttgaggtgatctgcaagcctcagcctcccagagtgctgggattacaggcgtaagccaccgctcctggcctaaggttggctatttttatggttatttcttgattatatgataaacaaggggtgggttagtaatgaatttttcagaaaaggggtggggatcccccccaactgaaggttcctccactgtttagaccatatagggtaacttctggacgttgccatggcatttgtaaactgcctggcgctgctaggagtgtctttagcatactaatgcattataattagcgtataatgagcagtgaggacgatcagaggtcaccttcctgtcttggttttggcaggttttgaccagtttctttgctgcattctgttttatcagcggggtcttgtgaccttttatcttgtgctgacctcctgtctcatcctgtgacgaaggcctaacctcctgggaattcagcccagcaggtctctgcctcattttacccagcccctgttcaagatggagtcgctctggttggaaacttctgacaaaatgacagctcctgttatgttgctgctgctgccgccaatggacagcctttaacgtgcccgccagccctgctccaccgccggcctgggctcacatggccccatccctcctcgaacctcctagcctgttagttactcaaatctgcaagctctctgccttctcagggccttcaataaatgcatttcttctgtctggaaggctcttcctttccctcttctagccaattcctattcatccctgagtttcagattaaaagtcacttcctttggaaaccttacttcgctacttcgctacttactgcactacttcgcagcatcacaactatgatggaaatccttacttacgttaaatatctggtttctaggtcacctccctgacggggacggtagggaccgtcttctcgttcatcagtagggaagtagctatggcagtgcctgatacaaaataaactccaaatgtgtatttattagatggttggatggaagttatttgcgtgtgaaagcgcgttttacccgaaggcgctctgtgagggccagcgggtccccttcggccctggagccggggtcacacgctccccaccgcgtgcggtcacgagacgcccccaaggga

SEQ ID NO: 18117 - DNA, 2300 bp, Homo sapien
tgtgctgggtgagcctcctggaagcatatgggctcctaggagccttctccgccctgcgttgaaaccaacatgtccccaggcccctggagcatgaggggacaggccgtgctgagggtgatgctgaggcgggctggttgggcctctgtccccgcagtgtgtgacacaggcctgggcctgctggggccgctgggggaggacgctgtggcctctgtactggatgtgaatgtagtaggtactgtgcgggtgctgcaggacttcctgccagacatgaagcggccgggttcgggacgcgtgttggtgactgggagcatgggaggattgatgggtgagtggcagggaccgggcccggagctccagattctttgtgtgcagagctgagccttgaaggcaggctccttagggggtggggtgcaatcagcttggaggggcactgcctgccgggggatgaccccctggccgctgcgcctcaggaacctcatcttcccacccaagggctgcctttcaatgacgtttattgcgccagcaagttcgcgctcgaaggcttatgcgagagtctggcggttctgctgctgccctttggggtccagtgagtcaacacccccgtctcctcaaccctcttaactctgacctagagatgccgagcaccctgtcctgcggaagccgctctggtctctgcccggcttacatttgctgcgtgccaggcacttaggctggagcattggcacgcattgtgccacttgctgacctggctgctgaagtgttggtattgttatggggaagctccagccaagagaggttaggtgactggcccaaggtcatgcagcggccggggatcccgccaggttcgaattctgacaccagggctacctggcagcctcagatgggtttgggagggctgtcgagcaataacccgctattcaaatgttctggttatccccagcgctctttccaccttcgggacgcagcggtgctgttctgggtcgtggccagggccggggtcggggccggtgctggggcaggagatgggacttggcgcctgggtcgcctccgtccctgcccacttgcggctctcgggccagcagcgtgagcctgatcgagtgcggccctgtggacaccgccttcatgcagaaggtgttgggcggtcccgaccaggtgatggaccgcacgaacacccggaccttccgcctcttgcactaatacctccaccacagcaaggagatctaccgcgaggaggcgcagcaccctgaggaggtggtgaaggtgagcggggggcgggactccgggagcgggggcggtgcgtcgtcctgcgcgcagcccgggccagagctcctctcccgccgccgcaggtcttcctcaccgctatgcgcgccccgaagccgaccctgcgctacttcacaaccaggcgcttcctgcaccagctgctgatgcgcctggacgacccctttggcttcgactacgccgccgccatgcaccgggacgtgttcgccgacgatcccgcagaggccgaggctggggccggggctggggccgaggccgggggcggggccggtgggatgggagaccctgagctcagcgatcctctggccgccccgcaagaaaggctccgtcagccactgtctcccgcgccctcctttgtctcctgggcctgtgcggtccctggggatgggacggcggtgacggctgtggatggctaattaagacagatcacgttagcccgttatatctgcgcggctaggcgcgatggctgtcgcctataatcccagagctttggaaggccgaggcaggaggatcgctccaggccaggagttccagaccagcctgagcaacatagtgagacaccccatctctaaaataaaaaaattagcacagtggcaccattccttgagctcaggagttggaggctgcagtgggcatgatcgagctactgctctccagcttgggcgatagagtgagacactgtcaattaattaatctaatcaaccaaccaacccaacaacccagaaaccaaggtccagaaagaagccagcccaggatcatgcctcaagtccacagtaaagcccagacacagtcactggatacccaaggggcatctgcaggacgagttaggtgggacttgggttggggtagagtcaggttgtgacctgcactccattagccatgagacctcaggcaagttccttgctttctctgagtgctttcctttcctttcccttttcttttcttttttgtttttcttttgttttgagacggagtttcactcttgttgcccagcctggagtgcaatagcgcggtctcagttc

SEQ ID NO: 18118 - DNA, 2300 bp, Homo sapien
tctgggaagctgcctcaccaggaggtccagctggggctacaggactggctactttgctacaatggcccatctttcctgagcccagtggagggtcccaggggggcagaagtcattgataggggccagtagggttgtagagccactgtctgaacttctgtggaggtctggtgcaggggaggtgtgaacagataggaggctaggtgaggatgcagcagaggaagggggcaggagtgccccaggagggggcggtaccgaggcagggattcagctgggtctgagagggagggaaggctgagggggatggccctttggagtgggcagggacatgaccacagaaagcctgggaagtggaaacagacaggagcctgctggagctcttggagctttgtgtggggcactaggggaaggaggcaggcactccaccctgacctgcccctacctctggatgagggtcttctctgcctgttggatgatgtgctgcccctgctcttggaggaagaggcctcccagccaccccctcctgccagtcgccttgccctgctgacccagacagatctgctatccctacagcatccaggaaggccacagggagggggcccaggtggcatgggtttctgaggcctgggatctgctctcagtcccgctctcgccaaccccctttgcccctctgtgacagtgtgtgtacatatgcgtgcatgtgtgtacctgtgtggtgtggctcacaaggtcacccctgggggtgggataataagaggtaaagtgtgaccccctctcttccgtacattcattttttcaagcttgtgaatattcacattgttaatataatcttctgcagtcccatgacttcgaatagcacttagatgccgatgacccccccaccaaagaaaccccactgtctcccacagactccaggtctgtatctccaactgcctactcaatacaacacgtccacctgatacaatgaacttaatgtgtctaaaccccaattccacatttccagtcctcctaccggctcctcccccagtcttctctactttactatatgacaactccatttttcccaatactggttttaaaaaccctggagtagtccttgactccagtctctctcacctttcaaccaattcagcagcaaatactgacagctctacctttgctcatcaaagcatatccccaaatcaccctattccagactgcacactgtcatctctcccttcaattacagcagtagcctcctaactagttttcttgattccactcctgcccatcagcagtgaaattaccccagagcagttaaaatgatcttttaggatgggcacagtggctcacgcctgtaataccagcactttgggaggtggaggctggctgatccccttaggttgggagttcaagaccatcctcaccaacagggagaaaccccatctctactaaaaatacaaaaattagccggatgtggtgggacgtgtctgtaatcccaactacttgggaggctgagacaggagaactgcttgaacccgggaggtggaggttgcagtgagccagaatcgtgccacagcactccagcctgggcaagaagcgcgaaactccgtctcaaaataaaataatcttctaaaaatgacagggccaggtggggtggcacttttttataatccgagcactttgggaggctgaggtgggcagatcgcttgacatcaggggtttgagaccagcctggccaacatggtgaaactccgtctctactaaaaatactaaaaattagctgggcgtggtggcgggtgcctgtaatcccagctactcgggaggctgatgcaggagaatcgcctgaaccaggcagatgcaggatgcagtgagccaagattaagacactgcactccaacctaagcaatactttgtctcaaaaataaaaaaaagcctgggaaacaaagtgagaccccgtctctacaaaaaagtcaaaaaattagctgggtatggtggcagtgatggcacacacctgtagtcccggctacttgggaagctttttaatattttttgcagagaccgggtctcactctgttacctggcctggtcttgaactcctgggctccaacaatcccctttcctgggcctcccaaagtgctgggattacaggcatgagccaccgtgcccagcctcaaagcatattttaaaggatagaaataaacagccatatgaagagatacagacagggcggtctggaagggtccagagcaggagcttctatctccatagagttggggttacgtcaccctctgggcacattctgtcagcctccacacgttcag

SEQ ID NO: 18119 - DNA, 2300 bp, Homo sapien
gaagagagggggtcacactttacctcttattatcccacccccaggggtgaccttgtgagccacaccacacaggtacacacatgcacgcatatgtacacacactgtcacagaggggcaaagggggttggcgagagcgggactgagagcagatcccaggcctcagaaacccatgccacctgggccccctccctgtggccttcctggatgctgtagggatagcagatctgtctgggtcagcaggtcagggcgactggcaggagggggtggctgggaggcctcttcctccaagagcaggggcagcacatcatccaacaggcagagaagaccctcatccgaggtaggggcaggtcagggtggagtgcctgcctccttcccccagtgccccacacaaagctccaagagctccaacaggctcctgtctgtttccacttcccaggctttctgtggtcatgtccctgcccactccaaagggccatccccctcagccttgcctccctctcagacccagctgaatccctgcctcggtaccgccccctcctggggcactcctgcccccttcctctgctgcatcctcacctagcctcctatctgttcacacctcccctgcaccagacctccacagaagttcagacagtggctctacaaccctactggcccctatcaatgactcctgcccccctgggaccctccactgggctcaggaaagacgggccattgtagcaaagtagccagtcctgtagccccagctggacctcctggtgaggcagcttgccagatggtggggatcgctcagtcctctggggcagaacagggtgagtggggctgtctccctttgattcacttagccctctttcttctttacacatttgcaaaatgtgacagtagtcatattactattcattctaataacagtccttgctggctattaaacctctatactagcactttcaggcattatctccaccattactaaaaccgattagataggtattattatacccattttacagataagaaagactcagagggccggtcgcggtggctcatgcctgtatgcccagcaatctgagaggccgaggcgggcggatcacctaaggtcgagagtttgagaccagcctgaccaacatggagaaaccccgtctctaccgaacatacaaaattagccggtatcccagctacttgggaggctgaggcaggagaatcacttgaatctgggaagcggagattgtggtgagccgagattgccccattgcactccagcctaggcaacaagagcgaaactctgtctcagaaaataaaaaaaaaagaaagaaagaaagaaaagaaagactgagagaaagcaaggaacttgcctgaggtctcatggctaatggggtccaagtcacaacctgactctaccccaagccaattcccacctaactcctcctgcagatgccccttggttatccagagactgtgtctggcctttaatatggacttgaggtgtgatcctgggctggcttctttctggaccttggtttctgagtttttcggttggttggttcatttgattaattgacagggtctcactctgtcacccaggctggagtgcagtggccccatcatgctcactgcaccctccaactcctgggctcaaggaatggtgccactgtgctgatttttaaattttctttatttttgtagagatgggggtctcactgtgttgctctggctggtctccaactccggggcttgagcgatcctcctgcctccgcctcccaaagcgctggcattacaggcgacagccatcgcgcctagctgcgctggtaaaactggctaacgcgatctatcttaattagccacccacagctgctaccgccgccccatccccagggaccacacagacccaggggacaaagaagggcgcgggagacagcggctgaggaagcctttactgcggggcggccggaggatcgccgagctcagggtcccccaccgcaccgcgcccggcctcgtcctctgccccaggcccggccccgcccccagcctcggccccagcctcggcctttgccggaacgtcgccgaacacttcccggtgcatggcggtgacgtagttggagccgctggggtcgtccaggcgcatccgcagcaggggcaggaagcgctcggtggtgaagtagcgcagggtcggcttcggggcgcgcaaagcggtgaggaagacctgcggcggcgggaggagagctgtggccaccgctgcgcgccggaggacgcaccgcccccactcctggagtccagcccggcgctcacctccgccacctcct

SEQ ID NO: 18120 - DNA, 2300 bp, Homo sapien
ggctggagtgcagtggcgtgatctcggctcattgcaatctctgcctcccaggttcaagcgattctcctgcctcagcctcctgagtagctggaatcacaagtaccgccaccacacccagctaattttttgtatttttagtagagacggggtttcactatgttggccaggctagtcttgaactcctgacctcaggtgatctgcctgcctcagcttcccaaagtgctgggattacaggcgtgagccaccgcgcctggccatgtattatagatttatttatggtggcatgattcctgtctgcaaccccaagacacacagtactctataccccaggatggcagggacattgttttgttcactggtccatccctgtgggaggcagtaaaatacacatttactcaataaaaatgactctgtatgtggtgtgtcagactgtgtgtccagatgtcttgggacattctctggcagcctttgctgtttgtgtcttcaaatcagaccctatctttaaatctaacatgtctcctgtgagaagcctggtcccttaatacctttgtggctctacaactcttccctccttgactgtatctcttcctccaggtctttgctgttttcctgaatcaccttatctaaaatagcatctccttttctccatcataagcccaggttttgtggggctgggggcttatttgcttttggagaccgtcttcaagaatacaaaagataaacacaaaattacatataaaagtgagttttgtttttttttttaagtttcggataccacggcacattactggaatcttggagactggcttctctcccttttgatctccatgcacaacttacctgagatgtattctaatagcaacctggcttcccctccacactcagcctttcaagcgcccattagcttcgcagtaaatctcccacactaggtatccagcctttgcctttttcttttttctttttttttttccagagggagtttcgcttttttttttttttttttttttttgagacggagtctcactctgtcacccaggctggagtgtagtggtgcgatctcggctcactgcaagctcttcctcccgggttcacgccattctcctgcctcagcctcccgagtagctgggactacaggcgtctgccaccatgcccggctaatttttttttgtatttttagtagagacggggtttcaccgtgttagccaggatggtctcgatctcctgacctcgtgatccgcccgcctcggcctcccaaagtgctgggattacaggcgtcagccaccgcgcccggccgggagtttcgctcttgttgcccaggttggagtgcaatggcacaatcttggctcaccgcgacctccgcccacgggttcaggcgattctcctgcctcagcctcctgagtagctgggattacagccatgcgccaccacgctcgtctaattttgtatttttagtagagacaaggtttctccatattggtcaggttggtctcgaactcccgacctcagatgctctgcccacctcggcatcccaaagtgctgggattacaggcgtgagccaccgcgcccaatcagcctttgcctttttctcctgtccacagagaccccgcaaacaagcgcatcagaggatctgggtggtgcgagagcctcctacagcagccaggtacacacaaggcctcagtttttccatctgtgaaatgggtacgtggacagacctgtccagtagcctcccatgtgagaatcctcggactgagagggtactaggagggctaatacagcgcagccctgtgattccccacctctgtccctggaatgaaggaaatctgggtgttagttctggctttgccgatgcctcttgggtggcctggctgaaactaatctctcctcatcaggccagaagggaatctgtgaaatgggctttgaaacctgccttgcctttctccgcccggtcccagcgggggtccgatcggcatcaaggcttcacccactcccagagccttcgggatcagccccaccccatcagcaggacacagcccatgccactggaaatctcgcgagaatcccgcgctgaagcgaagtcgagacgtttgaccttcctccgtttccgtagttccgagttgcggtttctccgttagtgcttccgggttgcagccagggaagcctccgcggtggtgcaagtggaacccaagccttgaggtttcagtgagtagggggccgacgtgagctttagcgtccccctttagcctccctcttcgattccttgaagaccctggtgcagcttagcaagagggcccaggattttt

SEQ ID NO: 18121 - DNA, 2300 bp, Homo sapien
ggcacattactggaatcttggagactggcttctctcccttttgatctccatgcacaacttacctgagatgtattctaatagcaacctggcttcccctccacactcagcctttcaagcgcccattagcttcgcagtaaatctcccacactaggtatccagcctttgcctttttcttttttctttttttttttccagagggagtttcgcttttttttttttttttttttttttgagacggagtctcactctgtcacccaggctggagtgtagtggtgcgatctcggctcactgcaagctcttcctcccgggttcacgccattctcctgcctcagcctcccgagtagctgggactacaggcgtctgccaccatgcccggctaatttttttttgtatttttagtagagacggggtttcaccgtgttagccaggatggtctcgatctcctgacctcgtgatccgcccgcctcggcctcccaaagtgctgggattacaggcgtcagccaccgcgcccggccgggagtttcgctcttgttgcccaggttggagtgcaatggcacaatcttggctcaccgcgacctccgcccacgggttcaggcgattctcctgcctcagcctcctgagtagctgggattacagccatgcgccaccacgctcgtctaattttgtatttttagtagagacaaggtttctccatattggtcaggttggtctcgaactcccgacctcagatgctctgcccacctcggcatcccaaagtgctgggattacaggcgtgagccaccgcgcccaatcagcctttgcctttttctcctgtccacagagaccccgcaaacaagcgcatcagaggatctgggtggtgcgagagcctcctacagcagccaggtacacacaaggcctcagtttttccatctgtgaaatgggtacgtggacagacctgtccagtagcctcccatgtgagaatcctcggactgagagggtactaggagggctaatacagcgcagccctgtgattccccacctctgtccctggaatgaaggaaatctgggtgttagttctggctttgccgatgcctcttgggtggcctggctgaaactaatctctcctcatcaggccagaagggaatctgtgaaatgggctttgaaacctgccttgcctttctccgcccggtcccagcgggggtccgatcggcatcaaggcttcacccactcccagagccttcgggatcagccccaccccatcagcaggacacagcccatgccactggaaatctcgcgagaatcccgcgctgaagcgaagtcgagacgtttgaccttcctccgtttccgtagttccgagttgcggtttctccgttagtgcttccgggttgcagccagggaagcctccgcggtggtgcaagtggaacccaagccttgaggtttcagtgagtagggggccgacgtgagctttagcgtccccctttagcctccctcttcgattccttgaagaccctggtgcagcttagcaagagggcccaggatttttggatccccagccctgtgacaagggttcctgtccagtttccccctcccaggatttcgactcagttcagcgaagtcaccgccccgtctgagaaatgaggacaccaaggcttagagcacagccccgaggcgccgtctaccaggccccgtcccctcccccggctcctgtcggtcagcactgaaaccccgtccctgctccaggcctccttctctggggtccaaggtcccatacaggcctctgcctcggccgcaggcccttcagtcaccgtcgcctcgtctccctgactgtccgcaggcctgggcagcatggccgtattccggtcgggtctcctggtgctgacgacgccgctggcctccctagcccctcgcctggcctccatcctgacctcggcggcccggctggtgaatcacacactctatgttcacctgcagccgggcatgagcctggagggcccggctcagccccagtccagccccgtgcaggccacgtttgaggttcttgatttcatcacgcacctctatgctggcgccgacgtccacaggcacttggacgtcagaatcctactgaccaatatccgaaccaagagcacctttctccctcccctgcccacctcagtccagaatctcgcccacccgccagaagtcgtgttgacagatttccagaccctggatggaagccagtacaacccggtcaaacagcagctagtgcgttacgccaccagctgttacagctgttgtccgcgactggcctcggtgctgctatactccgattatgggatagg

SEQ ID NO: 18122 - DNA, 2300 bp, Homo sapien
ccagaagggaatctgtgaaatgggctttgaaacctgccttgcctttctccgcccggtcccagcgggggtccgatcggcatcaaggcttcacccactcccagagccttcgggatcagccccaccccatcagcaggacacagcccatgccactggaaatctcgcgagaatcccgcgctgaagcgaagtcgagacgtttgaccttcctccgtttccgtagttccgagttgcggtttctccgttagtgcttccgggttgcagccagggaagcctccgcggtggtgcaagtggaacccaagccttgaggtttcagtgagtagggggccgacgtgagctttagcgtccccctttagcctccctcttcgattccttgaagaccctggtgcagcttagcaagagggcccaggatttttggatccccagccctgtgacaagggttcctgtccagtttccccctcccaggatttcgactcagttcagcgaagtcaccgccccgtctgagaaatgaggacaccaaggcttagagcacagccccgaggcgccgtctaccaggccccgtcccctcccccggctcctgtcggtcagcactgaaaccccgtccctgctccaggcctccttctctggggtccaaggtcccatacaggcctctgcctcggccgcaggcccttcagtcaccgtcgcctcgtctccctgactgtccgcaggcctgggcagcatggccgtattccggtcgggtctcctggtgctgacgacgccgctggcctccctagcccctcgcctggcctccatcctgacctcggcggcccggctggtgaatcacacactctatgttcacctgcagccgggcatgagcctggagggcccggctcagccccagtccagccccgtgcaggccacgtttgaggttcttgatttcatcacgcacctctatgctggcgccgacgtccacaggcacttggacgtcagaatcctactgaccaatatccgaaccaagagcacctttctccctcccctgcccacctcagtccagaatctcgcccacccgccagaagtcgtgttgacagatttccagaccctggatggaagccagtacaacccggtcaaacagcagctagtgcgttacgccaccagctgttacagctgttgtccgcgactggcctcggtgctgctatactccgattatgggataggagaagtgcccgtggagcccctggatgtccccttaccctccacgatcaggccagcttcccccgtggccgggtctccaaagcagccggtgcgtggctactaccgtggcgctgtcggtggcacgtttgaccgcctgcacaacgcccacaaggtgttgctcagtgtcgcgtgcatcctggcccaggagcagcttgtggtgggagtagcagacaaagatctgttgaagagtgagtaagagggaccctggactagggtggaggatccccaaatctccccacccccgacccttatgccgagatcaaggaagggtagggccattcattacttcccacccttcccaaatgtcacagtggttgacactcaattggtgctaaggccattttgtcaaatgaacagctttctcagcatgtggtccagtcaccactcaatcagaataccccaaatgtgaagcaaagggatctgcattttagcaagttttccaggtgatacaccctaatgagacactgggaatgaatgggtgagtgagctgcaggtagcagtgccacagacaggaggaggaaactcaagcatggcatgggtcttggaattttccatctgcctctgatgccctctggcactgctcgttctctggagtggtttcctggtggcttattctctggacacatgccagcccttggagtgactattgtgcttgcctgtttcttcaccttcatgctcccctcaccatcaccataggccttaccagttgaaccctttctgccaccccctctggggatactgtacttagggacactttttcccaaactggcccatactctcctccccaataaaaagatctcactgttcttctgggctccttccccaggcaagttgctccctgagctgctccaaccttatacagaacgtgtggaacatctgagtgaattcctggtggacatcaagccctccttgacttttgatgtcatccccctgctggacccctatgggcccgctggctctgacccctccctggagttcctggtggtcagcgaggagacctatcgtggggggatggccatcaaccgcttccgccttgagaatgtaacccctgagggagactggcagagggagtggat

SEQ ID NO: 18123 - DNA, 2300 bp, Homo sapien
agttgtctgtctgtgttgtccagatattctccataaagatggcatcatcaacaggaaggtcctaggcagccgggtgtttgggaataaggtaaacaataacttcctaagggctcctaagccgctactagacccaggggtcagggtccagtggacctctctggtctggcccagaatgccatttccattgatctgttcccaacaccaccttgctcgggctggctgcctcttctagagaaggtaacctctgccctctgttcccctccccagaagcagctgaagatactcacggacattatgtggccaattatcgcaaagctggcccgagaggagatggatcgggctgtggctgagggtgagtgggagggaggatggcaacagctaaggggacagttaagctgtttcttcccctgggagcttccctgcccaacgtgggactgtctgttcaccctgggactgtgttctgcctgggagaacgtcggcactgctggcggtgactggggtctccccacaggaaagcgtgtgtgtgtgattgatgccgctgtgttgcttgaagccggctggcagaacctggtccatgaggtgtggactgctgtcatcccagagactgaggtatctcgccccaccccccacaccatccctactgcagatcctatcctgtgagctggaattcttcctgacaaatgtctcgtctgtgctcaggctgtaagacgcattgtggagagggatggcctcagtgaagccgcggctcaaagccggctgcagagccagatgagcgggcagcagcttgtggaacagagccacgtggtgctcagcaccttgtgggagccgcatatcacccaacgccaggttggtgcccagggcaaggccgggttgtggggaaggagtctccagtgggtactgcctgaccctgccctctcttcctcccaacatcctggcctgtctgaaggtggagaaagcctgggccctcttgcagaagcgcattcccaagactcatcaggccctcgactgaaaagttctcagtggggccagactggctcctggagctgacaagcgaccccgtggtgaggagaaatgggggccttgatgctcaccctggttcaggcccagaggtccaagctatactgtgcaggacatggccaggcctggtggacacaggaagcctacccaacacgctggtatttggccaacactgaggatgtggttcatgggggagcagtcccctccccactcttgcccatgggtgactcttacccacagctgactagggccagcgcaaatactggaacctgtaacagaattaaaggtgaatgttctgagatgttgcttgtatggtgtctgcttcctgttccaatgcccctaagtatctttgggatccttaagccacaagtgcagggcccaggcctgagctggaagcctgggcaatgcagtggttaagagaatggcctttgaggctagccagaggcgagctttggccctcccactgaccagctgtgttcttctgagtaaggtgtagactttctaggtactgccgtgttttattgtttttgttttgtttttaatatgagaggccgcataacctagctagcaggttctttgcaagggttcattccacatgcatcctgccagacactgggctgggtgttggaagatcagccttccgcgcgccaggcggggcctctgccctcacagagcttgcagcctggtggggtcggacgatgtggctgggggcttctctgcccggttcctgacacaccggccagcagtgcaggtccggtgagcgcggggaggccgccctcagggtaacgtggggagccggccggccggacagtgcgcgtgcacacactatctgcggcggtgtgctgacaagccaattgaggggactccatcttacaaaacgcgcttcatgtcgccgccattccactgcctaacccggggagggcaggcacggcggggagcagtctcgaaggaggctggcgccaggccaagcgccgggccttgacggctggaaccgtggagtaaagtctttgggctgcgcatgcgcgatgcttcgccctgccccacctctcggtcgcggattggcgggcgcgggtcacgtgggcacgccacccgcttcctcgccgcagggggcccgcccgctggcccgtttccggtccggtgggtacaagatgacggagccgggcgcctctcccgaggacccttgggtcaaggcaagccccgtgggcgcgcacgccggcgaggggagggcgggtcgggctcgtgcacgtaggggggccggaagacgaggggcttccctcctgtcc

SEQ ID NO: 18124 - DNA, 2300 bp, Homo sapien
gctgttctccaggtttccaagaaccggtcagtaaagctggtttttcaattggtgcaggacgccaatcacaatctcccgcagggtctggcgagggcagcagaggaagaaatagacaatgcccaagtcaacgcagagtagtttccaagatgcctgcctagatcagccatgtactttagaaaagtgctttaaaaatagccccccgggggccaggtgtggtggctcacgcctataatcccagcacttcgggaggccaaggcgggtggatcacctgaatttcaagaccagcctggccaacatagtgaaaccccgtctctactaaaaatacaaaaattaggtgtggtggcacatgcctgtaatcccagctacacaggaggctgaggtatgagaatcgcctgaacccaggaggtggaagttgcagtgagctgacatcacaccactgcactccagccttggtgacagagtgagactccgtctcaaaaaaaaaaaaaaaaagcccccaggaagtactgatgtctgcagtttaatttgaggtgctcctgaagcaagatggagagatggaaatatagtaaaatgtttcggtaaaatttagggagcgggtatacgagtgttcactgtgaactcctctcaacatcgcaatatgtttaatgtgtttcacaataaaaatgttgggaaacgaggccaggcacagtggctcatgcctgtaatcccagcactttgggaggccgaggcgggtggatcacaaggtcaggagatcgagaccatcctggctaacacggtgaaaccccgtcttactaaaaaatacaaaaaattggccaggtatggtggcacacgcctgtagtcccagctactcgggaggctgaggcaggagaatggcgtgaacccgggaggcggaggttgcagtgagccgagattgtgccactgcactccagcctgggcgacagaacgagactcccgtctcaaaaaaaaaaatgttgagaaacaaacaagaaatctcagacacaagtttaaaacctcagaaaaagcaaccagacttcaattagaagacttagtgcaataccattagcacatctccattataaataaatttttaaaaagctcttggggcaactactttagggggcctaaaggtagggtcccagaatttgcgtttccaattctgctgcagatgcctggggcttccatacaggggcagcgataacatgggctagacaaaagccaagagctggacttcacattgagctcacgtcacacttgccgaatgaaaccgtaacatgaagatgtgggttagacagcaaagaaaagggaaaataccagggccctcaaagctgtagaaacgcccttaagatctaaaagcagctgccacgcttttctcaacagctgatggcttgggccactttgcttgatggtagagaaaaccgcagaccctgtgcctattgttgccccatacctgaggcttacagtgctcctcgatccagctgaagacacacgctgacagctcctggaagctggccactgagatggaggcattgaaggactggaacagggaatccatgatgccttgaaacacgttgaacttgacctggtcagagacctggtcctccccttcatgggggttgtcctggtgtgccttcacaatctgctcatagttcctaaaagcatgcaggccagggctgaggtgctgcagcagctccgcccacccaagaagaatgacgggactatcctgtgtactcccaggaatggcagccccagagagcttctgggtggggttcagtatcagggagatactgcttccaggtcaggaaaggtggccctctctctccaaccttccttacattaatccaacaggcatttcctgagtgtctgccatgtgtaaggacagttggggatacacagtcctactggctagctcaggaactaagagtattatctgtacagcagtaactgatgtggcctttgaacaagggagggtgtgcaatgaagttgcctcagaagttctggttccccccattcagcacccctcttacactttcatgatctttagggcggtgacatccttgcgtaacgtggacacctcctcctcctgctttttcttctccttgtgcaaaaactgaatgtagtcaatggctagggtgggggcaagaaaaaaaggacaggtacagaagtattctcaaccaagaagataaggctgactttgttccccttaccccagaccccaactatcccatggcaatcaccacaccaaggccgagccatgggtgggtaggaggcactggcctcttcacagccccgcttggctccat

SEQ ID NO: 18125 - DNA, 2300 bp, Homo sapien
ctttgctgggctcccttaggcataaaaagaaatgtaggataactaacggcttttgtgtaccaacaaatggacaagatacgcatttgttctccctgccacgattatcagtacactgtccccacgtttccctttattcctgcttctttaactggctacgcctaagtaagtgttcaacctcacacccacgccacttgtagatggaggaggaaagaaaattagaagaataaataatcctgtatggcttagtttccatgtgagatgatagatccagagcaaggtggaacacctcagggagcacccactgggaaagacagaactccttcctcaggggtagcaagtgaccccaggcggatgtggtttcagagctcaaggaattatctagtgccctgaccacaccagagatgcagaaagaaatccaggagttaaagaaggaatgcgctggctacagagagagattgaagaacattaaagcagctaccaatcatgtgactccagaagagaaagagcaggtgagctggaaggctgtaggaccgctgtgcaggtccagagtgaacatcagggctgagccccagagggctgctgtggttctgaggagttagaggaacttgctttttccttctaggtgtacagagagaggcagaagtactgtaaggagtggaggaagaggaagaggatggtaagtgtgtgggagctccgagacaggccctggaggtgcctttgaaaatggcaggcaccagatcagccgctacacaatatcataaactgacaggcagtgcccagtgctgcccatctgaaaacgggtggttttatttcttgtcaggctacagagctgtctgatgcaatacttgaaggataccccaagagcaagaagcagttctttgtaagtggagctctcttccttctttgcttccctgtggtcttatcctggtgacatctcattcacttgtctccctgtctcacaggaggaagttgggatagagacggatgaagattacaacgtcacactcccagacccctgaggggcccacggtcaggactggtggggactgcaggatgtcagaagagtgagatgtcttgcactggctaccttgtttttggttggcttttgttgttgttcctgctactttcacctttaagcagagcagtcaggagacaagcataaaccagagcactgggtagagaggatgagggctggtggctgggggtagacccagcccatttcattgtctaaattgcagtagcttgaggttaacatttagacttggaacaatgctaaaggaaagcatttggcaatatttattataatttaattttatataaaaatatttaatttcctctggatagtcaaacctgccagatatcaaacctgaggaaggcagaagtgaatttggagaactagggtagagagaggttgctataaaacgagcatttggagggcccacggcttcactcaggacctgctgggcttgtgtaccccaggagcccttttaagtatcttttgtacgcttttcaccccacccccaagtcctgggagaaatgcaggcaacactgagacatgggagaggccaagatatgcttgacagaaagggtgattttgaggctcagttaatatttcaaaattgtaaccgtagcaaaactgcattggtatttagaaaaataaaaaatttccaatatgtagtgctgtgttatacctgcctctgccatgcagcatcatagcctgtgggaaccgggagggcttcccttaccacccagagcagaggaggaaggtgatggaatatggggtgaggggaggaacctggtggcccctccctgagatggccagaaagcccttggcctcacctgggactgaccaggcagccctagtctaggcacaaggtgccctttcacccttcatggctgtgggaatatttcctcttactctttttctcccatacagctactgccaaaatgcccaaacttgggccaaatgttgcccaaacttgggccaaaaatgttgcccaagagaccaaaacagaggaaaacagtttccaaatctatgtagatcatgagcagaaatctgaggcttgaataaagggctgagagggcaggagctctttggggtgtccagagcagacgcccatcccaaggacttccatggagtggggggaaggctgggtaggtttgagttttatcgtcaatataataaattaatcagaagctttcacaaaacaaacaccgcggctccgctgaagataaaatggggctgggaaaaaccaaacaccaagtagaaaccagctgaccagtgtgaggtgttgtagtcc

SEQ ID NO: 18126 - DNA, 2300 bp, Homo sapien
cttagctgtccccccttcccactttttttttttttgttcgagactgcgtctcgctctgtcgccaggatggggtgcagtggcgcgctcatagtggctcactgcagcctcgatgtccggggctctggtgaccctcccacctcagcctccagagtagctgggaccacagaagcgcgccaccactcttaattttttgtactttatttgcagagatggggtttcatattgcccagactggtttcgaattcctgggctcaaacgatccgcccgcctcagcctcccaaagtgatagaattgcaggggtgacatgccactgcgcccgaccaaggcgcttagctttctattaagttttcacaaccactttcctaccactatctactgttcctattttacaaatgacaaaactaaccgacaaaagagcactggaccgtgggaccagagcacgtccctgtggggtaaccttgagctggtcgcttgcccagggcggcagcggatgtctgaagcgtcttccaatcccaacattagacttaattcaaggtcaccagtgctcagctgcggctggaactgggtctcgaaacttgaaggccttctctgctacagccttcgttcccgggagcagaaagaggaagtttcttagccgtgggcacgccggcgccttcgcagaggcccatggcttgaggtccggcccgaatgcgcaagttccgacctgaaatgaactatggagtccgggaggggtcgctttgctcctccggaaggcttccccttcagccaatcaccgttcgaggcccgcccccgtcgccggaaggagccgtcgccccgagcaactacaacgtccggctttctgagttgggtggcgggaaaggcgatgagtaaaggccgggcagaagctgcggcgggaggtaacggcgccgtgggcgcggggaagacccgggagggcagtgggtgaggaggtcggttgagtggccccctcccctgcctttctctccgtagccgccgggatcctcctgaggtacctgcaggagcagaaccggccctacagctcccaggatgtgttcgggaacctacagcgggaacacggactgggcaaggcggtgaggaccttctcccgggattccctctccgtcggactccctggattcaggctggggtcgtgccctttggagccttgggcgttttccacatcactggctggatttccccagacccaggctcagactcctctgattgctccttctctctcctctgccaggtggtggtgaagacgctggagcagctggcgcaacaaggcaagatcaaagagaagatgtacggcaagcagaagatctattttgcggatcaggtgaggagaacttgcgccgattgtcacccatgagagcccgacaacgggtgaatctactcctggtgtgaactctttggggacaaggccccccatggaaaactcacctgtcttaggccaccatccttaaatcaaggtgtgtactcctcttgttaggatcccaacttcacgaggtttccagatttacaatatgatggatgacagaagattctgtattgttgctaccaagatccatttccgctccaaagctcttattccttatcatctacattagcaacaccctctgccaaatgatgttcctcctgcctccatccgattctctaaacacacatatcaaatttatattctccagcccagacctccagctggaatctgtcaggcattaatatcagagtcaaaattgccacagtagaatgcctcatcttccccccaccccggactggtttctttctaacattctcctcccctaatggaattactcttcacccaaaccagaaattgggagcaattcttgacttcctttactagtcaaccatcaagtccagctgatttttccgtttttatttatttttttaatttttatagagatgggtcttactgtgctgcccaggttggtcccaactcctgggctcaagtgatcctcctgtcttggcctcccaaagtgctgggaggacaggcgtgaaccacagagcctggctaatttttccattcttgaatccactctcctttccatctgccatggttgctctagttcacgccctctttatttgttgcagtatcctcctaacagatcttggctcttcaaacatatcttaaactcttaaacattgcagtcagaatgatctgtctaaatagatctggtcatgcaccttccctatttaaaactcttcaatggctctctagtgctgcaaaaaacatgtaaaaggcaccggaagacgccccagccagcctctggcctcaccaatcc

SEQ ID NO: 18127 - DNA, 2300 bp, Homo sapien
ggtgggggtgtgctgacatgtttgctcttggttgatggagaaggtacagaggccagggagtgaaaatggttgacagaagagggaagagttaggtgtctcatagtcactcatagtggggtggtcaggggtaatggcatctccccactttaggcttctcaaacagacttttgacacctctcaagttcagagctctgatgtggaaagacaggaggtgtggggaaggagggggatttcgtgtgtttgcatgagtgtgcgcttcaggccttgggagttggcaagagggagggaaggaaggagagcaaaatcttcggaaggtgtttcttgtacctgagggatcctgccctgaatctccatagtctccactgtgaactgaggaggggaggggtgtgctggggaataaatcttgtatgagaacaatctttaagagactgatgctgaatggtgtcctacccttgataggtcttctcttgtaaatctgagttctgattaatttgaagtgatagccttaaaagaggaagcccaggtatgagggacccaccagcccacccctatttttacttcgtgatggccagaacatcaccatagtatgaggctactttccttcttgtgagagccccaccatcagtataactggcactcttggctagtatttagcctgtatttccttcatttctaatttctttttttttcctgagacggagtcttggtctgtcgcccaggctggagtgcagtggtgcgatctctcactgcaagctccgcctcccgggttcacgccattctcctgcctcagcctcctgagtagcttggactacaggcgcccaccagcacgcctggctaattttttgtatttttagtagagatggggtttcacagtgttagccaggatggtctcgatctcctgacctcgtgatccgcccgccctggcctcccaaagtgctgggattgcaggcgtgagccaccgcgctcggccctttcatttctaattcttaatattgtctcctaaacgtgcagagacaagcacacgttttaaaggctaaggaggttgtaggtagcagaaggctttaaaaagtagcaccttactccttcactggatggtctgagctgcagggacagctgctctttggccttcagctcacctcagaaactagaaatatttatttcaggctctgtcccattggccactgtggtcaggggtggaaagcacctgccaggtgttgccctgagattgtctgggctaacaaacttttccacaagctttgtggttgaacagtagccccctcctaaccctatcgttccttggcgtccaaactacagtaggtgtcgagtgccccctgggtgcgaagctcggtattaggcaaataagggtggttgctctccaaggcgcttagctgtccccccttcccactttttttttttttgttcgagactgcgtctcgctctgtcgccaggatggggtgcagtggcgcgctcatagtggctcactgcagcctcgatgtccggggctctggtgaccctcccacctcagcctccagagtagctgggaccacagaagcgcgccaccactcttaattttttgtactttatttgcagagatggggtttcatattgcccagactggtttcgaattcctgggctcaaacgatccgcccgcctcagcctcccaaagtgatagaattgcaggggtgacatgccactgcgcccgaccaaggcgcttagctttctattaagttttcacaaccactttcctaccactatctactgttcctattttacaaatgacaaaactaaccgacaaaagagcactggaccgtgggaccagagcacgtccctgtggggtaaccttgagctggtcgcttgcccagggcggcagcggatgtctgaagcgtcttccaatcccaacattagacttaattcaaggtcaccagtgctcagctgcggctggaactgggtctcgaaacttgaaggccttctctgctacagccttcgttcccgggagcagaaagaggaagtttcttagccgtgggcacgccggcgccttcgcagaggcccatggcttgaggtccggcccgaatgcgcaagttccgacctgaaatgaactatggagtccgggaggggtcgctttgctcctccggaaggcttccccttcagccaatcaccgttcgaggcccgcccccgtcgccggaaggagccgtcgccccgagcaactacaacgtccggctttctgagttgggtggcgggaaaggcgatgagtaaaggccgggcagaagctgcggcgggaggtaacggcgccgtgggcgcgg

SEQ ID NO: 18128 - DNA, 2300 bp, Homo sapien
gaggccgaggcaggcagatcacctgacctcgggagttcgagaccagcctgaccaacatggagaaaccccatctctactaaaaaaatacaaaattagccggttgtggtggttcatgcctgtaatcccagctacttggggggctgaggcaggagaaatgcttgaatctgggaggcggaggttgcagtgagccgagatcacgccattgcactccagcctgggcaataagagtgaaactctgtcttaaaaaaaaaaaaaagggaaaaagcactaccaaaaataaatgaagaacgtggtaggaaaagtttaccatcgagtttgctaaaggctctggaagccacaaatgccagagactactgtgacacctttaactgggtctctttcaaactgggagaggattagcttaatagctgaacactgttttcgggtcaatgaacttggaattatttgttctgcttcagctcactgaaaatctttcagataaaggataataaatgttttgattttaaaacaaattttaaggggaaagctatttttagcaaaaacacaattaaaaaacacacatattttgttgtttcaggcttatccagaatagtcttaatccattcagcagcagaaagccccctataagtcagttcccttggaacctcctccattacaaataaatccaaaattatggttggtagatcctatgaagtcctaggtccacttcaggtgatgacaactgagagaagcagcagttccattttcacagagcatgacacacacaaataaagcatatttacagtgctacttttccagctcaggaaaactcacacacagtattagacatcaatttccttgcctataaaccatggctaaggatgcctctctaattccttggaacagggaggagttacaatcacaggtggctttgacacgcgtgtaatctccgtcatcatttcctaactgttctttaaaagcttgtaattttctttcaattttcagctttgggggctcacactgacgcttagacttcataaacttccttcctagatatataacatgctaattcatgcgaatcgctcaagcttgttttataatcacacctatggatacctttgcaagacttcacgcctctactccaacaataaactactaaaacctctggaaacaatctagaacttgcacttgagcagacaagagaaaggaagtgatggctttaaagggacgcagctttgtcgggctcaaaagaggagccctcgctcactcttgagcggctcaagatgttaccagaagctcccgccagatgtgcggggcgggggtgcgggcacaggtaaggcagagaagatgggtggacggccctgggaagaactagggtgccgaagcctgcaggcgggatggagtggaaggaggtgaggcaaaattaggcaagtacaggaaggagccagtgcagcgaagaaaacagggcaggcgagaagtagagccctagaggaaccaacgaattcgggactcggagggtttccgagggtccagttctctcaccagaaagccgcgttcagccccaggcaccacagagcgctcctagctggccgctcccacaccagggctgcctgcacccgactcagcagaggctcgtaaggccccagcacctccaccagggcccgctgcgccgcctcaacctgctggtcccgctcccaggagcctgacacatctcggcggcccctgaaagtcgaccccgaagccgggcctggggtcgtgggaaccccttcggcctcagccatctccccgcggcagccacaacatccggggccgtggcccgacaagtcacaataacagcaactgcgcagatgcgcgattcggcgggggaggtggcttcgcaccacagcgcgcttgcgcgcaggcccaagcaggcgcccacccagaggggagggaggacgccgtaccccgccctcactgaggcgcggagccggatccggaggcgccgagccgcatccggagccgcgcacgcgcaatctgcatgaacgaaggccagtgcttaaagacgtgccattcattgccagaactcgattctcattggagcggaggaagttcgtgggtggagctggttgtttggcgcctgcgtcttgcggcgagcgggctggcgtgcggcgccgttgcgggcgggagcggctgcaacgccggtgcctgaggagcgatgccgagggaaatcatcaccctacagttgggccagtgcggcaatcagagtgagcgaaactccggcccctcagctagccaggttccttagggtcaatgggatctcgctgtgggatcctggactccat

SEQ ID NO: 18129 - DNA, 2300 bp, Homo sapien
aggtccatatacccttatctaacagtgttggggccagttatgttttggaattcaaaatatttcagattttagaaaggtattatggtatatatactatatattaaataaaattccagtgggaatttttatttaatcagaagcacgttaatcaaatatattagtatttctgtaataaaaggcatcactaatgacagtaagttggatagaaactatagggccgggcatggcggttcacgcctgcaatcccagcactttgggaggccgaggcaggtggatcacgaggtcaggagatcaagaccaccctggctaacacagtaaaaccccgtctctactaaaaatacaaaaattagccaggcgtgatggcaagcacctgtaatcccagctactcgggaggctgaggcaggagaatcgcttgaacccgggcagcagaggttgcagtgagctgagagcgtgccactgcactccagcctgggcgacagagtgagactccgtctcaaaaaaaataaataaataaaaattaaaaaaaagaaactataaaacagcctgtcttcattgaaatttgtttttgctgataaactagttatgaaatgtcctttggtttcatggctttctggatcctggaaaggcagataagggactgtggacctgtagtacttacttctagggttgttgggagatttagaaaaattaatatatgtaaagcacttagaatgacctggcacactgcattagctagtgtaggcgcttgacaatattacatagtccactccctgcagccaggtctctccctccagcattcatacatccctgatccggttttccctctcttcgggacgtcatagagcctgtccctacccagcgagttgtgggccctgccagggaataggaaacgacctgggagaatccgctggcccagttgttgccagctcctcctccatgttccgacaggtagatgttctctgggttgtagagcttggcatagggggagttgaggatggagtggatcacccggggttccaagtccagcagcacggcccgggggatgtagtgctcatcgtctgcctgtcaaggggagtccaggagggggcccaatcagctagggcggcccaagtccgaagtcctcccaactctggctccctccggccctccctcctcaagccagccgcctggccctactgcccagcggggttcccagtaccaggccactcccttcccttccgcccccttgggcaactgccgcccccggccaagtcgctgggggcacctggtagaaaaagacgtccttgcggtcagtgccctcggtggcgaactcctccacgatgccctcggggctgataccatgctcggcgcacagctgtttccagaactcgaacccaactggggggaaggggcgggcaggggagaaagaagatatctaggtccgggcaggttccaatcaggagccgggggactgggcgcctgcgtccagggataagaagtcaagccgcaggactctcccgtgtctgaggaaaggactgtacgccagggactgggcaggggagggcccctcggggttgggcaagtggacactgggtcagggatgtctcgcctttcagagaactacgattctggcaaggacagatggagtccaggatcccacagcgagatcccattgaccctaaggaacctggctagctgaggggccggagtttcgctcactctgattgccgcactggcccaactgtagggtgatgatttccctcggcatcgctcctcaggcaccggcgttgcagccgctcccgcccgcaacggcgccgcacgccagcccgctcgccgcaagacgcaggcgccaaacaaccagctccacccacgaacttcctccgctccaatgagaatcgagttctggcaatgaatggcacgtctttaagcactggccttcgttcatgcagattgcgcgtgcgcggctccggatgcggctcggcgcctccggatccggctccgcgcctcagtgagggcggggtacggcgtcctccctcccctctgggtgggcgcctgcttgggcctgcgcgcaagcgcgctgtggtgcgaagccacctcccccgccgaatcgcgcatctgcgcagttgctgttattgtgacttgtcgggccacggccccggatgttgtggctgccgcggggagatggctgaggccgaaggggttcccacgaccccaggcccggcttcggggtcgactttcaggggccgccgagatgtgtcaggctcctgggagcgggaccagcaggttgaggcggcgcagcgggccctggtggaggtgctggg

SEQ ID NO: 18130 - DNA, 2300 bp, Homo sapien
atggagaaaccccgtctctactaaaaatacaaaattagctgggcgtgatggtgcatgcctgtaatcctagctacttgggaggctgaggcaggagaatcgcttgaacccgggaggtggagcttgcggtgagttgagatcgagccattgcactccagcctgggcaacgagagcgaaactccatctaaaaaaaaaaaaaaaaaaagattgtaacttggctacttggctgagcatggtggctcatgcctgtaacccagcactttgggaggctgaggcaggtggattacctgagctcaggggttcgagaccagtccgggcaacatgacaaaacccctgtctctactgaaaatacaaaaaaattagccgggtgtggtggtgcacacctgtaatctcagctactagggaggctgagccaggagaatcgcttgaacctgagagaggcagaggttgtagtgagccgagatcatgccactgcactccaacctgggcaacagagtgagacttagtctcaaaaaaaaaaaaaaatcttaagtggcatttacagtgtttgtgattctagatcaggctacgtttcattccataaaataaatagaatgagtgttcagatgagtcaagcacaggttagtttttatggacaaaaaagggtagagaaaaatagaaacagaaggaaaaaaagcagatgggtcctttcaaagttacttttcttgtaaaaggacttccgtatcatgccggctcacactggcttgtttggggttttggctcttccttccctctcctgattcctctgaaggtttgataaacaacttagtgttgcttagtgacatagaactttagcgtgagtgactccattttggtttggtctgttgagccaagcacaggagctcagtgcaaatcaatggcctcctataaaatttatttaactgaacccttgtgcattgctggtgggaatttaaaatggtgcagctaccatggaaaatcgtatggcgattcctcagaacattaaacacaattaccatatgatccagcaattctacctctgggtgtatatccaaaataattgaaagcagggactcgaacagatatttgtacactcacattcaaagcagcaacattcacaatagccaaaaggtggaagcaacccaaatgtccatggagggatgaatggttatgcaaaatgtggtacatctatacaatggaatattattcagttgtaaaaaggaaggaaattctgacacatgctacgaaatggaaggatcttgaagatattatgttaagtgaaagaagccagacccaaaaagacaaatactgtataattccactcatatcaggtgcctagagtagtcaaggggaagttactgtttaatcgcgatagagtttcagtttgggaagataagaaagttctagaaaagaatggtggtggtggttacagaacaatgtgagtgtacttggtgccacagaactgtatgcagtacttacaaatggttacaatggtaaatttaggccaggagtggtggctcatgcctgtaatcccagcattttgggaggccaaggcaggaggattgattgaggccagtagtttaagaccatcttgggcaacacggtgagatccccatctctataaaaatacattttaaaaatttaaaaattagctgggcgtggtagcacacgcctgtagtcccagctactcgggagactgaagtgggaggatcacttaagccagaagttcaaggctacagtgagctatgatcgcgccactgcactccagcctgggcgacagagcgagacccttctaaaaaataaaaaggtaacatacatgtgtatgtattgtaacaccattaaaaaacagaaatttaaacgaagaaaagttggcttctagccctttgatctagcaaagctgacagtgtcctcacctaccaatataggtagatgactccttacacgtggacaagcacatccacctggccgcttctcccctttcctcccctcccccgttcctctcctccccaacacatccaggttccgaccctgccacccccaacgagtctcactgcgcaggcgcggagcggtgggcaggagcgggcgtggcctgactctgcgcctgtgcggaattccagctgcgactgctgagggagaaaatgatgcccaggttgggctccccggcccaccggccgaggagaggcctgcgctgcacacgcgcagaccgagcatccgcgtcaagaggcgaagagagcgcgcgctccccacgtcctgcgctcctggctgccgggcattcgtctcagccgtgactctcgccaggccggggc

SEQ ID NO: 18131 - DNA, 2300 bp, Homo sapien
ctccatccaagatctctggaatcgccgctgagtcagcaacgcgcgcgcgcgcccgcggaggccgcggccccgccccggccgcctagcgcctgagttaaccccttcctatacagagccgcaggatattagccctaagaggcctccactgtattcggagaccacagaattccttagaatccaagtcagtctccccagctgagttcggtgagctgtgagctctatattcgattttatttccggcctaggtctgcaccttcccagagtgcctgcctcaactccttcacctcgaaaaggaggtgaggccgagtgcagtggctcatacctgtaatcccagcactttgggaagccaagctgggaggatcgcttgagcccaggagttaaagaccagcctgggcaacatagtgagactccatttctacaaaaaataaatttaaaaaattagccaggcatggtggtgtacgcctgtagtcccagctcctggagaggctgaggtgggaggatcccttgagccgaggagttcgaggctgtagtaagctataatggctccaccgcaccccagcctgggcaagacagcgagaccctgtctggaagaaaaaaaaaaaagggtgggggagagctgaatcagaccgagaaactggagaaactggactccttctccccagacgtggagggccacctccagagctgtgtcctcgcaggtctggacatcctcttagtagccaaggcgtttccctttctcagggaccctgagacgagacaggggttcagagagcggcagttgggttttcctctgtcctgtgccaaaactcctcaacagggtttttaattggttggtgagccaagagttaaaacaagagcctgaaggcgggcttccgtgacgtcactagcaccccgcgtccgacctcagagactggggcgtggctaacatagcctcgtcccctccctccctgtttccccgcccctccccgctgtcaccaagccaggggcacatgatgcaacccaacgcggtttcagccgtctgattggtagccgcgcccggcgccaggcacagggattggacagaggagactgtgacgaaacctggaccctgcctagtaaagaagggaggagagaaagaagagagagggggggccccccgggagggagggggccgggggggcggggtcccagctctgtgctcgcgcccccagcgcgccagtcccggggctgcagggagcgcagcgcgcgcggcccgggccccggccaccggacgccctaccggacacgaccctccctggagcttggacaactgcccacctcggacgctgcaccggacactgccccccacagggctggacactccaacggacactacttcccagctccggacattgctccctcctctcccggggccctggacgcttttccccctcccccctccgggggcccagacactgagcccccctcagcgtctggctagcgtccccttgcaccccagcccaggacactgcctcctccctgtcctcttctcccttctgctcctcccacctcatctttcccctgctcgggtcggagccccgccagttcctccgaccccctactgctcggccgcggctgcccgcgcccccatccgcagctcctcgcccggatgcctctccccgggggactatggtggcttctctgctgccgtcgaggcttcactcttctgcaccgggactacggggacggcgagcttagcggggacggggacgaggacgaggacgaggaaacctttgagctgcggaccccgagtccagcgggcggcgggagggtaagtcccgggggttcggagcctcgtctcaatcactctcgctgtaaccggccgtcacgctgatccgctccagcctccagccacacgctgcgcgcttggcgaactagggatgagggagagttttttgcctgggggccaaagcccccgggagctctcggagcagcagccctactcgggatgtgcctgtgggcctcccgctgcaggctgggcgctatccacctgctgggggccctgaggcaggggaggcgtcacgcgtggcccgacctggccctgcctctcccttccccgctgggcccgcgtcccatcccgtctccttccgcctccgccagcgccgaggaatgtggcgaggccggctgggcggctcgaacgcctgggtccccctccgctcccagttcgcaagtgcggaggccagatgcgagagctcccgctgcggagacctggacgagggggagaagtcatcccaggattggggtctgtggcggggaccccaaggagagggaggtgggagctc

SEQ ID NO: 18132 - DNA, 2300 bp, Homo sapien
tccagtaatggctgccttagcaaatactgagttcccgctattggaatgttcagactgtcggggacgctgtgggcctttgcgtggtgtggggggagggggaggggcaggggattcccgtttttggtgggcgtttggatttcataaccactttacaatcccttcctagtgtctgtgatggaaagaaaaaatgaaaaaatgaattgtaaaatttgagttgaagtttttccaccttgaagaaaaacctaggagggattgcaatctgcaaatttccagagtagttatcacgggtgtggtgggggtgagggatatttgctgttctccatcttctctggggactgggtcagaggaaatgcactgagctggccggaaagagagaggttggatatgggaaaaaacttctctgcaggcaagggcctgggatccagacctggaagatggttgtggtatctccattcctaggtaatctctcagtacaggccactctcatgtggagagaggccacggccgagatggcctcctagacacgctcgcattgattcctggtctttgttttacacaatcacaacgggcaggatggtgttcacgtgcgacagttctcgcggtttaatatcggtcagcaaagctgtccccaccgctccagcctggagtctagggtcgagaagggcggggcgtggcgaggaggtctcaagggaggtgctggcctgacggccccgcccgtcccgcccttccccgcccctccccgcccagcccagccctgcccaggctagcagtcctcagagcctcccgcagcagcggcgaaaaggggtcccccacggcctctaggggccaggatccagggaaggcccggagacggcgccgatcctcaaagggtcccacacgccagccactggggaccgacctggaaccctccatccaagatctctggaatcgccgctgagtcagcaacgcgcgcgcgcgcccgcggaggccgcggccccgccccggccgcctagcgcctgagttaaccccttcctatacagagccgcaggatattagccctaagaggcctccactgtattcggagaccacagaattccttagaatccaagtcagtctccccagctgagttcggtgagctgtgagctctatattcgattttatttccggcctaggtctgcaccttcccagagtgcctgcctcaactccttcacctcgaaaaggaggtgaggccgagtgcagtggctcatacctgtaatcccagcactttgggaagccaagctgggaggatcgcttgagcccaggagttaaagaccagcctgggcaacatagtgagactccatttctacaaaaaataaatttaaaaaattagccaggcatggtggtgtacgcctgtagtcccagctcctggagaggctgaggtgggaggatcccttgagccgaggagttcgaggctgtagtaagctataatggctccaccgcaccccagcctgggcaagacagcgagaccctgtctggaagaaaaaaaaaaaagggtgggggagagctgaatcagaccgagaaactggagaaactggactccttctccccagacgtggagggccacctccagagctgtgtcctcgcaggtctggacatcctcttagtagccaaggcgtttccctttctcagggaccctgagacgagacaggggttcagagagcggcagttgggttttcctctgtcctgtgccaaaactcctcaacagggtttttaattggttggtgagccaagagttaaaacaagagcctgaaggcgggcttccgtgacgtcactagcaccccgcgtccgacctcagagactggggcgtggctaacatagcctcgtcccctccctccctgtttccccgcccctccccgctgtcaccaagccaggggcacatgatgcaacccaacgcggtttcagccgtctgattggtagccgcgcccggcgccaggcacagggattggacagaggagactgtgacgaaacctggaccctgcctagtaaagaagggaggagagaaagaagagagagggggggccccccgggagggagggggccgggggggcggggtcccagctctgtgctcgcgcccccagcgcgccagtcccggggctgcagggagcgcagcgcgcgcggcccgggccccggccaccggacgccctaccggacacgaccctccctggagcttggacaactgcccacctcggacgctgcaccggacactgccccccacagggctggacactccaacggacactacttcccagctccggacattgctccctcctctcccggggccc

SEQ ID NO: 18133 - DNA, 2300 bp, Homo sapien
aaggcccggctgaaggcctggacatcggccttgtagcaaagctccggcagtggctcagccgagtatgcgtcctcttcatccccagagtaatggccccaggaaacctgggagggtcaaatgagaggcgggatcttatgagacacatctgaccacacaactcccccgcccacacttgccttccaagctgagagctcctgtgtggccagatgtaacagtacacggggagacataagctcttctccagactcttcctagcacaccttcagcaggccttggcttcccttgcacccctcctacctctgcttccagcttcctgggtgaccttgagcaagccacttgctctttctagacctcagttacctaacctgtaatgttgagattataaatcctgaccagcccacctctcaaggtttgctgtgaagatggcaatatggaaaataatggatggggagaacctgtgttctccaaaggccataatacaaagtttgtattattattattatttattattattattattggagacagagtcttgctctgtcgcccaggctggagtgcagtggcacgatctcggctcactgcaacctccgcctccgggttcaagagattctcctgcctcagcctcccaagtagctgggactacaggcgcccaccaccacgcccagctaatttttgtatttttagtagagatggggtttcaccatgttggccaggatggtctcgaactcctgacctcaggtgatccgcccaccttggcctcccaaagtactgggattacaggcctgagctaccacgcccagcccaaagtttgtattattaataaatcctacagcttcagttccctttgcagcgccctctcctggaaggatgcccatatgcaggctttgcctcagacctgagccctggactccaacctccgtctggagtgggtttctgtttctcttctttcccttccatacccaccttccctgtacctccaataccagcacactgaaccactcatgccaagggggtctccagggttgggactcaggttttcagggcccaggtgggaccctggacctctaggttcaacccgcctttcccctcagccctagtccctgtcccacaaccccagcctcacaccaccagcccatttatctggaggacccctagtctgagacagcgccaagaatcctgaataagccataggatggcagaggcccattgccaggtggggaatcccattccttccctgtctcctccctctctgtaacccttctccccctccctgcccccactcccacctgctctgtggcctccgtccccatctctggctacacaggtttctgaggtatagccacagggggtagaagttaaactactagcgggacaggaaggaagaggcggggagaggggccgagagggaggtggggattagggtctacggggtcactttcccattccacctcctccaaaagacttcactctcttgtgcaggatctggattttacgaaaaaaaaaaaaagaagaagaaaggaaggaaagaggaaagaaagaaagaaagaaagaaaaaaaggaaggaaagaaagaaaaaagaatgaacgaaagaaagaaaaaataatttactgtctttgtcagtgaagaaagaacgggcttcggaatataatcatttgctgtgtgatattgactaagtttcttgacctctctgagcctgaggtttttcatctgcaaagtggagtagggcaaaaatgctaaattcacagtgcccagcaccactcctagagcataatttgccttccgaaaatgttaagattcttttacttacccttcattccatttccaggcacccctcccccaaaccacctcccttttcttgaaattttcaggatgcttctggccctaggttccctgtcctcactcctgtggccctagtcccgggcagcctcgggttacttggggttttcccggtggcgagaggctctctacccccgccctttcgcagcagggctgaggcacgcgcttgcgcggggtccgggaaaccggcgcgtgccaggagacagaggctggggaaggggggaggtgagaggaaagagggtggaaaggagaggatagagagagaagagcggaggaccaggaaccagagagagagagagagaaaagagagaggagagacagagcgcttgggggcgaaaggagagagggagggaagggtgggtaaggaggagagagcggtctgctgcaaaccccaggaggagagcttggagcccaagccagaactcgagccctagccggagccgttcacagggaggcggctgccg

SEQ ID NO: 18134 - DNA, 2300 bp, Homo sapien
ctcaccgtgcagcctggcgaatctcggcgcagtaaggagactgtagtaggaggaggcgcccagggagcgtgcatacaggggacccaccagctcctcgtcgcagccgtctagggtagggaaaccgactgttagtcagcgctggcccctcccagacccttccaaaggccggcccacttagcgaccgaagcttccccttccgtgcccccaacccccgcccccagaggcacacccagccctaccttaaagccatctattcaatcctggctgcagcaacagctgcatgctcagaggaggctaccttctccttctaggcaaacccctaggctacacctataggcccaaggccagaccctccctagctagcccaatacctgccctggtttagtactttcccaaactcaatcctaaacctcagcatcttccacaacctaagtcaacccaagacaccaatccagctccaaccctagcctcaatccaactcggcccccaaaacctgcaccatccccaaatacaggccttgcacccaacctcagccagtgctagcaccatcaccagctccatgtccagccttagcatcagtcaggggcaccagctcctgcttggatccctgccacaaaacccagccccagccacaaaccccagccctagccacaaaccccaccccttggccagctccaaagtccagccttaagccctggcaaaaccttaatcctagtatcggtcaccagtatacacttatcccccagccctagcctcaaacccaggcaccagctcctgcttggatcccaaccccaaatccctgcccgctgacttcatcctcttcccagagcccagccccagccccgggcgcgcgcggcagcctcagagctgcaatgcggagcgcgggggagaggcaggaaaagatgagagccagcgggcgcgcgccggccgggaaggacccgcgaccacccagccgcaatgcggttcggggccgccctgcaggctctggactcctgggcccaaccccacctgcctccaagcccaacactcacagtagccccagccctcggctcctgagaccgcggcgagcaggatgcagaagagccggagatgcatcatgcagggctgacggtcccggcagccgcctccctgtgaacggctccggctagggctcgagttctggcttgggctccaagctctcctcctggggtttgcagcagaccgctctctcctccttacccacccttccctccctctctcctttcgcccccaagcgctctgtctctcctctctcttttctctctctctctctctggttcctggtcctccgctcttctctctctatcctctcctttccaccctctttcctctcacctccccccttccccagcctctgtctcctggcacgcgccggtttcccggaccccgcgcaagcgcgtgcctcagccctgctgcgaaagggcgggggtagagagcctctcgccaccgggaaaaccccaagtaacccgaggctgcccgggactagggccacaggagtgaggacagggaacctagggccagaagcatcctgaaaatttcaagaaaagggaggtggtttgggggaggggtgcctggaaatggaatgaagggtaagtaaaagaatcttaacattttcggaaggcaaattatgctctaggagtggtgctgggcactgtgaatttagcatttttgccctactccactttgcagatgaaaaacctcaggctcagagaggtcaagaaacttagtcaatatcacacagcaaatgattatattccgaagcccgttctttcttcactgacaaagacagtaaattattttttctttctttcgttcattcttttttctttctttccttcctttttttctttctttctttctttctttcctctttccttcctttcttcttctttttttttttttcgtaaaatccagatcctgcacaagagagtgaagtcttttggaggaggtggaatgggaaagtgaccccgtagaccctaatccccacctccctctcggcccctctccccgcctcttccttcctgtcccgctagtagtttaacttctaccccctgtggctatacctcagaaacctgtgtagccagagatggggacggaggccacagagcaggtgggagtgggggcagggagggggagaagggttacagagagggaggagacagggaaggaatgggattccccacctggcaatgggcctctgccatcctatggcttattcaggattcttggcgctgtctcagactaggggtcctccagataaatgggctggtggtgtgaggctg

SEQ ID NO: 18135 - DNA, 2300 bp, Homo sapien
ctctgcgaaggtttccccagagcccttcccctcccctgccagcgccgctttggaagccgtctgggaggctgcacccgccaggactcctgagtgcggggttttggcggcaaatgacagtagtgcgtccgcgcggcacgggtaagtcaatgcgcacgcgccgacaggaggcgcggggcggggcacggcgcaggggtggggccgcggcgcgcatgcgtcctagcagcgggacccgcggctcgggatggagggtgagtgagtaaacaagcctgggccgggcggtggggccgggcctcctcccctcgccgccctgggcctgagggagggagaggcggagggatcaggaaattggaaggaatccgagggacacactgcctgcctggccgggggtagcaggcgcccctcctcattccgagggtgggggaatgggggcgacggggcgagagagacccaggcgaggacagcgtctggggctgcgagggctgtgtgcccgggaggaggagcggcgggggcgggctcggggacggggaatcccgttggatggcggtgtgggccggtgggcgggagccccagcgcccaaagggcgcgggagggcggtggcacctgcgggggcctttagcgaggtggactctggggacctggagctgtgcttggggagggctagagaccggggctgatcttgcgatggctttcggggatgttgaggaggggtagcagtaaaaacaaggccgggactagggtgaggtgagtaaggctcccaaggcacaaagtgtaaaggagcactgactcagggtcgcgcaagtgcagtgagcgcctcctcacgtgcgtcctgggtgcctcggtcgcctcaccccaggcctggccctgagcaagaatctccttcactccagacttttggtctcacgccaatgatcgctcacccccaccattcaaccgaggatcaaatgatataaataaaagtgccttgaagcacagacaaggtgttgtatttgggacatgcctgttaggaaatgtgggacaaacttttatttcaataaaaagtgactactgaggaattgtttcttgagcagggaagggaagggatacctgaaggatgttagtgccccccgtggaatgtgaaggaatatggagggtgaaatacagggttgtatgtgatgtagcccaggccgataggaacctgacgcttggcaggggaggatgaaagcaaaggagctcaggtacactaacaattaggtgggtgcaaggatggcaatgaaaacgcgagtctcctccacgtttgctgccatactgccgctgaataaaaaaattcccacaccccatgttttttaaatttaggaaactgatattgaaggaggtttccagcctgagaaggtgctaaccctattagaggtttctgtgaaagcttgtctattttaagtcttggaatccccagatatgccactgataaaagagattacttacataggagagagtgtgtgttaggagataagtactttagactgggctcggtggctcatatctgaaatcccagcattcgggaggcccaggcaggagaatagcttgagcccaggagtttgggaccagctcaggcaacaatagcgagacctcatctctacaaaaaaaaaatagccagatgtggtggccttctcctatagtcccagctgcttgggaggctgaagcaggagtattgcttgagactgggaggtcaaggttgcaatgagctctgatcctgccactgcactccagtctgggtgacagcacctgagaccctgtctcaagaaaaaaaaaaaaagcctggcacggtggctcatgcctgtaatcccaacactttgggaggctgaggtggaccgttcactcgagcccaggagtttgagaccagcctgggcaacatgggacaactccatctctactaaaaatacaaaaattaatcaggtgtggtggcacacgcctgtagtcccagctactcgggagggctgaggcattagaatcgcttgaaccgggaggtggaggttgcagtgagccgagattgcaccactgcacatcaacctgggcaacagagtgagattctgtcaaaaaaaaaaaaaaaaaaaggaggcctggcacagtggctcaggcctgtaatcccagcactttgggaggccaaggcaggcggatcacttgaggtcaagagtccgagagctgcctgggcaacatggcgaaactccttctctacaaaaatacaagaattagctgggcgtggtggtgggtgcctgtaatcccagctattcagggggttgaggcacgagaatcgcttgaacctggga

SEQ ID NO: 18136 - DNA, 2300 bp, Homo sapien
gaaaaacagcaaagtttttatataaggaaaagaacactaaatctggttggaatccagcgacctgagtttaagacctgacagaattattcatctgtgtaaggcaagtcttctaactcctttaggccagaataacctgatgtgtaaactgaagttgccctacgtacttcatacagttgttatgaagattacttgaaaaaatgaacattataagcttttctaattatacactttgagacaaaatcaaaatcaagatgttattattttgcattttaatttgtaattttaaaaatttatattttgaaataatttcagatttaatagagttgcaaatatggtagagttcctatatgtccatcaaacttcctcaattacaatgattaaaaccaggaataagattgataaaatactattaattaatctagagattttattctaatttcatcaaattatcccactggtgttctttttctggaccaggattcaagccaggatcacacattacatttagttgtcatatctcctcagtctcccaatctgagatggtttctcaccccttgtctttcatgatcttgacacttgaagatactggccagttattttgtagattgtctctcattttggatttgtctgatgtttcctcataattaaattcagcttatgcaggctgggcattgtggctcatgcctgtaatcccagcactgggaggcagaggtggggggatcacctgagtcagcagttcgagaccagcctggacaacatggtgaaaccccatctctactaaaattacaaaatttgccgggtatagtagtgcatgcctgtaaacccagctacttgggaggctgaggcaggagaatcgcttgaacccaggaggcagagattgcagtgagccgagattgcaccattgcactccagcctaggcaacaagagtgaaactgtctcaaaacaaacaaacaaacaacacgcacaaaaaatcagcttatgcgtgttcgtcaagaataccacagaagtgattttgtgcgcttctcattgcatcatgttcagagggacctggtaagaatacctctcagctgggggcaatggctcatgcctgtaatcccaacactttgggaaatcaaggtgggaggatggcttgaaccctggagttcaagaccagcctaggcaacacagcaagaccctgtctccttaaaaagaagagggaggccgggcgtggtggctcatgccggtaatctcagcactttgggaggccgaggtaggcagatcacttgaggtcaggagtttgacagcagcctggccaatacggtgaaaccccatctctactaaaaatacaaaaattagccgggcgtggtggcacgaacctgtattcctggctacttgggaggctgaggcgggagaattgcttgagcccgggagggagaggttgcagtgagccgagatcgcgccacggcactccagcctgtgtaagtaacaaagcgagactccgtccagcctcgccccccggcaaaaaaagaagaagaaaacaatacctcttatcactagtgatgctaactttgatcacttagttaaggtggtgtctgacagattcttatctgtaaagttgctatttttttccctttgtaactagcaggtgtcttgtggggatttatttcgatacaaggctataattttgattctaagtgactagaaaactatgaacagaaatagggagatcagacataaataaagggcttagaacccatagaccggtgtctggagaactggtaggggtgaagcatcggtatgaaggtgatctgggttggcttcaaacgctgaagtgagatgtggcttgtcaccagcgcgtggggatggcaaatccgctgaatagggtcttcaggaagatattagtggctctgcgaaggtttccccagagcccttcccctcccctgccagcgccgctttggaagccgtctgggaggctgcacccgccaggactcctgagtgcggggttttggcggcaaatgacagtagtgcgtccgcgcggcacgggtaagtcaatgcgcacgcgccgacaggaggcgcggggcggggcacggcgcaggggtggggccgcggcgcgcatgcgtcctagcagcgggacccgcggctcgggatggagggtgagtgagtaaacaagcctgggccgggcggtggggccgggcctcctcccctcgccgccctgggcctgagggagggagaggcggagggatcaggaaattggaaggaatccgagggacacactgcctgcctggccgggggtagcaggcgcccctcctcattccgagggt

SEQ ID NO: 18137 - DNA, 2300 bp, Homo sapien
tttgatcttaaggccattttacatatgaaaatcttgagctccagagatgtgaaataacctgctcaagttacttgcagtaagacagaggcagaacctaccttcagaatcctcatcagtttttttctttcatccgttatgattatccattatcattatgccatattgtcctttttttttttttttgagatagggcacaatcacagctctctgcagcctcaacctctggggctcaagtgatcctcctgcctcagcctcccgagtagctgggactacaggtgcacaccactatgccaggctaattttttaaaaatttttttatagttttttttttgtagagacagggtttcactatgttgcccaggctctattttaaatctaacatttgcttttgtcccctttaatcttgaccccaaccccagtcctaacccatagtgggctcatgtgcttctggccccaacccagtgaaaatggcttgttttgctttctgcacctccttgctccttcctcccatcttatcactcagaaatctcccatgcttccttcttgaaaggagcaatcctaggcaggcaggaaggactagatttggtcccagcctgaaatgtctcagagactgcatggctcttttctgcatcattgtagaaatgatccttaccaggaggactttggagttcacgtcaagcaggccattgactctctcccactggattctttgcaaaagcagcctcttgaccatagaggaggacaacaggttatccgtgcccatgatccaagagcttgagatcctgagatgaagacttcaggagagatcaggacagataatttgtggtgggcaggaatcagtaaactgggacaacagcagcagctgagtccaagggtcagtgtctgggagtaatttaggaaagtttggtgctgacagctgtgtctgggacttgaacgtcatggccaaaccagctcctgggctcctcagctgcttcagactaatgaacctctggcccaggacacaagaagcagctgtggtgtggctgaagtcaggacccccggaggcccagactcagccttgctgcttccttaacagtgtgaccttagataagtcacttaggaaaagaggaaaggaaactagcatttagcgagtgcagtgccctttcacagctgccatcatacagtgaggaggggaatgtccctatttcacatgagaagtcctgaaggtaaacgtgtcattcaaggctctatagctggggagtaagaagacagaattagaacccagagcttctgaattcaaatcccgggctgttggccctgagctttagcttctcggtctgtaaaatggtgttacactcacctggcacatgaagtcgcacactgaaggttctaaaacccctccattctttctcccaaccgtggtcctgaagagctgtggcaccttcttcctgggaacgtagtcatcgtattttgccctccccacaacaggtttgtggggtctaggccccaggaggtgtctgaagggaaggtatttggactttgctttcccctctaccccactccccagaccttctcccgactccagagggctggctcccgcttctcctccctggttttggctggcggactgacatcagctggtattcctagggataggataaggaaccctgagctgcatggctcagctccaggcgccccttcccccacaacccaggacagccccttagaagcagcggcgtcgagaggccgctggagctcccagccccctccctcttctccacgtctgggagagcagcttgccgacccctccagacccgaaagagagagggggcgactcgaattcggggagcgatcctgggagaccctggagagtcctgggcgccacgcagccgagcccccgaaatagatcccggttccggggttccgggagctgtccagcctcgcggggtgagctacgagagggtgggccaacgccggcgaggcggagggagccgcgggcgccaggcgcgggtgaggcagcgactccccctccagccgcgggccccgagcgtcgcccccgccccccacgtggccgccgccgtcccagcccctccgaggaagcggcgcggcttcctgcagcttgggctggggatataggcgcccccacacccgggcccggctcagcgccgccgccgctcctcgcctccttgctgcacgatggcctcgctccgggtggagcgcgccggcggcccgcgtctccctaggacccgagtcgggcggccggcagcgctccgcctcctcctcctgctgggcggtgagcgcggcgccccgaggcccgggcg

SEQ ID NO: 18138 - DNA, 2300 bp, Homo sapien
cttgcaggagtcacaagcagagattcctcccttgccccttcccccacacctccccagttgcaggcccccagctgctgtccagaccggaagggagtctcttcctgcttgtttcctggagccgagtttggatataggcaggaaaggcccgcctgggaggaaagaatataggggtgtgaccttcatggaggcagggagcaggggggcaggtgaaatgaacagaacaatgggccatccagatttttccagttctactacccagggctgagggcctgtggcagtggcagggaaggacacaggttccactgaaatggggagaaggacattgtacaaaaaaaaagttttattttgaagattacagaacttgtgccatgaccccacctggcttccattcccagcaatccagggatctgtggtggggatgagagtgagaaaagggagtaggaggggaggagggaggcctggtgggggtggggaagtggagtaacatggttgttgagaagctcgtggccccctaggcctgggcctcactgtctttactcctccatactacaagagtgatgaggaaggggatgaggcagatgggggctatgatcatggccaggagtacatcctctggggggtcagagaaggtgggctgcaccagggagcagttggcaaagtggatctggtgagtctcaaagatgatcctctctgccaagggattggggaagcccaggtcaaacaactctgcaaagtgctccaggcaatctcgcagggtgctataaggcctaggggcagaagaggacttgagtgagagagggggtggacccagggagaagagtgccccactctcactcagggtctacctgcaatgagcaggtccaccccctggcctgagccaccctccatcactgcccctacctgctaatcatggcccagtcgcaccaatccttttcgataggatccatttgatccttataatgattccagcaaaattggacagctgtctcatagttcttcaccgtcccccctgtaggtacagatgctacacaatgaccacacccctacccctccctacaaaccctcctgcccaggtgcttgcaaggtgaactgcctgtcttcaaacgtgggaacccttcagaaagtttccctagcaaaacattctggctgaggacagagtcccagctcaggaatcctataatgacttccatgtgctaagcactttccatcccagcctgataagaacttccacgtacaccttttcctggggtcttctcgcccacttgtgaggtgggcagctcagagccgtgcaggggctttgtaggaggacagggagaaagaccacgaggaaccccaagaaagaacagaggggagtgtagtggggcatcagctggggttgggcaggcctcgtgggaaaggaaccctccccactgaacttgctctcgtccttaccctcggccacccttccacaccctgggtacccaccttctgaccctggtgtgcctgtggtgggaagaggctgagccagggcctcgtggggattcaggacagctgtgggaagaaacgggagaggagggtaacatagcggggaccccggcagtggagcctgcgaggggggttgggggactgagaccctccgaaaataggctaccttggaagaaaaggaggaataatctagcccccacggacgcctcagtgccggggagggaggggctggcaccagctccttgtcactcacacccaggcccaaagccccctcatctctggccagcttccgtcctcctaagccctcttcgaggggccggggccagcaccccagctttccctgggtgggaagcagctcatgctgcgcccgccccgaggtggggtcagggaccgtccgagggccagtgctgctaggtacgtcggtcctaacccgcaccccagggcccgttccggcctcggccatccagcccctctcccctctcccctctcccctccggggcctctcgcgcctcccgcccgggcctcggggcgccgcgctcaccgcccagcaggaggaggaggcggagcgctgccggccgcccgactcgggtcctagggagacgcgggccgccggcgcgctccacccggagcgaggccatcgtgcagcaaggaggcgaggagcggcggcggcgctgagccgggcccgggtgtgggggcgcctatatccccagcccaagctgcaggaagccgcgccgcttcctcggaggggctgggacggcggcggccacgtggggggcgggggcgacgctcggggcccgcggctggagggggagtcgctgcctcacccgcgcctggcg

SEQ ID NO: 18139 - DNA, 2300 bp, Homo sapien
tacaggtgcccaccaccacgcccggctatttttttgtattttttagtagagacggggtttcaccatgctggccaggctgatcttgaacaactcctgacttcacgtgatccacctgcctcggcctcccaaagtgctgagattacaggcatgagccaccaagcctggccaagggtttacatatttttaattaaggaagacctgtgcatatttatagtatatgggagaggagctaagggcaagggcgagagggaagatgatagagaagtcctggaggaagttgaaaaggggaggcaagaacatatgccaaagggtgcaacacttcttctgagtccaaaaggaaggagtaggctggatgcggttggtaatcccagcactttgggaggccgaggtgggcggatcacttgaggtcaggagtttgagaccagcctgaccaacatggtgaaaccccgtctctactaaaaatacaaaaattagctgggtgtggtagctcatgcctgtaatcccagcttctagggaggctgaggcaggagaatcgcttgaaccagggaggcagaggttgcagtgagctgagatcaagccactgcactccaacccggcaacagtgcaagactccgtctcaaaaaaaaaaaaaaaaaaaaaaaaagaaggagtaaaagtggagagaaatttttgagcgatgaatcaagtatagagacagacagagggaaaacttaaagggttcacatgcatggcctcaatctcataaagcaggaatgaaaggcgttctgcagagagcagagacatggggacaggtggagtgccttgatgaatgtggaaaagtttgaatagttatcttgagggtgacggagtcaataaaagacaaaggatcacagagctgcccttagagcccggtagtgaggctagtcagggaatctagggcttggcaaacatgttctggttatttttcttccagcaatactccagagcccaggagtgaaaaaaagaggtgggggaaatggagcaacgatcattggtttgggaactgacctgtaggtaggtaggtaggtaaggggacagaattgagtagtttaggctgggtaaggagtctgataaaaccaaaaggggtcctaggtcttgagacaagaaaggcgaggtcatggcagaggtgagagatgggtggttgtggtcaaagcctgcagctctgaatcatggaagtagggctgtctctagtgattcaagctacaaagtgtgctcccatgggtgctgcaggagcctgaggaatggtgaagtcaaaggaaattggagggccgggttggtcacctgttatccctttgggaggctgaggtctggagatcgcttgagcccaggagtttgagaccaacctgggccaacatagtgagtgcccatctctagaaaatattagccgggttgctgggagcgttaactcactcctgtagtcccagcactttgggaggtcgaggcaggaggatcacttgagcccaggagtttggtgagacgcccatctgtaccaaaacaacaacaaaatgtatttaataactgggtgcggtggtgtgcacctgtagtcccagctactcaggaggctgaagccggacggtcgccagatctcaggaggtagaggctgcagtgagctgtgattgtgccactgtattccagcctgggcaacaaagggagacctttctcaaaaataaataaacagataaataaataaaaaattaaaaataaaacaaaggacattggaattgagcttgggtaattgtgagttgatcaaattaaatggcaattcacagaaatgttaatattaaaagaagcctagtatagaggaaacaaaggtaggctgggatctggagatctgggctttatttgccgttctacttcagcaacaaaaattcgccgctttggggaagacatgacctttctctggggttgaaccagaagacttcccaggactcttcctgctccaaaagatagggctttttaggataacagcgagggactgggtcatgacgaggactcctcctgccggtctctctctttccagaaaggcttccggaacctttctgcattgccttctgcccggacgtgcggaagcgaaggccggaagtccttagccggtagcttccgggtttcctgggctactacgatggcgatgagtttcgagtggccgtggcagtatcgcttcccacccttctttacgtgaggctcagaccccaagaagcaccgctgtgcctccctcccctcccccggaccctgggctcagccctgatgcttcatatggggagggggagaaaagacccgtcggc

SEQ ID NO: 18140 - DNA, 2300 bp, Homo sapien
aggatagatcctctagggtcagtgtctagtgacaatggctccgatctccctaggcctgattttcacggcccctttgtggccctgaagcagatggtgtcattctcgtgcatcagacacaaatgctaggtgtgggggaggctgagtctgagaggagaaccaagaagggggaaataagcacaaactcatttcatgctgattcaggctttcttccaccccttactcctaaggagtgcctgggaagtgtggatggcagctgtagcagtatagatggcttatgcataccctgcctctgggaggtctcggcttccagccagagcactctcctcagaggccttgggcctcaggagctgattgtctctgcctatctctccctgttcagagttccacgggctggatgaagccactctactgcgggctctgcaggccctacagcaggagcacaaggccgagatcatcactgtcagcgatggccgaggcgtcaagttcttctagcagggacctgtctccctttacttcttacctcccacctttccagggctttcaaaaggagacagacccagtgtcccccaaagactggatctgtgactccaccagactcaaaaggactccagtcctgaaggctgggacctggggatgggtttctcacaccccatatgtctgtcccttggatagggtgaggctgaagcaccagggagaaaatatgtgcttcttctcgccctacctcctttcccatcctagactgtccttgagccagggtctgtaaacctgacactttatatgtgttcacacatgtaagtacatacacacatgcgcctgcagcacatgcttctgtctcctcctcctcccacccctttagctgctgttgcctcccttctcaggctggtgctggatccttcctaggggatgggggaagccctggctgcaggcagccttccaggcaatatgaagataggaggcccacgggcctggcagtgagaggtgtggccccacaccgatttatgatattaaaatctcaactcccactgcctgcctcttaaattactacagtactggaatggggatggggagggctgtgaagtgttgccacctgagtaaatcccagcctgggagaggggagagaaaagaaagcttatggcttttgtagaagaaaaggtcctccagggccctgtgggctccagtgagcctgtggttttacatctgctgggtgggctgtgtggaggagtgctgatggaacacagcttggggacagactgctttctctctgaattggagtcacttaagggctcccccttccctcaccatctccctcatggaagtcctgaactactctgaagcccctccctccacccatctggtctgggtggggtaactgtggccaaggggagctgaggggggtaagccggatgtggactttggtttattggagactggcaaacagaaggggaggaaggagagcccatatagcaaaaacagccactctggccagggttaggctgcggccaaggtggcctggaggggatggatgaccgggctctcggtttgggggagggacttatcctggggagtacacacccattccctatgcagaccagagggacaacaacgtcagacctttccactgacctctccgttcggcctggggctactccggacagttaggagggggtggtgctgccttatctggggtgtgcaggagggtggtagcctccccctaagtaatcccccactagggtccgggtgtcgttctctcctgccctcctccgcgcacaaacaggtttgctcactcttagtgcgggaggatgctccgcggtctcccactcagttctggcctcagagtgagactgcggccgggggctcgggaaagaaggggacgcggctgggcggggcggtgactaaggtgaggggctgctcgcgggatccgcaccgcgggagcagctcggaggggcggccctggggggcaagggcgggccgcggggcggcgacgggggcggggccaggccgagctgggggctggggccgcagccgctcagccggagcgcagcgcacccagcgagtccgtctgtcaggccgcctcctctccggccgtctgattttctacccttcggcgccctgctcttcctcatgttggcatccccggccacggagaccaccgtcctcatgtcccagactgaggccgacctggccctgcggcccccgcctcctcttggcaccgcggggcagccccgcctcgggccccctcctcgccgagcgcgccgcttctccgggaaggctgagccccggccgcgctcttctcgtctcag

SEQ ID NO: 18141 - DNA, 2300 bp, Homo sapien
gtggtgtctggtgactcccccatgggtatgaacattctcactttaaagtctccatactcaaccctgagaggtggaaaataggatgggaagttaggcaggggagccagttcaggtcagtttcctgctggtgggtacccgcaatcccttcctctcccctaagtcctgagatcctcagttatgaccctggtcctcttgatcccctcactcctcccgtcccccacctatttgcagaccaggaggctgggatgcgggaagccaggagctgggcaagggtcatctccaactccagaagatttagggcagttgtggcagaatagggccccctaaccccttctggagcagtcagacttctggacttctccacagctgcgaggagggggacatagggagctccagctctcgagtgagtccagttctgctcctcatcccactgcctacctgtgctctcccttcccagacctaaaggcactaagcccatgggctttagggggaccttcctcccattgctcccatgctacatatgggttaggagaacccagtcaacttggggcctgaagcttccgattcagatcaggggacagagcctaggggaagggtccctctccagccctggcacagggctcgccccttgcgcctgccagtgccgcgccccaggctctgggccaggccaggagaggcagccaaattggggggtgaggggagggagaggagccggggcgggacgactatgggggtgggcagcctcctggcgcctagtcctggatcttttctttccttctcagtacctccctccatatccctcccgccttccgtctggatctagcagttctgtttctggggccaacccccttgccggccccaattccctgcccgcagtatcctgctgcccgcctgctgcctgctcactgccagcccccgggtgccccctcccgccccatggccggcctgggcagccacaaaggcactattgagctcagggctctgggaccgggctgcataaaggtgcttgtgtccagcagggggtctagggggctgccccaggcccaggttgggtgtgtccttggatcagcttacgtgcgggactgttggagagttcagggtctgcagcccactgggcaagtaatcccattaaccccaccccatctgtgggctccaaccctcacctcttcccccaaccccactccaggtgtccctcttcctttctgtgggtgtcctgggcctgacatgacacccgtcccccatcccacagactcggaaactgtctagagctgagcggcagcgcttctcagaggaggtggagatgctcaaggggctgcagcaccccaacatcgtccgcttctatgattcgtggaagtcggtgctgaggggccaggtttgcatcgtgctggtcaccgaactcatgacctcgggcacgctcaagacgtgagctctgcgcatgagtgggtggggagagggaggctgggatgtgtgcccactgcttcctgaactcccaggctcctcaaactctctaatatccaggtgtaaaaccaggttcaccatctccctctcacccaacctttgtccctgcctcggtgagtggcaatgtccacccagcactccagtaaaatacttgggtgtctccccagactcctctttctccactctgccccctcatcagtctgtccccaagtctttccttaacctctccccacctggctttcactgcttcatccatgccaccacctcaatgccatctcgctgatctggagccctgcagcagcctcctaaagggccttcccaaactctgccaccctctaagcgatcctatcttcctgcagcctggagaatctttcccagttgaaaatctgaactgtcactcccctccttaaaaccccttcaaagtttctcatggccttggaataaagcccacacaggctcacctgttcacaaagtccttaggatacagcctcactttcagcctaagctccagacacaccaaattcctggcacctcctcccaccctgccttgtcactggctttttctgtgcctttgagcacggtgtcctgtctgcctgggaagtctccatcccttccccctttcacctttgagctcctactcatcattcaagatgcaacacaaaagtatttcctctccgaagctctccctcatgcttggggcagttagtcatcccttcctgcgctcccacagcaccttggccgaggccctatctatcaatttacttcccaacccgtttggtaacgtcatgtctatccaccatgccccctgactcagtttctccctggggccgggcagacatagg

SEQ ID NO: 18142 - DNA, 2300 bp, Homo sapien
gtagaatagggccgcgggccgcggcgggctcggctcacccacgcgtcaccctcaggttcaccatccaggacctcctggcccacgccttcttccgcgaggagcgcggtgtgcacgtggaactagcggaggaggacgacggcgagaagccgggcctcaagctctggctgcgcatggaggacgcgcggcgcggggggcgcccacgggacaaccaggccatcgagttcctgttccagctgggccgggacgcggccgaggaggtggcacaggagatggtgagcggaggacagactgtgctgccactggacgtgtaaaggacattgactcgaggggacagtgcaacagggatggggcgcaggaggggtggcagcgatgggggcggggcacctcacccctctcaaaatctcctgcagcgtctccctacctctccagccctaacttacccgcacgcacacccagttttcctttacagagggagccctgggtcctccagcgtccctgctttacctccagctgatctgttcttcctgggatgcccttcttgccaattcatcttttccttctttcctccctccccatttttctttttctttttcttccaatatgatcagaaccatcgatttcgggaagccgtcccctttggagtcaaacttaaatgcttctttccacttcagcatgttctcggttacagcactccccactatcggtcctgtcttaaacctgaataagttcctatctttcttctccactagactataaactccctgagggcagagactgtgttttatcgattcttctatccctggcagtgcttggcacatagtaagagctcattaatagcctacatctgtacatggcttaaagcactttcacatgcatttgatctttgctacccatcctgcatagggggcagttttatctcaacttgttgatgaggaaatggaaattcagagaggttgaataccttgtccagggccccaagtaagtaagtggaagagctggattgaaactgaggtggttcagattttaaatcaggttacccttccccacctcctttactcattcagcaaagcttgcggctaaaaggaatgaggaggtgatgaatggaagctggtagaaggggagaggcataagatgcaagggcagaagcttgggggctggcttaggaagtcctgaagggagtatgggattctttttttgggagtaatggagtctcactctgtcacccaggctggagtgcagtggcgctatctcagctcattgcaacctccgcctcctgggttcaagcaattctcctgcctccgcctcctgtgtagctgggattacaggcaaaagccacaacgcccagctaatttttgtatttttagtaggaacggggtttcaccatgttggccaggctggtctcgaactcctgacctcaagtgacccactagtcttggcctcccaaattgctgggattacaggtgtgagccaccgtgcctggccgagtatgggattcttaatagagacatgacagttgcaagggtggagaccacctacggtaggtcaagaatctgagaatgtgttagaaatttagagcaggtctccatagcacggcccaacctgacctgagatcaaatcttgatccattgctgacaagggattcttggccttggcactgttgacatgtttgttttagggactgtcctgtgcattgtaggatgttgagaagaacccctggcttccgctcactagattcagtagcacctaccctccagttgtggcaactaaaaatgtctctagatagtgccaaacatctcttcttcccattggaaaccactgacttactgtataactatgaaccagctacttcattaatctctaaaaatcgaatggtaagatttatcccacaaggttgtttggaggatctagtgatgataatgtaaggagctgccagttaacagacatagtgggtaatcagtaagtgttggttttcttcctcccatatcctggagttcccaagaaggcgtcctgatggatctttgatagggggtcccaagctgtgttcctcatcccccaccccaattccaggtggctctgggcttggtctgtgaagccgattaccagccagtggcccgtgcagtacgtgaacgggttgctgccatccagcgaaagcgtgagaagctgcgtaaagcaagggaattggaggcactcccaccagagccaggacctccaccagcaactgtgcccatggcccccggtccccccagtgtcttcccccctgagcctgaggagccagaggcagaccagcaccagcccttcct

SEQ ID NO: 18143 - DNA, 2300 bp, Homo sapien
cagaacagaagccatgtatctcccccacaccagggcccaccatggagcttgtgttctcagaatctgatgctttctgatcaacaaaactgagcaaggaagatcccaacactgaaggggtagaaggccaggggggcatggagagtgcagctccattatagtgaagagccaaacatatgtgaactgtttgctgtgtggaggtgttagttctgctgcctaccatcttcatctctagcacctcccctgccaagagtcaaccactaagcaatcccacccaagcctggatgcttctagaggggcccactcccagctgggagagtgtaggggatatgctcacaccacattagcagcaaccaataaaaatgctggaaacaagaacgccgtgaatccatatgccatgccttaggaattgggggagcaaagacttgtggggtgaggcaggggaggatttaaaagggactttcttttcacaatgggaggcaggggtggaagctgcccagccctctggcttcctgccatcagttaatgaggaaactgcaaggtcagtgatccacttgactaagttaggatcccctccagaccccaccctagacctgtataggcaggtaccagggaaagttaaaagaatgaagactgcttgtctttcacccttcatccacctctctctccctccctctctctggggatgggaaaagcagtagagttacagtatgttcttgtgggtagaggacagaagagtgaccttccttcccctaagacgtgggttcagtctcaaactgcccagtgatctctcccttaaatcaggtggaaagatctcatggaaaaagtaattctagttaaacatttacagctccctggggcaatgccaccactgcagctactgcttgtgaagctttccagcatgaagtgccatatgctgcctctcagcctccatactcacttgactccaggagaatgactcagtttattattctcaatttgaccctatgtatcccactgtaggctcaaacactgcacagagctgccacgtctaacctcgtaacaactgcgtccctggaaggtgaagggggtaaaccacaaagtcagaaactttgggaaaagccacggtcgcatgcacacctctcaaacaaggaaacaaactacaagaaagggctcagtcattgtacacagcaagtgtgcagtgggcaaagttctgttcttttgacattggccaaatgcgtaagtccctggtttcttgggctcaatcacggtccaaggttagtaagaaggccaacaatgttgtgagcaggattcaatttctacagggtcatggggcatcatccaccatgtgaaggggctccagcaggttggacatgatcaatacccatccagattaggaccctgacgcccttgccagagctcgggctcgggcagctttggcctcgtcttctagctcatctaggaaacgctcctgggaaatcgagtagaaggtgtaaccatctggggaggtaggttcaggaaaccacacagaatatgcacattcccctttcctagatttgctctaccactcttgttactctcccaaatcagtgattccggcttcccgccgctgctgtttctaaaccctgaaccccaattccgttattattaataaatcaaattaaaagagtaccttaggaataacaaaggaaagtactacccattttaccccaaaattaaacgggtggttcagccctcttgcacactctgttcccctgcccctatatgcggtccccttgagtctacaacacggacggatacaaatagccaacaccagggccccgatgcctaggccggtcacgatgttccgggttcgccgccgtggtaggaccttctgccactgggcaagctccgcctgccgcatggaatgcagttgctcgggtgtcagcttctcccgagtcgggtcgatacgctgagcgaacggggcctctccacgcttagaatccagagggtcaccagctcccgaagacgccatgttgccactcctcccttcgcggtgccgccgcgcgggcctcgctgggaacagtagcccttggccgctgcagtggactctgggagttgtagtccgcgtgccctttgcggggcagagccgcggttcccgggcacaggggatggacgcgggaggtgagaagcggacgtgctttctgattggctgaggagtccgtggccgttggggcgggaaaaagctgtggagggttcgaggctgtggtggtaattgggttttcctcagacttgaggcgacgacacactcattggaaggggacgaggaatccagggtgtggcag

SEQ ID NO: 18144 - DNA, 2300 bp, Homo sapien
cttcacttcctaaatttatccacagcagaaccctagactttgcctctagaatgtttttaatccaccctcccttgttattccctctgccctatcacctagcctactgacattgactctacctgtctgcctacatcccatctccctctggtttaatccatcctttacctcctttacatcactgccaaaataatgtttactaaggcagggttaccatcgtatcccttattttaaaaccttcactcccttatttaaaaaccttcaatgtcttcttggtttcctaccaaaccaaggataaactcttccccttggcattcaaacttccacatggaatgtctccaaactacctttccagtattaatttcaactattcttccacatgcactggccaacatggactacactgtacccacatgcaccctaagcaccccatttccatagctttactcatgctacctctttttggtagaaacactgtctccttcctcccccttcaccaacccaatgtcctccttccttcaaggtctgcctgaaatgtcccgatgcctgggccatcccctgaattcttcctattaccccatcgctcctctcaacccccataaacgcttgttttatttctctctgacgtctcttatctaaccatagtacctagtcattgcatatttgttctaatatctcccccaaattgcacatggtttgaaggcaagacctctatctctatttcatctttcttttctctttttttttttttttttttttagacagagtctcgctctgtcacccgtcactcaggctggagtgtagtggcgccatctcagctcactgcaagctccgcctcccgggttcatgccattctcctccctcagcctccggagtagctgggactacaggcgcccgccaccacacccggcttttttttgtatttttagtagagacggggtttcaccatgttagccaggatggtctcgatctcctgacctcgtgatctgcccgcctcagcctcccaaaatgctgggattacaggcgtgagccaccgcgcccagcctttttttttttttttttttttttttttttttgagacggagtttcattcttgtcgtctaggctgaagtgcaatggcacgatttcggctcactgcaacttccgcctcctgggttcaaacagttctcctgtctcaacctcccgagtagctgggattagaggtgcgcgccaccagtcctggctaatttttgtacttttagtagagacaggatttcaccatgttggtcaggctggtctcgaactcctgacctcaggtgaacctcccacctcagcctcccaaagtgctgggattacaggtgtaagccaccatgcctggccctctatttcatctttctagccaagcggtgccactcaagtattccatacatgtcgaagaaatcaaggggagggcactgttgtgacttatccatcactatatccccagcaccccacagagaggtgttagcaaacattctctgaatgaataaaatcaacggaatctcaaggtcggtgcctgaaagacacaagccccagtctcccaagaacccagcaccccggccctgcagccgcacccacgatctggggctccctgaagcggcccagccgccccgaagcctccctcactgcttgctcattctgctgggccaagtgaagcagggcgtcttcaatcgtctctgtggcgacaactccaaactgaaagtcaacgagggaggccgatcgtggcctcatgggtccgtccatattcacgagcctcttggggcacctggacgggttcactggatccacataccgacccccttagctcctctccagtcttctgccacaccctggattcctcgtccccttccaatgagtgtgtcgtcgcctcaagtctgaggaaaacccaattaccaccacagcctcgaaccctccacagctttttcccgccccaacggccacggactcctcagccaatcagaaagcacgtccgcttctcacctcccgcgtccatcccctgtgcccgggaaccgcggctctgccccgcaaagggcacgcggactacaactcccagagtccactgcagcggccaagggctactgttcccagcgaggcccgcgcggcggcaccgcgaagggaggagtggcaacatggcgtcttcgggagctggtgaccctctggattctaagcgtggagaggccccgttcgctcagcgtatcgacccgactcgggagaagctgacacccgagcaactgcattccatgcggcaggcggagcttgcccagtggcagaaggtcctaccacgg

SEQ ID NO: 18145 - DNA, 2300 bp, Homo sapien
acatagaccagctggtatgtttgtgtgtaactggccaagccttttatcagctgaaacccacaggaaggctcaagggtcactgagggggcttggtaagcccttgtctttggcactcagtcagcctcctttacatgtctctgatctgcctattggcagcaaaagaaactaagctcagctttggttgttttagtctcatctttctcacctcctgaccctcttcccttggccccatcacggcttttacacaatgccaagagttcacagagtggttttggttgcatcttgtgaattaggctcttttttcctgttttggcagagtttgtttttctcctgtctgaacaatggtgtctggagaaatctgtgagctaccaggctgtagaaatcctagaaaggtaaagccctggcataatgccttttgaacggcacctctcagagtggctaatgtacctacatctttaagaaagtatgagtagttgccccttaccctgagacctggttttacaccctctctaacttgcaaatataaatttctttgttgttattgttgttttgagacagggtcttgctctgtcacccaggctggagtgcctggtgggatcttggctcactgcagccttgacctcctgggctcaagtgatcctcccacctcagcttcctgagtagctgggactacaagcatgtgcctccacacttcgcacttggctatttttttttttttagagatgggcttttgccatgttgcccagggtggtcttgaactcctgggctcaagtcatctgcctgccttggcctcccaaagtgctgggattacaggtgtgagccaccatgctcagcctcaaatgtaaatttcttaaccagcaagttaaactccctttagtttgtgtgagtgaggattgtttactctccctcccttccctacaggtttatggtaaaacaggcagagaacatctgcaggcaagccacaatccagccaagagataataagagagagtctcagaattggagggctctgaaacagcagcttgtcaacaagtttactctccgtcttgtgtcatgtgttcagctggccagcaaactttccttccgaaacaaagtaaggagctggggttgctcatgggcacctgagtgttaggaagaaaccagcttttatacaaaggggggctgtgatgagcttcaagtcagtgacaagaagaaaataaataaattacaaagtaaaaacaacggccgggcgcggtggctcatgcctgtaatcccagcactttgggaggccgaggcaggtggatcacctgagatcaggagttcaagaccagccttgccaacatggtaaaaccctgtctctactaaaaatacaaaaattagccaggtgtggtggcgcacacctgtaattccagctcctcaggaggctgaggcaggagaattgcttgaacctgggaggcggaggttgcagtgagctgaggtcgtgccattgtactccagcctgggcgacagagcgactctgtctcaaaaaaactaacaacaaaaaaacaaggtagctgtaagaaacctactcctaggttaggtgatacaactcatggaaattccagagtgtaattatgcttcctaagcataccttctacacacacacacgcacacacatgatctttctccccctctcactcacacagaggcagttattaaatagcctgaagttctgttcccaaagtataattgggacagatgccatcattcatactggtcacctttcctccccccttggactcaagggcagtttacataaggtgcctgaattgccagcatacctatcaacagtagaagcaaactattacatttataagggaaaaaaatgtttccacatcactacccaatgcctatacagtaaaatatcattcattcaacaaatactttctgagtttattctatggccagatgctgcaccaggtgccatggctacaacagtacaaatattgtctgtgctcacaaggaacctattatgtaatgggaaaagacacatacaaatagtgtggaaaaaaaagctctgattaatgtaaatacagagggctataaatgtacctcatcagccttggagagtcaaggaagtgtatttagagaaaatgacttcttgaaatggggtgggtgggagatgggaggatcctaagagaagagggagaggaattagggaggaaaggaagggagatccaggtatagaaaacagcctgtgtagtggcttggagagggacagcatggtgggtttgggaactgtaagcaatttggaatgacaagcagagtgtgagggggaatta

SEQ ID NO: 18146 - DNA, 2300 bp, Homo sapien
atatttgaactttataaattctttatgaggcagtttaacgttttacagaaaaaatcagaaaccaaggcttggagaaatgaagtaacttgcaaaaagttgttcagctagtaaatgacagccaggatttaaacccaagcaggctgactccaggcccataagcttatttaagctgcctattcagtcttctcttttactgtctgacttaatctgaattcttctgactttgcgggattttggggttttttattttttttaattatagagacagggtcttactgtgttgcccaggctggtctcaaactcctgctcaagtgatccacctgcctcagcctcccatagtgctgggatcacaggtgtgaaccaccactcctggcctttttaattaatttattttttgagacagggtcttgcactgttgcccaagctgcagtgcagtggcatgatcatagcttcctgcagctttgacctcctgggctcaagtgatcctcctgcctcagcctccaccacccaccacacccagcaatttttttttttttttagagacaagatctctgctaggttgctcaggttggtcttgaactcctgggctcaagcgatcctcccacctcagcctcccaaagcactgagattacaggcgtgagccatcacatccagcaaattcttcagactttaagactctactccatttaccagctgttggaccttaggtaagtcacttaacctctctgtgcctcggttcttcatctgaaaaatgatgtaatgacggtataccccgtacgggttgttacagggactaaatgaagtaatacgtgtaatgcacttggtattactatatagtaagtcctcaaaaaataccatttattattatatatacatattccttttctctgaaacagcaggagcagaaaataaggatctttcttttgctactgaaagctctctttttttgagacggagcctcgctctgttgcccaggctggagtgcagtggtgcgatctcagctcactgcaaactccacctcaccggttcaagcgattctcctgcctcaacctcccgagtagctgggactacaggcacgtgccatcacgcccggctaatttttgtatttttagtagagaggggtttcgccatgttggccaggctggtctcgaactcctgacctcaggtgatctgcccgcctcggtctcccaaaatgctgggattacaggcgtgagccaccgcgcccggtcggaaagctctcagaagtccacaatgtcagaatgctttatgtttccaaggagaaaacagggagccagatgaagtgactttcctaggttcacacgatgagtttgtggcagactacacagccaccataagaattatatcaccaaagctgcccaccttccacattcttgaccaccctctttccaagggtctcgctgacctgtgagttcctggatggtgacacggtccaggatcttgaaactcgtgtccagtttcaggggctggctgcagcgctggcacacgaagctcacctgcatggtgctgttgttggacgtcttagacccttccatccctgaggccgtggaaaagaggcaacattagggagaagcgacgcccttgacctccggcccggggttaccacatgccttggtgacgatggtaaagggagggaagtcccaacctgcgccgttccctctaggaatggtatgatacggggaggacctgcttccgggacagcctgagcaaaggcagtttagagcccagggtcagggaagggactccaataagagccgtgagggttcccagactcccttctaaggtcccacctcagcccccgatgctcttcacctcgggagcccggagcccgtcacccaagtccggtctaccgcggaggcactgtggcctcgggtcggccccggagcgaggcctccagaactaccatcgctctgtcttcagcgacttcccggtagccgccggaaaacttccgccgagaccggacgtgacgctacgacggcagcaggagctcctggtccacaggctcacaggcccggcagcggcccccagaggccgggctgggaaaagcagcgggcttcagcggatgaacaaggttaccacgggaagtgtaggagccaaggccgcagagaatggggaggctccgctattctctaaattcagggggcggcgggcgcggtggctcacgcctgtaatctcagcacttggggaggccgaggagggcggatcacgtgaggtcaggagttcgagaccagcctggccaacacagtgaaaccccgtctctactaaaaatacaaaaactagcc

SEQ ID NO: 18147 - DNA, 2300 bp, Homo sapien
caaggaagtgccattttttgcttttgttccccaaatatatgatacccaatactggccaaggcaatatgaaaacaggcttcctcatacattactggaagcagaatatagttatgtgcaagcactttggaaaatgattcccagtgttaaggaagagacattaaatagctgacacactcttaattctgtagtcccagttatgagtctctatcataagtagccagctcttcattgcaggattattgtaatcacccacaggggaaatagtagaatttccagcggtaaaaaaatacactaaggcagtacatttagtgtagtgtaatgtagccatgataactacaataactgtgtagcaacatagaaaaatgttaaatttaaaaagcagaagcctgggcaacaaagtgagaccccatctctttttttttttgagatggcgtctcgctctgtcaccgaggctggagtgcagtgtgagaccacatctctacaaaaaattttaaaaattagctgggcatggtagtgatcacctgtggtccctgctacactggaggttgaagcaagaggattgcttgagccaggaagtcaaatctgcagtgagccatgtttgtttgttccgcttcactccagcctgggtaacagagtaagacactgtctcaaaataaaaataaaatagacaatactacatacaattttgggttaagcagtggtttcttttacaccaaaagcataaacattggactttattgaaatgaaaaacttttggccaggcacattggctcacacctgtaatctcagcactttgggaggccacagtgggggattgcaaggggagatgggaaatgttctaaaactggattatggtgatagttgggcaactgtgtaaatttactaaaaattattgaactgtacatttaaaaagtgtgagtcttatggtatgtaaattataccccataaagttgtttttaaaaatgaagtaagtccctctgctcaagacccagtcatctcatctcattcaaagtgaaagccagagctttacaatccctataagagcctaggtggtagctcaacactcttacctccctcaccccattttctgtatctcttttcgttgcccatcttctagccacaccagcctctgctaatccccaaacaggtaccctctgtgctcttgctgttcccttggcctagaatgctcttccttaagatgcaggtaagaattccttcctcaccttcttcaagcttttatttgaatatcactttctttttttgttggttttgtgtgtgtgtgtggggggggggggtttgagatggagtttccttctgtcgcccaggctggagtgcagtggcatgatctcgactcactgcaacctccgcctccgggggtcaagcgattttcctaccccagcctcctgagtagctgggattacaggcgcacgccaccatgcccagctaattgtattttttagtagagacgggatttaaccattttggccaggctggtctcgaactcctgaccttgtgatccgcccgcctcggcctcccaaagtgctggaattacaagcgtgagccaccatgcccggccttttgttgttgctgttgttgttctgagatggagccttgccctgtcgcccaggctggagtgcagtggcccgatctcggctcactgcaacctccacctcccaggttcaagcgattctcctgcctcagcctcccgagtagctgggattaagctgggattataggcgtgccccaccacgcccggctagtttttgtatttttagtagagacggggtttcactgtgttggccaggctggtctcgaactcctgacctcacgtgatccgccctcctcggcctccccaagtgctgagattacaggcgtgagccaccgcgcccgccgccccctgaatttagagaatagcggagcctccccattctctgcggccttggctcctacacttcccgtggtaaccttgttcatccgctgaagcccgctgcttttcccagcccggcctctgggggccgctgccgggcctgtgagcctgtggaccaggagctcctgctgccgtcgtagcgtcacgtccggtctcggcggaagttttccggcggctaccgggaagtcgctgaagacagagcgatggtagttctggaggcctcgctccggggccgacccgaggccacagtgcctccgcggtagaccggacttgggtgacgggctccgggctcccgaggtgaagagcatcgggggctgaggtgggaccttagaagggagtctgggaaccctcacggctcttattggagtccctt

SEQ ID NO: 18148 - DNA, 2300 bp, Homo sapien
aacctacttgaaggagacaaaacataattatttgagaacaaagcatattttaacaggcacaaacatattagcttttccagttgatgttataaattctgactggaataagaatagtggcatacttaaaatagaatggagtaaatgtgggaaataattcctgaagtttcaaatcggatctcaaaagttcccagggaaatgtgttaacagaaaacatgtaaaagggggaaaactgatagagcatgatgttatatgtggccttctataagctgaaaaggactttgagcttgaaagcaggaatggaaataattactgtaatttaaggagtaacctcttcatgctaagcattaacagatcacttacttacctgacagtggctactatttattttgtgtctaagcactgtgctaattgttttacatatattatttctaatattcacaacactacaaaattacatactattatttattactaattattaaaattccatcttacagatgagggaatcgagactcagcatttcaataatttgcccaagattccagttagtaaggagctgaggtgggatttgaagcccaggtctctgatcccaaaggccatagtcagtcttctgtgctttactccatttaattgtgtattcccctcattttcctagcacttagtagagaggccagcctaggataaatgttcaacagcaagagcgaccccaaaatacaaatctgatgacctccttttgcacttaatctagattgtttactaacaaccctcctcaccctcagctcactagtctttgtcttcaagacaatctctttccttccctagagcatttgcctgagctgcccttatacctctcaaggctcttctcactctttccatgctaacctctttatatcctttagatcacagcttgcctgttcagaggccttccttggccattcgatctaaaatagatctctcgtattttctatgtcatccactttttccctaacatttatcaaattttgcagttaccttgtcagtttactttctggtgtttttccaatattatgccccatgggaccagcgaccttgaatcttgtttgcctttgatttcccagagctgtgctcttcaatacagaagccagcagccacatgtggctactgagcactgtactacaaatgtggtgttgccttattgagatgtgcagttaagtgtaaaatacgcactggattttgaagacttggtatgagaaaagaatgcataagatctcgatttttaaatgttgattacatgttgaaatacttgtataaactgggttaaatgtatgactaaaattttcacttgttttactttttaattgtggctactagaagatttcaacctacatatgtgactcacatatttctagaatctgacacagtgccctgccccattttattgaatgatatatccaatgtcgagagagagagatcgaatgaatgggtgcatgaagaggtatagtctcatgcttccactaggcaaatagatacagcactgccgtagaagttaggagatctgggttctggctcaggatgtactggaaacgccttggacaagccctaccctactctggggatcaatttgccaattaggtagttgatctttgaggtctggaagcttacgagaatcagttggcagggaaatgtaccaggaaagcttggtacaacggcgcttgtctttttcgctctagcctaaacacttgagcctcggcaaacgggcagaggcagcgggaatcagggactacacccccgaacccagtacccgggtccccgacttccccgagcctacgtcactggggcgcgacggcgttgtccccgggagtgcagcggctgagaaggtcccttcggtgaaggcgagttccgggacaacagagagggccgcaccgtttccgagtctctcggaggctcagttctcagcgcaccattccccacagctctcctttttactttacccctacccgacacttgaccccggcagtgtgaaccccgctgggagcgtccaaagccatgcctcatcgcggctgcgcagcgcacgtgcacagcctcgcaggagtctcggcgattggctgtgacgcagtttccggcgtgagcggcgaaagccgggagggcgagcgagagagcaagcaggcagcaggctgccggcgggcgggcggacggcacagagggagggagcgagcgagcagtgagtaagccagcaagggcggtcgggtcccgaggtcagccgagatttctcaggtccctccggccccctccctggagtccacagcgcctccggtgtccag

SEQ ID NO: 18149 - DNA, 2300 bp, Homo sapien
gagcttgactcctggttgccttttcccagccagttttcagttggggtgaaggtttctgcaagtgtgaggtccagatgctgctgctcatgttgggctttccttttgggaactatttctctttatttatagtgtcgggcttccggggaaagcaatcattggtgtgtatgtgtatgtgcatgcacacacgtgcatatacacatttgtgtatgtggaaatgtgctgggcaagtcaaaactatagaagagttgcctcctgtctctcgaatcttccagagatatcacttaattgttaacagcttttgtgttaatccccttcagcccctagctcttttattctaccacggctggagagttgatacctgcagtcagcctgccagtgactcttagtgtctgtttctgacttatttttcctgtctctgtcttccaacccccaataatatttccaccggggatgcatcatttttactcccaatattctgtagagagggagtcaggatgctgtcttcccacgaatagtactcagtaacaaaccaattgcattttagttgggcagtgctcccacccaccctccagatcccttccagctaaaacccttcccccttccctccatgtgtttctcagtttcccgtttcgtttgttggactgttccactgcccctcctcctcaccctatcacccatggatcgtaatgtaaaattcttttaccatgtcaagaaattattaaaaatacaggtactttgacctctttctaaagccgcagaccctggtgcaatgctctggtggctagggatgtactcatgctcatatgtgtgcacgcttggacacccacctccatggacacctagccaccctgttgtgtgtccttatgccagttgagctgaatcttttccccagtatagtggaaagactgaggcttctgcctactgagcaaggttgggtgcttcatttgtgttcagtctgaattatgggaaagttagctcttcccagacctaagctgccttctctccctactttcagaagatcctagttccttccttcccgagtgatacccatgaactgccagtagaggctgctatcgttccatgtgtaaggaatgaactggttcaaggcgcgtcctacccagtcattttctttaccttatactaattcttcctgaataatgtcttcagtttcttgaggagactcctagttttggttttcaaattacttggagggctgcctaggaatctatctccctctgaaataaagtttcctcatcttccaccttgcaagtagccttctggtttccaatgatcccctcgttgtctctgtaaaaagagtttaaggtcttgaacaatggaggagcagctgctctgttctgtttcagagatgactaccaaaagctagcggtttgtgagtgcctcccctgtgccaggctgttaagtacctaatgtgcatgatcacatttaatcttcaggaatctataggatagttgtatctatttgttacagatgaggacactgagactcaggataagtatttccgctaaggttacacagctgagggaactgggattggtggacaaacctgattactaagcccaggccctcagccactccactggttggaaatggcctgactacaaatcaagggcttggcattaggcaacaagtagaattcagtgcttactgctgaacatggcagtgaatcctggagctgttgggatgcagttcctgccaggaggtaggaaaatggacagcttagtgcttgcatgcaggctgcagaacttaattgggcatctgaggtttgtactcttcctgagacccattccaggtggaaactggaggttagcatcgttaacccagattccctttcatctggtctaaatgatggaaatcagtagttggtactgactgctaccagtgggagttcaggggcaaggaagaggctatgcatgtggaagcagtgccctgggccaaaccacaggacagaaaattggaacagaattacataaatcaaggtcagaaatttcctgcccaacccatggggtggagttttctcccttcctatccatcctagcgaatataaaccccgacttgatgtcagtaactggaaggagcagctgttagaattctgatttcagctctcagcatccaccatgcatctcaagatagtcctggcgttcctggcactgtccctcattaccatctttgccctggcctatgttttgctgaccagcccaggtggttccagccagcctccccactgcccctctgtatcccatagggcccagccctggccacaccctggccagagccagctg

SEQ ID NO: 18150 - DNA, 2300 bp, Homo sapien
agggctgaaaaactgggtggtagctgaagacgtggtgtttaaacctgtggctgccccctggaacccggagcactggctacagcgcccacagctgactcggcaggtcctgggaaaggaggacctgacagctttttccttgggaagccccctaccccgctacctctacctggctagcaaccagactaatgcgtggggtcaccagcgcgggtaccgaatccagatccacagcccccttggcatacacatacccctggagagtgacatggagagggccctcagctgggggaggtgaggagggccctggcctgggtggaaggaaaggacagcccctcccctgccccagtccttggagacaaactcccttcccacggctaccattcatccctgtacctcccctcaaacccaagttagatacacggtgggaaatggtctcacacagaatcggatctaagggactcctgggccagtaaaggcacttgacatttcccaaaaccaccttcttatgattcctggccagataccagcttgtggtgacccagagaaaggaggaggagtcacagagcagtagcatctatcaccagaatgacatctggacacccacagttacctttgctgacttcatcaacaatgaaaccctcttaggagaggttggttgccctagggacataggaaagggacacctgtgggcatggcatcttggctgcccagcctctggccaaaggttagagggaatggctgatttccagttcgcagattcagaggccatggagttttctgatgaccaacacaggtcatccctcctggggtgagattagctctgggacactggctcccccctctccccgcacagctgcttacatggattgctccacgtgttgtatgggcatgaggctggggagagtggaagccaggctgagactggaggctgggattgtgactgaagggtggttctttgggtcacgcttccatagtcctccagctcctccttcttcttgcaggatctggtggcttgggtcacagccagcttcctgcacattccccatgccgaggacatcccaaacacagtgactctggggaacagagttggcttcttgctccgaccctataacttctttgatgaggacccctccatcttctcccctggcagtgtctactttgagaagggccaggatgctgggctctgcagcatcaatcctgtggcctgcctccccgacctggcagcctgtgtcccggacttaccccctttctcttaccacggcttctagtcctgagggtgtggcgggcggcgtggttaggcacatgtacttttccctgtttctactttctattctccgtgtttttatcacacctgctccccagattcccaccccctcaatgttcctctcacacgaaacccccatcagtccctttggttaattcttacttcctgttcatctctaaagtgttaaattataaaaatgatttttaaatattcaaagaaaaatatcacaaatcctactactcagaaataggtggtcacattacatcagacatctctttatgcatgtgcattcaaaaggaagagtagatagaattttgtaaaacagatgttgtatgtaatttataataaaaagtattagaggaattttacttgaatttattgtttgacctgttaagtatctagagtcctctggagaatactaaggagtctggccagggaaattagcgctgggggccagagggcaagggggatagacctggccaaggaatgtcatttggaaagctaaaggggcagggggtgggggtctttggaaggaaaacgatagtttgaagttacaggaaaatatctggccctgactaagtgggggactggggaagaagctgggctgaggtcaggagaggctgctctgcacagatcctgctccttcccagtgctgcattatcttgaaattttccttccccttccccctagccccaactctccccaactccaaccctgacccagaaagtagagtgatttggaggctggaagacaaaaccatgtaaggtctgtggaaatcacagctgttcagacccgcctccaaccccggccaccccgcccccttgccctagccttcctgtgtccttcccacccttagtcccaggcatctgactaccgggaacctcagccagagtccgggagccccccaccccgtccaggagccaacagagcccccgtcttgctggcgtgagaatacattgctctcctttggttgaatcagctgtccctcttcgtgggaaaatgaaccagaagacaatcctcgtgctcctcattctggccg

SEQ ID NO: 18151 - DNA, 2300 bp, Homo sapien
ccacggctccccgtggtctgcaatcaggggaccgggccacctggtttggcctctactacaacatctcgggcgctgggttcttcctgcaccacgtgggcttggagctgctagtgaaccacaaggcccttgaccctgcccgctggactatccagaaggtgttctatcaaggccgctactacgacagcctggcccagctggaggcccagtttgaggccggcctggtgaatgtggtgctgatcccagacaatggcacaggtgggtcctggtccctgaagtcccctgtgcccccgggtccagctccccctctacagttctatccccaaggcccccgcttcagtgtccagggaagtcgagtggcctcctcactgtggactttctcctttggcctcggagcattcagtggcccaaggatctttgacgttcgcttccaaggagaaagactagtttatgagataagcctccaagaggccttggccatctatggtggaaattccccagcagcaatgacgacccgctatgtggatggaggctttggcatgggcaagtacaccacgcccctgacccgtggggtggactgcccctacttggccacctacgtggactggcacttccttttggagtcccaggcccccaagacaatacgtgatgccttttgtgtgtttgaacagaaccagggcctccccctgcggcgacaccactcagatctctactcgcactactttgggggtcttgcggaaacggtgctggtcgtcagatctatgtccaccttgctcaactatgactatgtgtgggatacggtcttccaccccagtggggccatagaaatacgattctatgccacgggctacatcagctcggcattcctctttggtgctactgggaagtacgggaaccaagtgtcagagcacaccctgggcacggtccacacccacagcgcccacttcaaggtggatctggatgtagcaggtaagacattttggtggggagaaggcttctggaagaagggctgaaaagttgtttccattagctttgggttttatgtagattatcccagaaaggaagacgtggatttttgtacttccccttttgctggatgggagagagttggctgctgagttttatttggatcttagctcactggctgggtgcaaagctgcagccttcctctacgtgacctcatccaaagatcttgggaaatggccgagctcagggaggaggcaggatttgggctaacagtgtccccattgccctcttctctcccttgtacttatatgggctctgctgctgggagcagccttctgtttgtcagctcagttctgtgtctggcctgtggtggtggtgttttggaggatctctttgcattctaccacgtccctggcatgtgcaggtcagtcattccaggttgtacatttcctttggagatggaccctcctccctgattttccttctttctctgggcacaattcacctaagtgtgaggggtcacatggatcccgtggagcattctggatagatcctggagtctggtcacagagagagccaaggctacatgatggcttggagtcttcatctttgtcttttcactgtctttccccacattgagtcagtcaccaggtgtttttttttggttttgttttattttgttttgtttctgttttgcacctgcagtatctcggcaggtcagactgtcatgccgtgcaggtgccagccctctctctgctgtttttgctcttgttgctctcagagccaagagccactctgcacccagagggcctcccatccacaccagcctgccctttactcagctctcactttcgtcatcacctgtgggatcctgtctgcagaaccccctcaaaactctttccttcacggtgcagctccaccctgccttgctgtgctctgcacagctacacccaaattctccatgtccctggacacgcacttcacatgttacagtcaggcatcctcctgtttgcttatgctttgtctctgcttagaatgtccttccatatcatcttttctggtaatgtcctttaaggccaggctgaaaagttgcccggaagggcccccttttcctgcctgcaactgtattcctgtgatccggaagttgcctaggccatgctcctctcacaggacaggccagtcagtggtttgtctgtctgcgtggaaagcaagagggtaaggatgatcattcatctctatccccagggacgagtacagtcctctctgctaatgaatgttgaaagaatgaatgagtgaaatggaatgaactccctgatgaagtattttaatttacaggt

SEQ ID NO: 18152 - DNA, 2300 bp, Homo sapien
cttacagccttgaaatgagccccactacttctacagctttaaataacaagaggccgggctcggtggctacgcctgtaatcccagcactttgggaggctgaggcgggtggatcacttggggtcaggagtttgagaccagcctggccacatggtgaaactccatctctattaaaaatacaaaattagtcaggtgtggtgactcgcgtctgtaatcccagctacttgggaggctgaggcaggagaattgcttgaacccgagaggtggaggttgcagtgagctgagattgagccactgcactccagcctggacgacagagcaagactccatctaaaataaaataaaataaagatacaaaaagtagccgggtgtggtggcatacgcctgtaatcccaactactctgcaggctgaggcaggaaaattgcttgaacctgggagacggagcttgtagtgagctgagattgcaccattgcactccagcctgggcaacagagcaagactgtctcaaaaaaaataaagtcaaataaaagaacaagaggcaggaaaaccaggcaagtttccttatcaaaatacaaccaatggcataaacatttctggatagcctgacccttctggtgttgatttatctggagggtcctggtctctgtgtggtgctgccagtcaagaggaatgatggatattgtgaaaaacccaagggcagaggggtcgggggtggagctagaggggactaggaatcaggtcgtgttcaggaggtggggcagagttaaactttgactttaaatgacccacataagcctccgtcctcctgttccaaataaaacaacgcactcagggtcagggtcaatgacctggtctaggtttccaggtgtctgtctcactgtctttctgcaatgactaccttgctgaaaacatgcgccacgcgtcttcatgatcttacctcctctgcttactcccctcctccccaactcccaccaaataggctgatccttggctgttccctgcttgtgctgagctgtttcaggtttctgtgcctttgctggaatatccttcctcttctctgccaggtgaatgcatcatcttcaaggtcggctcgaacatctcttcctgagaagtcttcctagatgtgtccaggttggagaggattcttccccaggtacacgagggaagcacatcccccttctggaaccctcagtctcttccagttcccctcaggacctggctgcccaaatgacagtggctttccacatgtttgtcacctggaaaagaagccgctcagccattggctgtgaaggacagaggtggcttcactctccatgtcggcaccattttggaaaaggattttcaggcccgagataagtccacagccagtttcccagccccacctgacctctgccctggcctatccctcagtccagtacaaggggaggcatgaaggtctcggttatactctggttcctgcccccacactcacccccaccccaatgaaccaggcagcttctagcttgttctgcaccctgcacactcccctacagtgacttagggcacttggggcctccacaaagctgacctggctcagcctctcagccccccagctccctgctagatgctttgctttctcatcattaccctcaggcttccctcaggctgctgctaggattctagtggatggatggaggcaggagagagaggtgggaggcagagcctggaggacatcaaaaactagaggagggaaggagggaatctggctgtggaggtgtggccaggtgattttcccttgcagccttgcagccaggagaaaagttccacctggagggaaaagaaaggagagccgcaggacagtcggcgccccccacttcctcttgcaccttgctagctcttatctccaaaacacacctctctgcctacttggttcattgaccctgaccctgagtacgttgtttgatttggaacaggaggacagaggcttacgtgggtcatttaaaatcaaagtttaactctgccccacctccttaacacgacctgattcctagtcacctctagctccacccctgacccctctgcccttggggtttttcacaatatccatcattcctcttgaccagcagcaccacaccaggaccctccagaggctgtgagaaacatcctgcacccaggtcctctctatctgtttatcattgtctattttgtattctgcattcagaaccaagagcctgaagacgacccaggagctttagctatggctgtcttcattattttgtccctgtttagtgttctggtgacaggcatgggtgaaggtggggct

SEQ ID NO: 18153 - DNA, 2300 bp, Homo sapien
cccaggccgccaagacaatacgcgatgccttttgtatatttgaacagaaccagggcctccccctgcggcgacaccactcagatctctactcccactactttgggggccttgcggaaacggtgctggtcatcagatctgtgtctactatgctcaactatgactatgtgtgggatatggtcttccaccctaatggggccatagaaatcagactccacaccaccggctacatcagctcagcattcccctttggtgctgcccagaggtatggaaacaaagtttcagagcacaccctgggcacggtccacacccacagcgcccacttcaaggtggacctggatgtagcaggtaaggcatcctggcagaggcaaaagtgctggaggggtgagctgaagtctccatgcctagctttaaaagttttcgttgggctgggagcagtagcttatgcctgtaagcccaacactttgggagactgaggggggtggatcacttgaggtcaggagttcaaaaccagcctggccaacatggcgaaatcctgtctgtactaaaaatacaaaaattagctgggcatgggtatgctgtaatcctagctactcgggaggctgaggcaggagaatcacttgaatctgggagtcagaggttgcagtgagctgagattgagccactgcactccatcctgcgtgactgaacaagactttgtctcaaaaaaaaaaagtattccatgctttaaaaaattacctctgtgattatagaatttattatattgtatactatgtataaatatgatatattgatataagtatttagatttctatattcaaatgttatcataatgtacctacgttttgccacttctgttttttcatataacaacattattcaagcaagcaacaaaaatgtatgaatgcacacttgtgccaagcacccaactatgcaatttaacaaaagaaacaacattgttgctctcagatggtttacattctttttttcttaccttttgttttttcttttttcttttttgagacagggtctcactctatcacccaggctggaatgaggtagtgtgataatagctcactgcaatctccaactcctgggctcatgtggtcctctcacctcgatctcccaaaatgctgggattacaggtgtgaaccaccatgctcagcccttatcattttttcgtggtgagaacacttaaaatctactcttagcagttttcaagaatatataacatattaactgtagtcaccatgttgtacaatagatctctttggggtttttgttgttgtttgaaacagggtcttactctgtcacccaggctggagtgcaatggtgtgattacagctcactgcagcctcaacttactgggctcaagcaatcctcccacttcagcctcctgagtcactgggactatgggcacatgccaccatgctcaggtaatttaaaattttttttatagagatggggatctcgctatgtttcccaggctggtcttgaactcctgggctcaagcgatcctccctcctcagcctcccaaagtgctgggattacaggcatgagccaccatgcccagtccaatagatctcttgaacttctgaaattttttattcattgagctacatcttcccaactccaccctccttaaggccctgataaccaccattctatttcctactgctatgagttcaactttttttagattccacatataagtgagatcatatagtattgtcctgctgtatctgacttatttaattaacataatgtcccctaggttcatccatgttgttgcaatgagattttattcttttaaggctgaatagtatttcattatgtatatataggacattttctttatccttaaaattttttccttattccttatacatttattaattggaattttccataaggaagagttgtccttcctttttatttctgttttcaattatttattcaaattgtatagactcatggttttttattgtactctaagggttataacccagtacttcatttattttgttccttacatttttccaactttggccattgggagatccttcagattagttcctatgtccttttcacatacctccacacgtttttgagcacttctttactttctggcacccaaaaatgtttcaatttcatctggcattttccctgcttctaccctggaatcaaccttgtctccagggagatcgggttcactttattggagaatggtatttagaaaccaatatctgggcaccaagtgtgctcattattactgggatgtcattgcttttaggccctctcag

SEQ ID NO: 18154 - DNA, 2300 bp, Homo sapien
tctgctatgagtctgtgccttgcccctgttttatatgccctgtatccagtattcaggtcaacccagccctgatctttggactcaaaaaccacgtttgtctaaaatgtattgatcaaaggtgcatcaccagtaggttgatgcaaacatgttcagggtgatttacgtaaaatagaaaaacaggcacacaaaaacagcctgatcggccatgtactcagcagggccaatgattaactttggcatgcttcttggcagtgcaagggtctgccctcctggtccccgaaaccaggccagagacacaggacagagtctacatccacgatgattcttgcaaagatgtcagattttctatgcctgcaactgcacttatttggggacaaagaaaaatcttggtgctctagctattcaagttttaagttcttaattttaaaattagtaaagttctggctggttgtggtggctcacacctgtaatcccagcaatttgggaggctgaggtgggaggatcccttgaagccaggagttggagaccagcctgggcaacaaagcaagaccctcgtttctacacaaaaatttaaaaaattgttttggtgtgtgtgatggtgtacccttgtagtcccagctattcaggaggctgaggcaggaggattgcttgagcccaggagttggagtctgcagtgagctattgtcccaccgctgcactacagcctgggcaatcgagcaagaccccagtctctaaaacaaaacaaaacaaaacaaaacaaaacaaaagaaaaacaacaaataaaatatagtaacttctattgtattggggactatcatcttgctggtctttccttaactgtattagagtctagggtctgcctctggtttgggagatcaacccccttcctggtattggcctcatgtctcttagggccagaaagtaatcgtttttgaatgcagtgattaattcatttaatgaccttaaagttacagcccttggtgttgttttcttttttaaattttctctctcttttttttgaaacagggtctcactctgtctcccaggctggagtgcagtggcataatcacggctcactgcagcctcaacctcctgggctaatgtgatcctcccacctcagcctcctgagtagctgggaccacaggcacacgccaccatgcctggctaatttttctatcttttgtagagatggggtttttccatgttgcccaggctggtcttgaattcctgagctcaagagatctgccagtcttggcttcccaaagctctgggattacaggtgtgaaccaccatgcctggccaagtgttttaactcatacgtttaagcaaaataatgaatgtatagtcttactgtgcaacaatatgatgaatgtatggttccaaataagaataccagcaaaatggtaactggagacttaaagagtttgaaactttcagttatttttgaaaaagggcttctatatcttgagctttcttatacatatgtgtgtagatatacaaaagaaagctcaagatacactgtgtgtgtgtatatgtgtgtgtgtgtgtgtgtgtatactatatatcagcctacaaatagtagagagaccaaaaccctaacacttgggtcacggaggactgtgaaaggaaccagggaatgaatcaggtaacgaactcatgcattttaaaaaatagggctatttaatcatgcttcatatcactattatttattatttatttatttatttttgtagaaacggggtctcactatgcggcccaggctggtctcaaattcctggcttcaagtgatcctcccgcctcaacctagcaaagcattgggattacaggcatgagccactgcctccaaattcatgcattttttgaggataagagccagggggaataaaatgtttaaaaacttgcctgaatttcccatcattaagtccatattgacatgtaaggggtagctggggacagaaaaaagaaactcagagctaatgaatctgtggcaaaagttgacagcattccatgctggaaatgattaaaacatcctccaggaggtatgacctggagtctcctccccaccccaccaagggctcgcacccagcccatgctgactccagttgtccttgactgcatggtttctgctggtccaagcaaacttctcctgccacgcctaaccttggagagcaggtaatgtgttggtgactgtgggtgggtgtaaagtaagcccatgcgtggcaggcagtgctggggcgtggggtatatgtgatctgcactgtcagggctgctgggccataggtagggagcctccctctacc

SEQ ID NO: 18155 - DNA, 2300 bp, Homo sapien
gacaactggagtcagcatgggctgggtgcgagcccttggtggggtggggaggagactccaggtcatacctcctggaggatgttttaatcatttccagcatggaatgctgtcaacttttgccacagattcattagctctgagtttcttttttctgtccccagctaccccttacatgtcaatatggacttaatgatgggaaattcaggcaagtttttaaacattttattccccctggctcttatcctcaaaaaatgcatgaatttggaggcagtggctcatgcctgtaatcccaatgctttgctaggttgaggcgggaggatcacttgaagccaggaatttgagaccagcctgggccgcatagtgagaccccgtttctacaaaaataaataaataaataataaataatagtgatatgaagcatgattaaatagccctattttttaaaatgcatgagttcgttacctgattcattccctggttcctttcacagtcctccgtgacccaagtgttagggttttggtctctctactatttgtaggctgatatatagtatacacacacacacacacacacatatacacacacacagtgtatcttgagctttcttttgtatatctacacacatatgtataagaaagctcaagatatagaagccctttttcaaaaataactgaaagtttcaaactctttaagtctccagttaccattttgctggtattcttatttggaaccatacattcatcatattgttgcacagtaagactatacattcattattttgcttaaacgtatgagttaaaacacttggccaggcatggtggttcacacctgtaatcccagagctttgggaagccaagactggcagatctcttgagctcaggaattcaagaccagcctgggcaacatggaaaaaccccatctctacaaaagatagaaaaattagccaggcatggtggcgtgtgcctgtggtcccagctactcaggaggctgaggtgggaggatcacattagcccaggaggttgaggctgcagtgagccgtgattatgccactgcactccagcctgggagacagagtgagaccctgtttcaaaaaaaagagagagaaaatttaaaaaagaaaacaacaccaagggctgtaactttaaggtcattaaatgaattaatcactgcattcaaaaacgattactttctggccctaagagacatgaggccaataccaggaagggggttgatctcccaaaccagaggcagaccctagactctaatacagttaaggaaagaccagcaagatgatagtccccaatacaatagaagttactatattttatttgttgtttttcttttgttttgttttgttttgttttgttttgttttagagactggggtcttgctcgattgcccaggctgtagtgcagcggtgggacaatagctcactgcagactccaactcctgggctcaagcaatcctcctgcctcagcctcctgaatagctgggactacaagggtacaccatcacacacaccaaaacaattttttaaatttttgtgtagaaacgagggtcttgctttgttgcccaggctggtctccaactcctggcttcaagggatcctcccacctcagcctcccaaattgctgggattacaggtgtgagccaccacaaccagccagaactttactaattttaaaattaagaacttaaaacttgaatagctagagcaccaagatttttctttgtccccaaataagtgcagttgcaggcatagaaaatctgacatctttgcaagaatcatcgtggatgtagactctgtcctgtgtctctggcctggtttcggggaccaggagggcagacccttgcactgccaagaagcatgccaaagttaatcattggccctgctgagtacatggccgatcaggctgtttttgtgtgcctgtttttctattttacgtaaatcaccctgaacatgtttgcatcaacctactggtgatgcacctttgatcaatacattttagacaaacgtggtttttgagtccaaagatcagggctgggttgacctgaatactggatacagggcatataaaacaggggcaaggcacagactcatagcagagcaatcaccaccaagcctggaataactgcaagggctctgctgacatcttcctgaggtgccaaggaaatgaggatggaggaaggaatgaatgttctccatgactttgggatccagtcaacacattacctccaggtgaattaccaagactcccaggactggttcatcttggtgtccgtgatcgcagacctcagga

SEQ ID NO: 18156 - DNA, 2300 bp, Homo sapien
acggcgtggtctcagctcactgcaacctccgcatcccgggttcaagcgattctcttgcctcggctcccctagtagctgggattacaggcgcctgccaccaggcccagctaatttttgtatttttagtagagacggggttttaccacgttggccaggctggtctagaactcctgacctcaggtgatccacctgcctcggcctcccaaagtgccgggattacaggcatgagccaccgcgtccggcagtcttttaccatttgcaaacaatattgcaatcaacatttaaaaatgtggatctttacatatttttgccaggatatctgtagggtacatttctagaagtagaattgctaggtcaaggagtagataaaatacatttaaacattttgatagctgttaccaagttgctctttgatgaaattgtaccaattctcactcctacgaacaatgagagtgttccattctctaaatcgtttcagatatttgacaagataaaaattagcacctggtttaatttgctttttttttttttttttttttttttttttttgagacgaagtctcgctttgtcagccaggctggagtgcagtatcgcgatctcagttcacggcaacctccgcctgccaggttcaagcgattctcctgcttcagcctccttagaagctgggatgtaatcccagcctgtaggtgcccgccaccacaccgagctaatttttgtatttttagtagacacagggttttgccatgttggccaggctggtatcgaacttctggcctcagctgatccaggcacctcggcctcccaaactgctgggattacagatgtgagccactgtgtctggcccaaactattttaatgtaatgtaatgtaattttcttgagacgtagtctcgctgggttacccaggctggagtgcagtggtacgatttcggctcactgcaacctcctcctctcgggttaaagtgattctcctgcctcagcctcccgtgtagctgggattatataggcgtgtgccaccacgcctggctaatgtttttgtgtttttagtagaaacagggtttcaccatgttggccacgctggccaaattgttcttcttttttttttttttttttttttttgagacggagtctcgctctgtcgcccaggctggagtgcaatggtgcgatctcggctcactgcaagctccgcctcccaggttcacgccattctcctgcctcagcctccggagtagctgggactacaggcgtccgccaccacgcccggctaattttttgtatttttagtagagacgggatttcaccgcgttagtcaggatggtctcgatatcctgacctcgtgatccgcccgcctcggcctcccaaagtgctgggattacaggcgtgagtcaccgcgctcggcctttttttttttttttttttttttttttaattgagacggagtctcgctctgtcgcccaggctggagtgcagtggtgcaatctctgctcactgcaaccccgcctcccgggttccagcgattctcctgcctcagcctcccgggtagctgggattacaggcgcccgccaccacgcccggctaatttttgtatttttagtagagacggagtttcgctatgttggccaggctggtctcgaactcctggcctgaggtgatccacccgcctcgacctcccaaaatgctgggattacaggcgtgagccacctcccccagctccttgctttctatttctactgggcagtgctgctcagtaaccatgccagtcccgtccccgcctctatgcgctgggattccgcagccagaatacttacatccctggggccccaaggggctcactaaaccacgtgccttgtccaggtcgcgtttttttgtttttgtttgtttgtttttttcctcctggtcttgtcctttgtaaagccttagaacagtcgttaaacaacccagcaaatatgcaattcgcgttttcagtaaatttatccaaaccgcattccattccttaccctcctgcttctgcgcagacaagcgcccttgatgacgtttgtcccacgtcgctctccgttcgctcccaggcttctctgcgcgtgcgcctcctcacacgcctgcaggtatggcgttctggtgtcagcgtgacagttatgcccgagaggtacggcgtcacggcgaggcacttgagactgccgggccggcaaggcggtttggggaagagggcgccacgtgtagggagtgccaacatggcattctgtcctggtgtggagagggctagggctagggctggggtcggggcttattctctcattcctctct

SEQ ID NO: 18157 - DNA, 2300 bp, Homo sapien
aaagaccatgttcatagcagtgccaatatctgaagtggagtcttacacatttcatcacctacaacgaaagtaagttaactgggagagattaccaagagagtaaaaagagactcaggacaaatagctaatgtatgcaggacttaaaacctgcatgacgggttgatagatgcagcaaaccaccatggcacacgtatacctatgtaacaaacctgcatgttctgcacatgtatcccagaactttaagttaaaaaataagccaggcgcggtggctcacgcctgtaatcccagcactttgggaggccgaggcgggcagatcacctgaagtcgggagttcgagaccagcctgagcaacaaggagaaaccccatctctactaaaaatacaaaattagctgggcgtggtggtgcatgcctgtaatcccagctacccaggaggctgaggcaggagaattgcttgaacccgggaggcggaggccatggtgagctgagatcacgccactgcactccagcctgggcaacaagagtgaaactccgtctcaaaataaataaataaataaaaataaaaagagagactaatacagttggaaaaaaaagattaggcaggacttgttgagtgattgaatattggctggaaaggaggcaaggacaatcccagctgtaacctgggtacatggagagaagaagcaggccactttccacacacccaccttgatatcctccttggtaagccgcggccaggccaccttttccttccattttctcacaaaacaagtaatagagcgggaagagcgcttatcctgggagtcctgccagatagagagcctcattcttagggtctggggtttagaattaatctccagtttccctgggcagcccggtttccatccaaaccttactgtcccatttcacccttaccttggagttcactttggcatagaactcaatctcattgtacaactccactccatcggcattcttgcagctgaggagacaatgaagctgaggagatgcggaatactccgtgtggggacattaggaaaggggtagattcctgggaagccaggccctcggacggcagggccactacctgaacacaatgcggtgatcctcaataagcacgtggacatcggtgctgtcctcaacacaaaactccatgaacacatacctgggcctgtcgtaccacaaggtccgggcgtgctgcctgaagagaagttgaggtgtggcttcataggggtgggagagggaagactgaggtcatttgggaagggactacccagggacctttgatgccacagttttttcaaagtggagctaaatgagacagaaggggtgaaagggaagggaatgacaggagtgggtgggtgtggtgaatgtgaacctgggaagaatagaacgtgcaagactaggaaactaggaggtcagggagaacattcaggtcacaccttccctcaccccacagttacagagaccaggggtccggggctcccgtggggcctcacagaacctggagcgcccagaagacttggagcagggaatctccagggaaaagggccagggggagcaccggagccggaaacactcaccgtgccattgcggctcccgctccagggtggcatttagagttccaggcaggggccgctatctttagatcctggggacgcccccagcagctgcctctccttatatggtcgggagagcagttgagaggaagagagaacatgacctggcagccaagggatctgcactctggagatactctgggacagcttcatccttgcagcccttcaccgtggggtcttcagaaatgcatagactatgaagagacaacccatctgctggaaccagggcaaaggctgccctagacgctacacacagggaatgacttttccccggtatcattcacctgtttctccgacgcttactgctcagtgtctgattcacaataggcgctcaataaaacattattgtcctgaattaaattcccggggaaggcgcgccctcggggacttgggtacttcaggccccgcccaccactcccctggggttccaggccaccgcgccgttgccatggcagcaggggggcgcggctgacgtgcggtggtgtttccgggaagatggcggctgtcgaagcggctgcagagccggtaacggtggtggcggctgttgggccaaaggcgaaagacgaagaggaggaggaagaggagccgctgccaccgtgcgaggcggtgcgctgggccccagtgggggcggtggcggaggcccggcctggggcaaccgcgtttttagaagaggcgacggccga

SEQ ID NO: 18158 - DNA, 2300 bp, Homo sapien
ggggttggcctactgtttctaaaggtgaaaatgaacaacagagtttcctatcatgtagaacctttggtgctgtccacccctttctagcccttaaatctgacagtttgaggtggctgctccttgtgtaaggagttgcaggtatgtggagaagggtggaacagtaaacacaggattgcactggaaacagttcagactaaaataaacaaatcattatctgcttgataaatcttcttggctaaaaccaatgtaagtgggaagaaagccacatgtagattgtagtttgaagaataaaatggtgaaaagggatggggcatggtggctcacttctctaatcccagcactttggtaggctgaggagggcagatcgcttgagctcaggagttcgagaccagcctgggcaatgtggtgaaaccccgcctcaacaaaaaataaacaaaattaactgggtgtggtggcacacacctgtagtcccagatactggggaagctgaggcaggaggattgcttgagcccaggaggcagaggttgcagtaagcagaaattgcgccaatgcagtctggcctaggtgacagagtgagactctgtctcaaaaaaaaaaagtgaaaaggcagtgtacctcaacacttccaataaagccagcactttgtgcacttccagagatgcaaagcttgtaaggaaacgtttacctggtgtcttatacatagtttcactacttctggggtaggcacactgaatcgatcttgtcagttatcagaggacctcattcagaatgcctaatgattaagcaggatggaggaagagtttaaaaatttcaacattatagcctgcacggtggcacacgcctgtagtcctgaggctgaggcgggaggatggcttgagaccaggagttcgagaccagcctgggcaacataccaagaccctcccgtctcttaaaaaggaaaaattccaacattaggaaatttatctaatcaagagttgtgtttatttcagttactaagagaccctgctgttaatccaaactcccacccaaagaagtgtaaagactgcctagatttcaggaaagcagggacagggagttaacctaaatttccacggattccaactcactttcctttcctttgccaattttcccaatccccagagtcggggtcctctagcagccaaagtgttcaagactgagatacgtgagggaaaggtgagtgggcgcagcactgctcttggctgctctgctgccctctcaacgactcacttcgctcaccgctcctctaccactcacgtcatcacgcaccgacatctctccacatcctccgtgcacaccgctcaccctcaggttcccaggcctctgtcctcttgcccttcagccggccccgcactccagtcccctggtctccgacacacgtactcaccgaccgagtcggggaggcttctccccgcatgcaccatcatccgggtctggatcgccacccacacgaccccactattcccatattcctcgcggcccggctccagccactcacctggtcctcgccccgcaaccatggccggtcccctggcagcccatcgccctcatcgctggcggggtcgccgggcccttcgtaacctaggacgtgagggcagccgcggaaggcgaagtcttcgagctcccgcagaaggcgctgctgctccgccggcgccccgcgcaccacctggcgcaggcggaactgcacctgcgcgaagtgcgaggacagcgccagcagcgccgagtccagccgccgccgctctgcccgcagccgccgcagcgtccggcccggcgaatccggcggggagcccggggccgcgccaggctcctcggccgtcgcctcttctaaaaacgcggttgccccaggccgggcctccgccaccgcccccactggggcccagcgcaccgcctcgcacggtggcagcggctcctcttcctcctcctcttcgtctttcgcctttggcccaacagccgccaccaccgttaccggctctgcagccgcttcgacagccgccatcttcccggaaacaccaccgcacgtcagccgcgcccccctgctgccatggcaacggcgcggtggcctggaaccccaggggagtggtgggcggggcctgaagtacccaagtccccgagggcgcgccttccccgggaatttaattcaggacaataatgttttattgagcgcctattgtgaatcagacactgagcagtaagcgtcggagaaacaggtgaatgataccggggaaaagtcattccctgtgtgtagcgtctagggcagcctttgccctggttccagcagatgg

SEQ ID NO: 18159 - DNA, 2300 bp, Homo sapien
tactgatttgatttggagggtaaggtggcttagtcctagctacttgggaagctgaaatgggaggatcgcttgaggctaggagtttgaagctacatcacacctgtcaatagccactgcattcaagcccggcaacatagcaagacctcatctctttaaaaaatgaaatatataagaaaaagacattttaaaaaccattggaggccaggcgtggtggctcatgcctgtaatcccagcactttgggagttcgaggcaagcggatcacttgaggctgggagttcgagaccagcctggccaacatggcgaaactccatctctacaaaaaatataaaaattagccgggtgtggtggcaggagcctatagtcccagctacttaggaggctgaggcaggagaatcgcttgaacccgggaggtggaggttgcagtgagctgagatcgcgccactgcactccagcctgggtgacaaaatgagactccgtctgaaaaaaaaaaaaattgtaatggggccgggcacggtgctgcgtcgcctgtaatcccaacactttgggaggctcaggtaggaggatcacttaatcccagaagtttttgagaccagcctgggcaatatagtgagtccccatctctaccaaaaaaaagttctttgattttgtttttgtttttttcttcaaattacacgggcatggtggcacatacctgaagtcctagctactcaggaggctgaggtggggggatcacgagcccaggaggttgaggctacagtgagccatgattgtgctacacaccattcagcctgggtgacagagcgagaccctgtctcaaaaaacaaaacaaaagccattgcaatgggatcctgagggatacagggaaaattgtatcactggagagcttcaggagagaactgatgaaatcctggttgttccacatcttgcccaagacaaatcctataggttcagataagcaaaaactgtgagatagtttatctttcccttaaactcggaaagcacataaggtaccatgtgaaaacactcttctggtgagtgatgggaaataattcagtttgagagccaactagacctagattcagacctagatttgaatcccatctatgccactgattaggattaacctcagacaagcaatttatcctctctgaattgcaatttcctcatgtctaaatgggaggagaatgcccaagatgcagagttgtgaggattaaacaggctgccggcttgtataaagtgctcacatcttgcctgggagagaatcgctgctcaggatggtgacatggtaaacagtatgggttcaggagttgaactgcttgaggctgagccccagctccactatttaaccactatagacttcgggcaaatctctctaagccagtttcctcgactctagaatggagataatagtatctatttcttagtgttatgatgaccaaatcagatgatgtgcataaatagattaacctgacctggcacagggtaagcagctgccattcttctcctctacctccctcatgcttattctagttggtaatgtcagtgacaccactagactttaactgttgggggtaaatatcctttttgtttgtttttttaaaaccaaatttagcagtggggggttgtataccaactttagtgaccctaacgttgataagttctgataacccactactatcggaccagccacccttactgatctttgtccctccctctttagctaacagtgcccccgacaggcaccaataaatgccctatttttttccctgtgtctcccaagagaaaaagtaaatttcagattgtgttccccctcctagcgccagagaaaggaactacaacaaagcctagctgctgagtccagagcgcacagcacagtcgccctcccagctcttccgtcggccgggaggagtctcctttgctcttgtctactgctggagctgctaataaagtttcattcgaatacttgagctgccgcgccctgcgtttccctcatgagcttcttccgcccgcaacacgagactcagcaccacacaatcagcgtggcaaagcctgaagggcgggacaggaagtgaggtcactcctcaccggggtgaaaggttagcggaagtgtccttctttcctttttgctggtagggccgggtggttgctgccggtaagtagaagcttgggttgaatctttcaatccgctgccatccgcggcttgggggtcgaaggtccgggcggcgccgggtgcattccttccctaggtctctggcggctacgtatccgatcctgtcctgcgagcagggccctcgggcgg

SEQ ID NO: 18160 - DNA, 2300 bp, Homo sapien
ttacatgaattaactcttcaaaacaatgccatgaagttggttctattttcttcactttacagatgagaaaattgaggcacagagcattagaaacttgcccaaggtcacagggctaggaatcaaagcatggatccaaacctggtaggaacagtatttacacttgggccttgaggtagagtggaaaaaaatttgctgtatttttcctcaaaagttttaaattcagccccatttctgtgaccctgagtaggcaagctacttaatagaagtctgtctcaatagagatgccttaatacttaagtgtgtgaagattcaattaaaaagtttcctggctgggtgcagtggctcacacctgtaatcccagcactttgggacgccaaggtgggtggatcatgagatcagaagttcaagaccatcctggccaacatagtgaaaccccatctcttctaaaaatacaaaaattagctgggtgtggtagcacactcctgtagtcctagctacttgggaggctgaggcaggagaatcgcttgaaccccggggcggggcagaagttgcagtgagccgatagtgccacctcgctccggactgggtgggtgaaagagcaaaactccatcttaaaaaaaagtggctgggcgcggtggctcacgcctgtattccagcactttgggaggctgaggtagaacgatcacaaggtcaggagatccagaccatcctggctaacacggtgaaaccccgtctctactagaaatacaaaaatattagccgggcatggtggcaggcgcctgtagtcccagctactcgggaggctgaggcaggagaatggcgtgaacccgggaggcggagcttgcagtgagccgagatcgtgccactgcactccagcctgggcaacagagcaagcctctgtctcaaaaaaaaaaaaaaaaagtttcctagtaacctagcccaaagttttttccagttactcaccaatcctacttttggccccttcccgccaccccgccccctctggttcccaagtgcaagtgtggtacctagcagacttggcaaactggcctgtttgaatcttagttccctctagcgacagaaccattcagatggagcacctatttcattcatgaaacatgactagttacagtccattgagagataaaatgccagatcctaagaaccaaatgtctctcctgcactacacagtagtggcacaacccaatgccccaaagctcctttgatcactttctttcaagtctctgccagccaggccatttgaggagcactcccttgtcctattaaacagctgctctaggctcagggattcaccaaaggcatctgtcgttaccaccaggagcaggtctccagggtggtccccatctcacctacaccagtaccagtgtcacctgaaaacctgctagaaactcagacctactggatcagtctgagggcaggatttcagcaatccgtggtttaacaaaccatccaggtgacctctatctgtgctaaggtttgagaatttcaggttagtggttctcaatcaaaaatacctgatccccaccactcaggggcctttggttgtcacaaggaggggcagagtgtgtgtggcagaggttctcctggcatgtaatgggtagaagccagggaggctacacaattcttcacagggattatcaggctaaggacagaggcagcataaatctcattaaggcagatttaacattttcccagcccctcatccatcacccagcgtctttttttttttttttttttgagatggagtcttgctgttgtcagactgcagtgcagtggtgctatctcagccctccctgcaacttccgcctcccgggttcaagcaattctcctgcctcaacctcccgagtagctgggactacaggcgtgcaccaccaggcccagataattcttagtattttttaggagagacaaggtttcaccatgttggccatctcttgacctggtgatccgctcgccttggcctcccaaagtactgggattacaggcgtgagccaccgtgcccagcccacccagtgtttcctattcaataatgttctccttttcacagtctggtaatacatacagcatgcagacacaggctttttttctttataatttttaatgatcaaaacaaagcatctaaaaccgcagtttctggaagaaccacttgttcttgcctgtcttgtatctagaagggaaaaaaagaggacaccaatgaggaaaggaatggaaatagtgaaaccatactccaccattcactaccaaagcctacttacctctcttcaaacttgaccttggcc

SEQ ID NO: 18161 - DNA, 2300 bp, Homo sapien
caggtgtgagccactgcacccagccaggaaactttttaattgaatcttcacacacttaagtattaaggcatctctattgagacagacttctattaagtagcttgcctactcagggtcacagaaatggggctgaatttaaaacttttgaggaaaaatacagcaaatttttttccactctacctcaaggcccaagtgtaaatactgttcctaccaggtttggatccatgctttgattcctagccctgtgaccttgggcaagtttctaatgctctgtgcctcaattttctcatctgtaaagtgaagaaaatagaaccaacttcatggcattgttttgaagagttaattcatgtaaggcacaagcgtgttgggcagacgatagctctccttgctggccactgttaacagttttgtgaacttttttcttttttttttttttgagccagagtctcgctctgtcacccagctggagtgcagtggcacgatctcggctcactgcaagctccgcctcccgggttcaagcgattcccccgtctcagcctcccgagtagctgggactacaggcgcatgccaccacgcccggctaatttttgtatttttagtagagacagggtttccccatgttggtcaggctggtctcaaactcctgacctcaagtgattcaccgcctcagcctcccaaagtgctgggattacaggcgtgagccactgcacccagccttttttttttttttttttttttttttaagagacaagattcactgtgttgcccaggctggcctcgaactcctgggctcaagcagtcctcctgcctcaacctgctggaactataggcacatgttaccagtgggcccagctgctgggattggcactttttttttttttttagtcagaatctcactctgttgcccaggctggagtgcagtggtgtgatccggcccggctaattttttgtattttagtagggacagggtttcaccatggtggccaggatggtctcgtgatccacccgcctggacctcccaaagtgctgggattacaaggcatgagccactgcgcctggcagttttgtgaacttgaactgtggactttatctgtcctgattgtgtttctcattcattcagcaattattattttttgagatggagtttcgctcttgtcactcaggctggagtgcaacagcgcgatcttggctcaatgcaacctctgcctcccaggttccagctattctcctgcctcggcctcccaagtagctgggattacaggaatacaccaccacacccggataatttttgtatttttttagtaaagacggggtttcaccacgttggccaggctggtgtctaacttgggatctcaggtgatctgcccacctgggcctcccaaagtgctgggattacaggtgtgagccaccgcacccggcagttttgtgaacttgaactatgggcgttatctgtcctgactgtgtttctcattcattcagcaattattgttttatttattttttgagatggagtttcactcttgtcacccaggctggagtgcaatggcaccatctcagctcaatgcaacctctgcctccgggttccagctattctcctgcctcggcctcccaagtagctgggattacaggaatgcacctccacgcccggctaatttttgtatttttttagtaaaggtggggtttcaccatgttggccaggctggtctctaactcctgacctcaggtgatctgcccgcctgggcctcccagaatgctgggattacaggtgtgagccgccgcacccagctcattcagcaattattttatcaatgttcaatgtgcccagcattattctaggctctagggaaataatccattgacaaagcagggtctaccaatgggcttgtcggagattgctgggaatggttgatgggggccagtttgcagttggggtgaggtggctttccttgaggcagcctggctgagtgaagtcgactttgctgaccaagaaggctcctcccaggggtggggaagcctcggcagggggcggcatgtgagcgccagaaggcagggatttcacggaaatgaaagtggaagcaaacagcctgcgagcagagcctcctgaggtgtatttcgggtcttgctggggctgagagagaccacagccctttggggggtacaaacaagagttcagttgctgtgaattctgccactgtgcccagctctgaagcctcagctcttgccaaacagacccgagacccatgtcagccccactggatgccgtaagtgaggaggagggagttgggaagtggggaaacagg

SEQ ID NO: 18162 - DNA, 2300 bp, Homo sapien
atcacacccagcctaaaaggttacttggtgtacagtggaaagtgtgacagtccagggacaagctagaattgatgggtaaactacctccccactctgggcttcatttcttcactgtaaagcacaggttagtgggtgggctctggagtcagacagcctagggccaaatgactttgggcaagtcatttaacctctctgagctttaatttcctcatctataaaataaggattggccaggcattgtggcttacacctgtaatcctagcactttaggaggccgaggcgggcagatcatctgaggtcaggagtttgagaccaacctggccaacatggtgaaaacctgtttctactaaaaatacaaaaatgagccaggtgtggtggtgggtgcctgtaatcccagctacttgggaggctgaggcaggagaattacttgatcctgggaggtggaggctgcagtgagccaagatcgcgccactgcaccccagcctgggagacagagcaagactctgtctcaaaaataaataaataaataaaaattaaaaaaataaatcaataaaataaggatcacaggatatctatcttagataccctgttgttctaagaattgaatgaaataattcatcagacgggcttagcacagtgcctggcatatagtaagtacttagtaaacgttagttaagaatatgactgtatgacattttgcaactagtctcccctcctcttggaggtgtccctaattgggttaacccctttgggattgtccctcttccaaattccggctgcccttcacagtcagtcatgtgatcatgtactcttgagcactgtttggcaggcctgagggtcgtacccttatcttccactgcctgtgtcagtgccgagcactttctagcaggagcttaatcagtgtttgttgaactctagatctgtggtcacgaacaagtcatggacgctgcaaaggctcctgccctttcaagagcagctgagatgaggccagccaagccctgggtggagggggccaagaccagcccagggcagcacaaaggggttgggttgttcttgagcttagcatcaactctgcttttggagcgtccagaataggccccacttcccctgggcttgttgattctctggaagggcgggtagaagtcttgttgtttccttctgccccaacaggccctccacgcccttcaggaggagcaggccagactcaagatgaggctgtgggacctgcagcagctgagaaaggagctcggggactcccccaaagacaaggtaaggtgggagatctggtgttgtttggtaaaaacgagctggcgaggccgggtgcggtggctcacacctgtaaacccagcactttggtaggccaagggggcctgatcacctcaggtcaggagtttgagaccagcctggccaacacagtgaaatcccatctctactaaaaatacaaaaattaggccgggcgcagtggctcacgcctgtaatcccagcactttgggaggccgaggctggtggatcacctgaggtcagtttgagaccagcctggccaacagggtgaaaccccgtctctactaaaaatacaaaaattagctgggtttggtggcacatgcctgtaatcccagctacttgggaggctgagtccgaattgcttgaacctgggaagtggaggttgcagtgagccaagatcatgccactacactccagctgggtgacagagcaagactccctttaaaacaaagaaacacaaaaaagagctggggagttctcggttttattcctggctctgctacttccttgctgtgtgacctccattatgttacttgaacatctgtaaagtagagctacccacctcccaggacaaattaagatgttgtatgtaaattgccctgtatggaccagacctgcattcatccactcatttatccagcttttctttcagtaaatgtatttatctccggcactcagcatcaatggaatggaatcggagatgccttcctcctaggtgggagtgaggaacactcctactcccctcccctacttccaggtcccattttcagtgcccaagatccccctggtattccgaggacacacccagcaggacccggaagtgcctaagtctttagtttccaatttgcggatccactgccctctgcttgcgggctctgctctgatcacctttgatgaccccaaaggtaagctcatggggagcctcaggagggaggtggggagggttcccagtactgaccctgtttcccaccacccagtggctgagcaggtgctgcaacaaaaggagcacacgatcaaca

SEQ ID NO: 18163 - DNA, 2300 bp, Homo sapien
gtcaggcttgattaagagtctgacaataggccgggcgcggtggctcacgcctgtaataccagcactttgggaggccgaggcgggcggatcaagaggtcaggagatcgagactatcatcctggctaacacggtgaaacccgcacggtgggcgcctgtaatcccagctactcaggaggctgaggcaggagaatggcgtgaacccgggaggcggagcttgcagtgagccgagattgcctcactgcactccagcttgtgcaatagagtttcgaaaaaaaaaaagtgcttttttatatcgaggcaattcgagtcaataatatatgctgcaaataattctgtaaagataactagaagctgggcgcggtggctcacgcctgtaaactcagcactttgggaggccaaggcttgcttgcgtgcaggagtttgaggccatcctgggcaacattagcgagaccctctctctagaaaaaaaaatcaaaacttagctaggtttggccactctaggcacgctgcctatggggtagccctgctctgcaaagagcagtaaaacataaagttagccgggcgtggtgacacatgcctgtggtcccagctattcaggaggctgaggtgggaggattgcttgaagccgggagtttgaggctgtagggagctgtgatcgccccacctcgctcagcctgggtgacagagtgagaccctgtatcaaaaaaataaaaatataaatataactagagcacgcagcatcatcactatgttacagaagggaaaatgaggaacagaacgttaacaccaaagtcagaaagttttaaaggcttggtctccatgcttctactttgccactgcaagaccacagtgaattaagtctcatccctgcctgggttagatgtcagagcctgagacacaatgtagttggactccagtccacaggtggctgactccaaatctgatatgagttaactccaaatctgatgtaagttcaagttttgggactgttccttaactttttttttttttttttgagacggagtctcgctctgtagcccaggctggagtgcagtggcgcgatctcgactcactgcaagctctgcctcctgggttcatgccattctcctgcctcagcctcccaggtagctgggactacaggcgcctgccaccacgcctggctaattttttgtattttttagtagagacggggtttcaccgtgttagccaggtgaatctcctgacctcgtaatctgcccgcctcggcctcccaaagtgctgggattacaggcgtgagacaccgcgcccggcctttttttttttcgagatggagtctccctctgtagcccaggctggagtgcagcggcatgatcttggctaactgcaacctccgcctcctgggttcaagcaattctccagcctccgcctccctagtagctgggactataggcacctgccaccatgcctggctaatttttgtagttttagtagagctggggtttcaccatactggtcaggctggtctcgaattcctgacctcaggtgatccacccacccgcctcggcctcccaaagtgttgggattacaggcgtgagccacgccgcccggccctttttttttttttttttaacagggtctcactctgttgcccagactggagtgtagtggcgcgatctcggctcacctccgcctcccaggctcaagcgattcctctgcctcagcctcccaagtagctgagattacaggcgcgcgccactaccgcccggctaacttttttatttttagtaaagacgggggtttcaccatgttggccaggctggtcttgaactcctgacctcaaatgatccaccagcctcggcctcccaaagtgctgggattacaggcgtgagccaccgcgccaggcctatcccttaaaatagtttttaatttgaataaggtttactatgaataaataaatcacagtcggcttgatcccaagagcacagacgttcctggtgccccttttcgtgctctcccagcttgcgccactatggccctggccctttaaggctgagcgcgaggccccgcctcgcccggcgccccgcccctcccgctggatcccgcagccgcggctcttcccgacgcgttccgccttccccagctgtgcactctccatccagctgtgcgctctcgtcgggagtcccagccatgtccgacgagagagaggtagccgaggcagcgaccggggaagacgcctcttcgccgcctccgaaaaccgaggcagcgagcgacccccagcatcccgcggcctccgaaggggccgccgccgccgccgcctcgcc

SEQ ID NO: 18164 - DNA, 2300 bp, Homo sapien
tgcactccagcctgggctacagagggagactccatctcgaaaaaaaaaaaggccgggcgcggtgtctcacgcctgtaatcccagcactttgggaggccgaggcgggcagattacgaggtcaggagattcacctggctaacacggtgaaaccccgtctctactaaaaaatacaaaaaattagccaggcgtggtggcaggcgcctgtagtcccagctacctgggaggctgaggcaggagaatggcatgaacccaggaggcagagcttgcagtgagtcgagatcgcgccactgcactccagcctgggctacagagcgagactccgtctcaaaaaaaaaaaaaaaaagttaaggaacagtcccaaaacttgaacttacatcagatttggagttaactcatatcagatttggagtcagccacctgtggactggagtccaactacattgtgtctcaggctctgacatctaacccaggcagggatgagacttaattcactgtggtcttgcagtggcaaagtagaagcatggagaccaagcctttaaaactttctgactttggtgttaacgttctgttcctcattttcccttctgtaacatagtgatgatgctgcgtgctctagttatatttatatttttatttttttgatacagggtctcactctgtcacccaggctgagcgaggtggggcgatcacagctccctacagcctcaaactcccggcttcaagcaatcctcccacctcagcctcctgaatagctgggaccacaggcatgtgtcaccacgcccggctaactttatgttttactgctctttgcagagcagggctaccccataggcagcgtgcctagagtggccaaacctagctaagttttgatttttttttctagagagagggtctcgctaatgttgcccaggatggcctcaaactcctgcacgcaagcaagccttggcctcccaaagtgctgagtttacaggcgtgagccaccgcgcccagcttctagttatctttacagaattatttgcagcatatattattgactcgaattgcctcgatataaaaaagcactttttttttttcgaaactctattgcacaagctggagtgcagtgaggcaatctcggctcactgcaagctccgcctcccgggttcacgccattctcctgcctcagcctcctgagtagctgggattacaggcgcccaccgtgcgggtttcaccgtgttagccaggatgatagtctcgatctcctgacctcttgatccgcccgcctcggcctcccaaagtgctggtattacaggcgtgagccaccgcgcccggcctattgtcagactcttaatcaagcctgacttttgggtttagctctggctccagcagagcaactctggcggttggttctttctcttccttatctccttgtccccaagcatccaccagaggacgcagctcccccaaaactttccacccagtgcttggctggaggaactcagtccacgcttctctgctagtctaggccggcggttaagtcaatgtaaccggagacccggctgcccgttgccatggggacggaaagctatgatgtcaccaccgtccgggtgggtgtgctggggttcaccctcccatttccccaagaccccctgccaggacataggcggacgcgggagagaaaaccaaagaggctccctccttccccttagcatctctctcccgccgtgttcaggaagtggatggctgccccagctcttgtccgcactggtacacctgcgtgcacgcgtgggtacacagcaggcccgagcttcgcgcttgtgccgctcatattctacccctaagaacttcgcttgaactctgacctgcccttatatccgagaaagtcaaataagcccagttcggcctgtcccaaaccggcaggggcccctcagaccacaccggcgggctggaccccggctctgaggcctctgttcccagggctccgcccagatcttctgggccccgccccccggctgcgggggtgggaggaggggccgggggggcgcggccgcctggctgggggcggggcggagggggggccgcggacccggggcgggggctcggcgcgggcccgcgagatgccggtgttggcggcccgagcggctgcagttgcaggggcgggggaggcggcggcggggcccgggagaggggtggcgtgggggaccggcgcgtagccgggaccatggaggggcagagcggccgctgcaagatcgtggtggtgggagacgcagagtgcggcaagacggcgctgctgcaggtgttcgccaaggacgcctatcccg

SEQ ID NO: 18165 - DNA, 2300 bp, Homo sapien
aattaaaaaggatagccatcttttgagctcccaggcaccaccatctatttatcataacacttactgttttccccccttatgatcataaattcctagacaacaggcattgtaaaaatagttatagtagttgatatttaggagcacttaactatattccaggcactattgtgcttttcttgtataactcattagatgcttgtcagacctctgagattgttcctattatacttattttacagatgagaaaattaaggcacagagaagttatgaaatttttccaaggtattaaacctagtaagtggctgagccatgattcaaacctaggaagttagatgtcagagcctgtgctttttttttgtttttgtttttgttttcagtagaaacgggggtctcactttgttggccaggctggtcttgaactcctaacctcaaataatccacccatctcggcctcctcaagtgctgggattacaggtgagagccactgtgcctggcgaagcccatgcctttaaccacttctctgtattacatactagcttaactagcattgtacctgccacagtagatgctcagtaaatatttctagttgaatatctgtttttcaacaagtacatttttttaacccttttaattaagaaaacttttattgatttattttttggggggaaattttttaggatctgattcttctgaagataccgttaataaggcaacttattgcaggtgagtcaaagagaacctttgtctatgaagctggtattttcctatttagttaatattaaggattgatgtttctctctttttaaaaatattttaacttttattttaggttcagggatgtatgtgcagtttgttatataggtaaacacacgacttgggatttggtgtatagatttttttcatcatccgggtactaagcataccccacagttttttgtttgctttctttctgaatttctccctcttcccaccttcctccctcaagtaggctggtgtttctccagactagaatcatggtattggaagaaaccttagagatcatctagtttagttctctcattttatagtggaggaaataccctttttgtttgttggatttagttattagcactgtccaaaggaatttaggataacagtagaactctgcacatgcttgcttctagcagattgttctctaagttcctcatatacagtaatattgacacagcagtaattgtgactgatgaaaatgttcaaggacttcattttcaactctttctttcctctgttccttatttccacatatctctcaagctttgtctgtatgttatataataaactacaagcaaccccaactatgttacctaccttccttaggaattattgcttgacccaggtttttttttttttttttttggagacggggtcttgccctgttgccaggatggagtgtagtggcgccatctcggctcactgcaatctccaactccctggttcaagcgattctcctgtctcaatctcacgagtagctgggactacaggtatacaccaccacgcccggttaattgaccattccatttctttctttctctcttttttttttttttttttgagacagagtcttgctctgttgcccaggctggagtacagaggtgtgatctcacctctccgcaacgtctgcctcccaggttgaagccatactcctgcctcagcctctctagtagctgggactacaggcgcgcgccaccacacccggctaatttttgtatttttagtagagatggggtttcaccatgttggccaggctggtcttgaactcatgacctcaagtggtccacccgcctcagcctcccaaagtgctggaattacaggcttgagccaccgtgcccagcaaccatttcatttcaactagaagtttctaaaggagagagcagctttcactaactaaataagattggtcagctttctgtaatcgaaagagctaaaatgtttgatcttggtcatttgacagttctgcatacatgtaactagtgtttcttattaggactctgtcttttccctatagtgtgggagatcaagaattgttacaaatcacccctcaaggaaccagggatgaaatcagtttggattctgcaaaaaagggtaatggcaaagtttgccaacttaacaggcactgaaaagagagtgggtagatacagtactgtaattagattattctgaagaccatttgggacctttacaacccacaaaatctcttggcagagttagagtatcattctctgtcaaatgtcgtggtatggtctgatagatttaaatggtac

SEQ ID NO: 18166 - DNA, 2300 bp, Homo sapien
atgtatgagtttatttctgtactgtcaattccattttattgatgtatgtgtctattcttatgctattaccacactttcttgattactatagctttgtggtgaggtgttgagattttaaactaattataagcatcttacatgaactacttaccgtttatatttgattatgcagcatgaaataattatgaatatatcattaaatatgccatattaacttttattaagttttatgtgatcataacagtaagccatatgcatgtaagttcagttttcatagatcattgcttatgtagtttaggtttttgcttatgcagcatccaaaaacaattaggaaactattgcttgtaattcacctgccattactttttaaatggctcttaagggcagttgtgagattatcttttcatggctatttgccttttgagtattctttctacaaaaggaagtaaattaaattgttctttctttctttataatttatagattttgcatgctgaaacttctcaaccagaagaaagggccttcacagtgtcctttatgtaagaatgatataaccaaaaggtatataatttggtaatgatgctaggttggaagcaaccacagtaggaaaaagtagaaattatttaataacatagcgttcctataaaaccattcatcagaaaaatttataaaagagtttttagcacacagtaaattatttccaaagttattttcctgaaagttttatgggacatctgccttatacaggtattagaaacttactgcctttctctaatgcttctagtgtaaaaacttgcagacttatgtaaagtagggctgtatcgccgtgcccccattgtctgttaatcttgtttttatatttttgattgtgtttccttttctttttttttttttttttaagacagggtcctgctctgtcactgaggctggagtgcagtggcgtgatctcggctcactgtagcctctgtctcccagcctcttcctgccttagcctcccaaatagctgggactacaggcacacgctaccatgcccggccaatttttgtattttttgtagagatgaggttttaccatgttgcccaggctggtaactcctgagctcaggtgatctgcccacctcggcctcccaaagtgctggggttcacaggtgtgtgtttatttctatctaattatttacacaaacacaatgtatttatatattgtgtatctcttctgctacaatgtaaattctatgagagtagtaattttgtctgtctcaacactgtttttcctaagtttggtacatagtaggcactcagatgcttaaaggaatgaatgaattgtgctttaattccactttactaaacccaaatctccctttggacattgttatctatgtgttttcaaagaagtataatcataatttgacagaaatccttgagaggcagaactaagtgagggattgggcagggttcagatgttaagaacagtaagctcagcagggtgtgattgctcatgcctataaccctagcactctaggaggctgaggtgggatgattgcttgaggccaggagtttgaaatcagcctgggcaacatagtgagaccccatcactaccaacaaaataaataaataaatgtacatggtggcatatgcccatagtcctagctacttgggaggctatagtgggaggatagcttgagtacagaagtctgaggctgcagtgagctatgattgtggcactgcatgctagcctgggcaatagagcaagaccctgtctctaaattaaacaaaaaaaaaagtactctagttttctatgcaatgcattatatctgctgtggatttagggcagtattatatcagataattttaggcatttggtaggcttaaatgaatgacaaaaagttactaaatcactgccatcacacggtttatacagatgtcaatgatgtattgattatagaggttttctactgttgctgcatcttatttttatttgtttacatgtcttttcttattttagtgtccttaaaaggttgataatcacttgctgagtgtgtttctcaaacaatttaatttcaggagcctacaagaaagtacgagatttagtcaacttgttgaagagctattgaaaatcatttgtgcttttcagcttgacacaggtttggagtgtaagtgttgaatatcccaagaatgacactcaagtgctgtccatgaaaactcaggaagtttgcacaattactttctatgacgtggtgataagaccttttagtctaggttaattttagttctgtatctgtaatctatttttaaaaaattact

SEQ ID NO: 18167 - DNA, 2300 bp, Homo sapien
attacaggcacatgccactacgcccagctaatttttgtatttttagtggagagggggtttcaccatgttggccaggatggtctcgatctcctgacctcgtgatcctaccaccttggcctcccaaagtgctgggattacaggcataagccaccgccctcggcctcatccatgattttattttgccatttcaagtgatggagcttgttttagagctggaagaaaagccaaaatgccagttaatctaaactagattcctgccccagtgcagaaccaatcaagacagagtccctgtctttcccggaccacaggatttgtgttgaaaaggagaggagtgggagaggcagagtggatggagaacaaggaatcattttctatatttttaaagttcttcagttaagaaaatcagcaattacaatagcctaatcttactagacatgtcttttcttccctagtatgtaaggtcaattctgttcatttgcataggagataatcataggaatcccaaattaatacactcttgtgctgacttaccagatgggacactctaagattttctgcatagcattaatgacattttgtacttcttcaacgcgaagagcagataaatccatttctttctgttccaatgaactttaacacattagaaaaacatatatatatatctttttaaaaggtttataaaatgacaacttcattttatcattttaaaataaagtaaatttaagatttggaaggttttagaataatacaaaccaaagaactaatgacaacgtcctttatttttaaagattctagaagttgctttttgtaattagacaacataaattctgaattttttcacatattgctgccaaccccttgggtcttttcctttctccaagaaagagaaagctacagaggagtgactgaccgggtaggtggtggtagccttagctttctccaatgtttctggttgttttctttttcttgcataaaaccaaaatcaacaacgaccaaaccaacaccaatcaaggcctccccgcccctaacctttcccagtgacctgctctcatctctggatcctcctcaagcacatccctgccggcagcatctgttactactgacgctcctctacttccctcttgcgctttctcaatggcgcaaatggatccagttcttaagttctccctcccacaaaatcctgtctcctccccttcccagacatattcctggcacctcttcttccacaaggtcccatcctctcatacataccagccggtgttttttgttttgttttgttttgttttgttttgagacagtctcgctctgtcgcccaggctggagtgcaatggcgcgatctcggctcactgcaacctccgcctcccgggttctagcgattctcctgcctcagcctcctgagtagctggagcggcaccacgcccggctaatttttgtatttttagtagagacggagtttcaccacgttggtcaggctggtctggaactcctgacctcatgaccagccgacgtttttaaagacatagtgtccccctcaaggcatattccagttcctatcacgaggattcccccacggacactcagtgcccccttcctgatcctcagcgcttccctcgcgacctacaaactgcccccctccccagggttcacaacgccttacgcctctcaggttccgcccctaccccccgtcaaagaatacccatctgtcagcttcggaaatccactctcccacgccagtaccccagagcatcacttgggccccctgtccctttcccgggactctactacctttacccagagcagagggtgaaggcctcctgagcgcaggggcccagttatctgagaaaccccacagcctgtcccccgtccaggaagtctcagcgagctcacgccgcgcagtcgcagttttaatttatctgtaattcccgcgcttttccgttgccacggaaaccaaggggctaccgctaagcagcagcctctcagaatacgaaatcaaggtacaatcagaggatgggagggacagaaagagccaagcgtctctcggggctctggattggccacccagtctgcccccggatgacgtaaaaggaaagagacggaagaggaagaattctacctgagtttgccataaagtgcctgccctctagcctctactcttccagttgcggcttattgcatcacagtaattgctgtacgaaggtcagaatcgctacctattgtccaaagcagtcgtaagaagaggtcccaatcccccactctttccgccctaatggaggtctccagtttcggtaaatataagtaat

SEQ ID NO: 18168 - DNA, 2300 bp, Homo sapien
cgggcgcctgcactcctctcagcccttgggcagtcgatgggaccgggcgctgaggagcagggggcggtgcccgtcggggaggctcaggccacgctggagctcacaggggttgggagggggctcgggcatggcgggctgcaggtcctgagccttgccctgtgcagggcggctggggcccggtgagaattcaagcggggtgcaggcgggccggcagtgctgggggacccggcgcaccctctgcagctgctggcccgggtgctaggcccctgactgcccggggccgggggtgcggggcccgctgagcccgcgcccacctggaactcgcgctggctggcgagcgctgcgcgcagccccagttcccacacccgcctctccctccacacttccccgcaagcagagggagccggctctggcttcggccagcccagagaggggcccccacagcgcagtggcgggctgaagggctcctccagcacggccagaatggacgccaaggccgaggaggcgccgagagcgagcgagggctgctagcacgttgtcacctcgcattctgaaccacagactctccaactctccggcgcttttcgcccactcggtccctcagaacacgaagggctctctcatcctgtcactaaaacgattagctgtccggagacacggaaaaagtcgcccctcttctttgcaggattcctcccttgaacttctccaaaccctcttagtgtgacgtgaccccacccctagctaacccaggctgcttccttaccagcttcccgccccctggggaggcggcaatgcaaagaccgtccgctgccagctctgccgctatctctgtggggtgaatctaacatggcggacaaagacagtaactagtcccgtttctccgcgttttcgccaagaagattggctcttaccacttgtccctcaaaacgaccaccccattgactggtggcgattgcgtcgacggagacggggcaaaagcaagctgaacccgaaaaataacaaacactggggctgaggggtggaactacgagtgcgcagacatgggccagagcgcatttcccctgccccaggcaaattcggcgctcactgcgtccccgcaggccactgaccttacaagactacttgccccagactcctggggctggatgggaattgtagtctccctaaagagttgtacgtatctttttaaggcctagtttctgctttcaaaatacgaaaacataacactccagtccataactgttgacaagtacaagcgcgcacaggtctccaatctatccactggatttccgtgagaattgtgcccgctctggtattggatgttcctctccataagactacagtttctaaggaacactgtggcgaagacctttcattccgcaacgcatgctggaaataattatttccctccacccccccaacaatccttattacttatatttaccgaaactggagacctccattagggcggaaagagtgggggattgggacctcttcttacgactgctttggacaataggtagcgattctgaccttcgtacagcaattactgtgatgcaataagccgcaactggaagagtagaggctagagggcaggcactttatggcaaactcaggtagaattcttcctcttccgtctctttccttttacgtcatccgggggcagactgggtggccaatccagagccccgagagacgcttggctctttctgtccctcccatcctctgattgtaccttgatttcgtattctgagaggctgctgcttagcggtagccccttggtttccgtggcaacggaaaagcgcgggaattacagataaattaaaactgcgactgcgcggcgtgagctcgctgagacttcctggacgggggacaggctgtggggtttctcagataactgggcccctgcgctcaggaggccttcaccctctgctctgggtaaaggtagtagagtcccgggaaagggacagggggcccaagtgatgctctggggtactggcgtgggagagtggatttccgaagctgacagatgggtattctttgacggggggtaggggcggaacctgagaggcgtaaggcgttgtgaaccctggggaggggggcagtttgtaggtcgcgagggaagcgctgaggatcaggaagggggcactgagtgtccgtgggggaatcctcgtgataggaactggaatatgccttgagggggacactatgtctttaaaaacgtcggctggtcatgaggtcaggagttccagaccagcctgaccaacgtggtgaaactccgtctctactaaaaatacaaa

SEQ ID NO: 18169 - DNA, 2300 bp, Homo sapien
cccactacatttgctagacacagagcactgattggtgcgtttacaaacctttagctagacacagagtgctgattggtgcatttgcaaaccttgagctagacacagagcactgattggtgcatttacaatcctttagctagacacagaagttctccaagtgcccaccagattagctagatacagagtgctgattggtgcatccccaaaccccaagctagacacagagtgctgactggtgcatataaaatcctcaggctagacataaaagttttccaagtccccatctgactcaggagcccagctggcttcacctagtggatcctgcgcagggctgtgccgggcgcctgcactcctctcagcccttgggcagtcgatgggaccgggcgctgaggagcagggggcggtgcccgtcggggaggctcaggccacgctggagctcacaggggttgggagggggctcgggcatggcgggctgcaggtcctgagccttgccctgtgcagggcggctggggcccggtgagaattcaagcggggtgcaggcgggccggcagtgctgggggacccggcgcaccctctgcagctgctggcccgggtgctaggcccctgactgcccggggccgggggtgcggggcccgctgagcccgcgcccacctggaactcgcgctggctggcgagcgctgcgcgcagccccagttcccacacccgcctctccctccacacttccccgcaagcagagggagccggctctggcttcggccagcccagagaggggcccccacagcgcagtggcgggctgaagggctcctccagcacggccagaatggacgccaaggccgaggaggcgccgagagcgagcgagggctgctagcacgttgtcacctcgcattctgaaccacagactctccaactctccggcgcttttcgcccactcggtccctcagaacacgaagggctctctcatcctgtcactaaaacgattagctgtccggagacacggaaaaagtcgcccctcttctttgcaggattcctcccttgaacttctccaaaccctcttagtgtgacgtgaccccacccctagctaacccaggctgcttccttaccagcttcccgccccctggggaggcggcaatgcaaagaccgtccgctgccagctctgccgctatctctgtggggtgaatctaacatggcggacaaagacagtaactagtcccgtttctccgcgttttcgccaagaagattggctcttaccacttgtccctcaaaacgaccaccccattgactggtggcgattgcgtcgacggagacggggcaaaagcaagctgaacccgaaaaataacaaacactggggctgaggggtggaactacgagtgcgcagacatgggccagagcgcatttcccctgccccaggcaaattcggcgctcactgcgtccccgcaggccactgaccttacaagactacttgccccagactcctggggctggatgggaattgtagtctccctaaagagttgtacgtatctttttaaggcctagtttctgctttcaaaatacgaaaacataacactccagtccataactgttgacaagtacaagcgcgcacaggtctccaatctatccactggatttccgtgagaattgtgcccgctctggtattggatgttcctctccataagactacagtttctaaggaacactgtggcgaagacctttcattccgcaacgcatgctggaaataattatttccctccacccccccaacaatccttattacttatatttaccgaaactggagacctccattagggcggaaagagtgggggattgggacctcttcttacgactgctttggacaataggtagcgattctgaccttcgtacagcaattactgtgatgcaataagccgcaactggaagagtagaggctagagggcaggcactttatggcaaactcaggtagaattcttcctcttccgtctctttccttttacgtcatccgggggcagactgggtggccaatccagagccccgagagacgcttggctctttctgtccctcccatcctctgattgtaccttgatttcgtattctgagaggctgctgcttagcggtagccccttggtttccgtggcaacggaaaagcgcgggaattacagataaattaaaactgcgactgcgcggcgtgagctcgctgagacttcctggacgggggacaggctgtggggtttctcagataactgggcccctgcgctcaggaggccttcaccctctgctctgggtaaaggtagtagagtcccgggaaa

SEQ ID NO: 18170 - DNA, 2300 bp, Homo sapien
tcaaactattgcatttaatgcttgccttgttataccctgtggggacttgccaagtcaaagacagctctctacttcagaaaagtacttctgtccctcctgactctcctcagactggacattagtaaactaggaccatttaatccagggagatttcgataaagaccccagtgccaaccaggagtcttgtcccctgatgtagagtttttatgccgtagttggtccaacgttctgtggaccactaaagagcaagaatggactgccccaaccagtttttgtaatttcctaaaaccatacattcgttttactagaggatcatagaagttaaagagttaaaacaaactttaccaatgaagacaggataccaagatgcaaatgcctggttaaaatgcatcaaatattccatctgcacgttaaacaaaagcaattgttatgcttgtgcacatggcaggccagaggcccagattgtcccctttccactaaggtggtcctccagtcgaccagatgtgggctgcctggtagctcttttccaggattctacagcctgtattaataagtcatgccaagctctctctgctatatcccaaagtccagcaccctgcgggtcagcccccgagggccatccatcctccatctcccaacactaagttcacttcatgtctctcacaacagggaggaaacttagcgttccttggagacctgaaaggatgcagttagcttaagaattttcaagagcttatcaatcagtcagcccttgttcatccccgagcagatgtgtggtggtattgtggtggacctttactgggcactctgccaaataactggagtggcacttgtactttagtccaattggctatccctttcaccctggcatttcatcaaccagaaggaaaaaaagaaagacattgtaaagcgagagaagccccttatgggtctttcgactctcatgtctatttagatgcaattggagtcccacgaagaataccagatcaatttaaagcttgaaatcaaatagctgcaggatttaagtcaatattttagtgggtgacagttaataaaaatgtagattagataaactacatctattacaaccaacaacaacgaggttttcatgagttaaaagaaaacctcatgttggtcccagccctgaggctacctgacctgacaaaactctttacactctatgtgtcagaaagagaaaaaatggcagttggagttttaacccatactgtgaggccctggccaaggccagtggcctatctctcaaaacaactagacaggatttccaaaggctggcccccaggtctaagggccctagcagcaacagccctgttagcacaagaagcagataaactaacccttaggaaaacctgaatataaaggccccccatgctgtggtaactttaatgactaccaaaggacctcattggttacaaatgctagattaaccaagtaccaaagcttgctatgtgaaaatccccacataaccactgaagtttgcaacaccctaaaccccaccaccttgctcctggtatcagagagcctagttgaacatactgtgtagaggtgttggactcagtttattctagcaggcccaacctccgagactatccttaaacatcagtagactgtgaggggtacgtggacgggagtagcttcgccaacccctgcaaagtgactctgaagaagacgacaagctctgctccagtcacacccagaagctgactggtccacgcacggccgaagcatgagaaaactcattgcggaactcattttccttaaaatttggacttttacagtaaggacttcaactgaccttcctcagactgaggactgttccagtgtatacatcaagtcactgaggtaggacaaaaggttgctacagtcctattattttatggttattataagtgtactggaactctaaaaataacttgtttgtataatgttattctgtacaaggtatgtagcccaggaagtgaccaacctgatgtgtgttatgacccatctgagcctcccatgaccacggtttttaaaataagattaaggactgaggactggtgggggctcataaatgatatgagtaaagtgttagccaaaacagaagaaaaaggggtgcccaaacaagtcaccttaaaatttgatgcctgtgctgtcattaatagtaataagttaggaataaagtgtggttctcttaattagaaaagaggctatatggcagaaaataagtacatctgtcataaattaggactgtgtggaaataaatgtaaatactggtcttgtgtcatttaggccacttggat

SEQ ID NO: 18171 - DNA, 2300 bp, Homo sapien
cagcagagagagagaaaggaaagagacagagaggaaaagaggaaaagagagagaggaagagacaggaagagacagacagagagtcaaggatagagagagagagagagagagagacacacacacacacacacacagagagagaggaagaggcagaggcaaaaggaaagtcaaagagagagacaaagtcaaagagagaaagaaagagagaaagagagagagatacaaagttaagaaaaaaaagccatctataccaattctaatttagacaaaacaaggtcttattaatagcaaaggataattaaaatcccaaacttagaaggttttctttttattattattattattatactttaagttttagggtacatgtgcacaacatgcatttttttaaaattttttttaaaggttttcaactaaagtttgctaaaagttaacagtgtaacatgtatatagtaacttatattcttgtggcctagtccacaagacacaaaaaaggttcgctttggaaaagaatggttatcatcttcgaaaaaaaaaaggaaaaaaagggggggcggaatttatataaaaagagtattatatggtaaattcttgtcctgaaacaaattaactggttgtttaaagaaataaatatttgtaataagtcagaaagttgaggcatatcgaagaattgtctgcgaaagtcacgaaagagaaaaatgttataaaaaaatttatgcaaaaaatgttgtataatttaaaagtaactaggcctcctgaatgtaaaactgttgaaaaaaaaaacagtttatatgcaaggtgtataagaaaagtaaaatatatctttggtaaaagaattgtaaggaggcataaggatgtacattttcacctacattaaaaggttaaaaataattattgttttgaagatttaagcaagtttcaaaatgttaattgtaaagaaaattctgtgtgtaaacatattagctaaagttaaagaagtatcatccagtttttctgtgaactggacattaaagtaaaagcataacaggttttttcttaaagcaccaacctgctcttttgcaaaaattataaagggttaaaaagaatctataaaatcttaccttatggtcaaacattaacaattagatacatatgtctacaaggttttattaaaattaagtttaatattaataacacactaatataaagataaaatttagcttatctggtataaaaatcatacgagaagcactgttaaatgtaaaatggtatttggctttctttggtttaaaaactaataaaaataggtgctaaaggaaatttctcaggaaaaaggcactaaggactataaagtccactgccaaggtccccacatttaaaacaaaaggtcagttccttagaattatatgcttggtttattttccactttcctttctctcaaaaactaaaagtcttttagcacatgtaccacccctagaatttctagtaaaccagcaccagcctgaagatcacattctcatcgaaaggtggaaagaagaaaaactcgagccagcctggaaggaccctaccttgtgttgctaaccaccaagactgctgttcgtacagcaaaaaaggatggactcgtcacaccagaatcaagaaagtgccaccccctccagagtcatgggccacagtcccagaggaaaaccctgccaaactaaagctacgaaaaatctcttttcatctattctattactcttctttctttcctcgtgctattgctgaccatctagttattaacataaccaagtcaatttcacctcaaactattgcatttaatgcttgccttgttataccctgtggggacttgccaagtcaaagacagctctctacttcagaaaagtacttctgtccctcctgactctcctcagactggacattagtaaactaggaccatttaatccagggagatttcgataaagaccccagtgccaaccaggagtcttgtcccctgatgtagagtttttatgccgtagttggtccaacgttctgtggaccactaaagagcaagaatggactgccccaaccagtttttgtaatttcctaaaaccatacattcgttttactagaggatcatagaagttaaagagttaaaacaaactttaccaatgaagacaggataccaagatgcaaatgcctggttaaaatgcatcaaatattccatctgcacgttaaacaaaagcaattgttatgcttgtgcacatggcaggccagaggcccagattgtcccctttccactaaggtggtcctccagtcgaccagatgtgggctgcctggtagct

SEQ ID NO: 18172 - DNA, 2300 bp, Homo sapien
taatcacagcacttagggaggccgaggcgggcggatgacctgaggtcgggagttcaagaccagcctgaccaatacggagaaacctcgtttctactaaaaatacaaaaaaatgagccaggcatggtggtgcatgcgtgtaatcccagctactcgggagctgaggcaggagaatcgcttgaacccacgagtcagaggttgcggtgagcccaaatcacgccattacactccagcctgggcaacaagagcgaagctccgtctcaaaaataaataaaataaaataaggtaaatttaagatttggaaggttttagaataatacaaaatcctttaaaggttctagaagttgctttttgtaattagacaatataaattctgtattttttcacatattgcttccaaccctttgggtcttttcctttctccaagaaagagaaagctacaggggagtgactgaccgggtaagtggtgagctttctccaatgcttctggctgttttctttttcttgcataaaaccaaaatcaacaacgaccaaaccaacaccaatcaaggcctccctgcccctagcctttcccagcgacccactctcatctcaggatccccctcaagcacatccctgccggcagcatctgttactactgacgctcctctacttccctcttgcgctttctcaatagcacaaatggatccagttcttaagttctccctcccacaaaatcctgtctcctccccttcccagacatattcctggcacttcttcttccgcaagggcccatcttctcatatataccagccggtgtttatttctttgtttgtttttgagacggagtgtcgttctgccacccaggctggagtgcaatggcgcgatctcggctcactgcaacctccgcctcctgggttcaagcgattctcctgcctcagctcctgagtagctggcgcgcgccaccacgcccggctaatttttgtatttttagtagagacggggtttcaccacgatggtcaggctggtctcgaactcctgacctcgtgatccatccgccttggcctcccaaagtgctaggaatacaggcgtaagccaccatccccggcgaccagctgatgttcttatacacatggtgtccccttcaaggcacattccagttcctatcaggaggattcctcctcggacacactgtgcccccaacctgatccttagtgcttccctcgagacctacaaactgcccccttccccggggggttcacaacgccttatgcctctcaggttccgcccccgcccctcgcataagaatacccatctgcctagcttcggaaattcactttcccccgcccgtcccccggagcatcccttgggcccctgtccctttcccggggctcttctaccttaacccagagcagagggtgcaggcctcctgagcccaggggcccagttatctgagaaaccccacggcctgtcccccgtccagaacgtctcagcgagctcacgacgcgcagtcacgtttttttccccccctctacactgcagatgtggctcccaatgttgacgttggccaggacctttgcaaacaagccaggccaaaaagtttcaatatttacactggctgctttaataagggcattgatcttatcctccgtaaaggtcacctcatagtcctgcagaatgagggcagagtagatgcaggcaagctgggagacggaggccatagcgcgggcgagtgtggggctggggctgccggacgcggtgctactcaccggatgaagtgagggtctcaccccaacgcggccttagcttcctcggaaggaccgaacaccttggcggcagccgaggaaaggggttccacagttttaatttatctgtaattcccacgctttactgttgccacggaaaccgctgagcaatagcctctcagaataggaaatcaagacacagtcagaggaagggcgggacagaaagagcctagcatctctcggggctctgggttggccacccagtcctcccctggtgacataaaaagaaagagacggaaaaggaagaattctacctgagttcgccgtaaagcgcccgccctctcgcctctacgcttccagttgcggcttattacgtcacagtaattgctgtaccaaggtcagaatcgccacctgaggcctgaatatcagcgtaagatagtgtccaaagcagtcttaagaagaggtcccattaccccactctttccgccctaatggaggtctccagtttaggtaaataaaaggattgttgggaggtggagggaaagaactactatttccaacatgcattgcggaacgaaa

SEQ ID NO: 18173 - DNA, 2300 bp, Homo sapien
tggcacttcttcttccgcaagggcccatcttctcatatataccagccggtgtttatttctttgtttgtttttgagacggagtgtcgttctgccacccaggctggagtgcaatggcgcgatctcggctcactgcaacctccgcctcctgggttcaagcgattctcctgcctcagctcctgagtagctggcgcgcgccaccacgcccggctaatttttgtatttttagtagagacggggtttcaccacgatggtcaggctggtctcgaactcctgacctcgtgatccatccgccttggcctcccaaagtgctaggaatacaggcgtaagccaccatccccggcgaccagctgatgttcttatacacatggtgtccccttcaaggcacattccagttcctatcaggaggattcctcctcggacacactgtgcccccaacctgatccttagtgcttccctcgagacctacaaactgcccccttccccggggggttcacaacgccttatgcctctcaggttccgcccccgcccctcgcataagaatacccatctgcctagcttcggaaattcactttcccccgcccgtcccccggagcatcccttgggcccctgtccctttcccggggctcttctaccttaacccagagcagagggtgcaggcctcctgagcccaggggcccagttatctgagaaaccccacggcctgtcccccgtccagaacgtctcagcgagctcacgacgcgcagtcacgtttttttccccccctctacactgcagatgtggctcccaatgttgacgttggccaggacctttgcaaacaagccaggccaaaaagtttcaatatttacactggctgctttaataagggcattgatcttatcctccgtaaaggtcacctcatagtcctgcagaatgagggcagagtagatgcaggcaagctgggagacggaggccatagcgcgggcgagtgtggggctggggctgccggacgcggtgctactcaccggatgaagtgagggtctcaccccaacgcggccttagcttcctcggaaggaccgaacaccttggcggcagccgaggaaaggggttccacagttttaatttatctgtaattcccacgctttactgttgccacggaaaccgctgagcaatagcctctcagaataggaaatcaagacacagtcagaggaagggcgggacagaaagagcctagcatctctcggggctctgggttggccacccagtcctcccctggtgacataaaaagaaagagacggaaaaggaagaattctacctgagttcgccgtaaagcgcccgccctctcgcctctacgcttccagttgcggcttattacgtcacagtaattgctgtaccaaggtcagaatcgccacctgaggcctgaatatcagcgtaagatagtgtccaaagcagtcttaagaagaggtcccattaccccactctttccgccctaatggaggtctccagtttaggtaaataaaaggattgttgggaggtggagggaaagaactactatttccaacatgcattgcggaacgaaaggccttggccacactgttccttggaaactgtagtcttatggagaggaacatccaataccaaagcgggcacaattctcacggaaatccagtggatagattggagacctccgcgggcttatacatgtcaacagtaatggattggagtgttgttatgttctcctatcttgagagcagagactaggccaaaaaaagatacctacaactcctaggaagactacgattcccatccagccccacgagtctcgggcaagtagtcctctaaggtcagtggcctgcggggacgcagtgggcgccgaatttgcctggggaaggggaaatccgctctggcccacatctgcgcactcctagttccgcccctcagcctcaatgtttgttattgttgttcgggttcaggttgcttctgccccgccccatcgacgcaatctccaccaatcaatggcgtggtcgttttgagggacaagtggtgagagccaatcatcttggcgaacactcggagaaacaggggactagttactgtctttatccgccatgttagattcaccccacagggatagcggcagagccggtagcggacggtccttgcattggcctccggcaggcgccccccgggggcgggaagctggtaaggaagcagctgcggttacctaggggtggggtcacgtcacgctaagagggtttggggaagttcaagggaggaatcctgcaaagaagaggggcgactttttccgtgtttcgggacagcta

SEQ ID NO: 18174 - DNA, 2300 bp, Homo sapien
cctgactttttaatgattgccattctaactggtgtgagatggtatctcattgcggttttgatttgcatttctcttttttttttttttttttttttgagatggagtctcactctgtcgcccaggctggagtgcagtggtgcaatccgggctcactgcaagctctgtctcccgggttcacgccattctcctgcctcagcctctcgagtagctgggattacaggcgcccactaccacgcctagctatttttttgtatttttagtagagatggggtttcaacatgttagccagaatggtcttgatctcctgacctcgtggtccacccgcctcagcctcccaaagtgctgggattacaggcgtgagccactgcgcccggcctgatttgcatttctctaatgaccagtgatgatgagctttttttcataggtttgttggccgaataaatgtcttcttttgagaattgtctgttcatatcctttacccactttttgatggggttgtttttttcttgtaaatttgtttaagttccttatagattctggatattagccctttgtcagatggatggattgcaaaagttttctctcattgtgtaggttgcccgttcactctgatgatagtttcttttgctgtgcagaagctctttagtttaattagatcccattgtcaattttggcttttgttgccactgcttttggtgttttagtcatgaagtctttgcccctgcctatgtcctaaatggtattgcctaggttttcttctagggtttttatggttttagatcttatgtttaagtctttaatccaccttgagttaatttttgtataaggtgtaaggaaggggtccagtttcagttttctacatatggctagccagttttcccagcaccgtttattaaatagggaatcctttccccattgcctgtttcagtctatccaatttctagatttatttctcattgtctttgttgtaagatttgcacatttatcagagatttgggaattagtgtgctcctctctctgacttttgaaactggtaatagtttacttctgtagaaggggagcaggctagagactttgttttcctttagtacgccttcatactgtgactttttaaaaaattatatacttgtatgatttcacaaaagaaacctcaaaataatacactccaggaaaagtattttaaatagaaaaagtaacctctaacatctcggcttgtgttttctcccagtcgtttccacttgttccatgtgacacagaccagcctcaagacaagcccccagactggttcacaagctacctggagacggtgagtgttctgtctcgcttgggttttaactgcggtgttggcacaggtggaatgtggaagaaatagaaaactgaacccaggtggctgctgcctctagtaccggtgaagagtggtagcttataatttccaaacttagaacagttccagtcgagaaagctctaacctttgcagtgaagtgtcagaaaaagagggagtctaattctaagcatgtaagggagagggacaactctctgcttgagaaaaagttagaaatttacttatcaaaaggatgttttgatattttcttcgaaccagtttagctgtggaaggaatagaccttttgctatgtttctgtctattcagtagcagttgtttattgtgtttttgtattataccagagacagttaggtttcagatctattgatatcttcacatttttttctgatattggaactgagttttttccctaccttctgctccatattctagttcagagaacaagtggttaacgaaacggttgagaagcttgaacagaaattacatgaaaagcttgtcctccagaacccatccttgggttcttgtccctcagaagtctcaatgcctacttcagaagaaacattgtttttgccagaaaaccagttcagctggcatattgcttgcaacaactgccaaagaaggattgttggtgtccgctaccagtgtaggtaagcagttgcttgggagtagctagctagtgatagaccttacagcttttacctccctggctttctgtgtaggtaaagggaaattaattgtaccctgtttctgagcattagatgttgtagctgtgagttggaagcacaagctactcttcacccacatgctttgtatgttgtaactattcagattgttgtgttcaaatgtgcatttggattagcaaagccaggcaaaattatgttcccctgaacggacaaaattagatcactaagggtagttcctcggttgttccaaatgcctttttttttttttttttggt

SEQ ID NO: 18175 - DNA, 2300 bp, Homo sapien
gctgaggcaggagaatcactttaacccgggaggcgaaggctgtggttagccgagatggcgccattgcactccagcctggcaacaagagtgaaactccgtctcaaaaaaaaaaaaaggaataaatacctttataacagaaacttctaggtatcagatagatagaaccaatagcatatattttaagaagtatccaaaaattcaaatatactatgtcaaaataatattggagaatctctttattataatcaaatttgacctatatctttaaatattatttatcttacttttgtttaaagtatacatgtaaggccaggcgcagtggctcacgcctgtaatcccagcactttgtgaggccgaggcggacagatcacaagctcaggagtttgagaccagcctgaccaacatggagaaaccccatttctactaaaaatacaaaaattagctgggcgtggtagcgtgtgcctgtgatccagctactcaagacgctgaggcaggagaactgcttgaacccgggaagccaaggttgcagtgagctgagatcgcaccactgcactccagcctgggtgacagagcgagactccgtctaaaaaaaaaaaataataaagtgtacatgtggccaggtgcggtggctcatacctgtaatcccagcacgttgggaggccgaggtgggcggatcatgaggtcaggagatgaagactatcctggctaacacggtgaaaccccatctctactaaaaatacaaaaaataagctgggtgtggtggcgggcgcacctgtaatcccagctactcgggaggctgaggcaggagaatggcgtgaacctgggaggtgcagcttgcagtgagctgagatcatgctactgcacttcagcctgggcaacagagtgagactccatctcaaatcaatcagtcatgtatatctttatatttttttccacatgtgtgtacaaatacataacaaaaaggtctggaaagacagtaccaaaatgttcacagctgttattctgataggatttatgggtaattttttttttttttttgagataaggtctcactcgcccaggctaaagtgcgagtagcaagtttatggctcattgcagccacaacatcctggggtccccctacctctgtttcccaagcaactgggaccacagccacatgctaccacaatgagctaaatttttttttttttgtagagatgggatttcgccacgttgcccaggctggtcccaaacttctgagctcaagcagtctgcctgccttggcctcccaacgtgctgggattttaggcgtaagccaccacacctggcctgggtagctttttttttttttgggacacagtctctgtcacccaggctggagtgcagcagcgcggtctcggctgactgcaacctccgccttcccaggttcacaccattctcctgcctcagcctcccgagtagctggcactacaggcgcccgccaccatgcccgggtaatttttttgtatttttagtagagatggggtttcaccgtgttagccaggatggccttgatatcctgacctcatgatctgcccacgttggcctcccaaagtgctgggattacaagcgtgagccaccgtgcctggccctgggtagcttttttctatccttttttaccctctcaaacatgattggccagttttctcccatgactgcatcatctttgtaaagaagaggaggagatagacatataatcctgcaatactcatctcctaactttttctctttttatagcactgttagtgtatcagttttggtttaaactctactcagtatattaaccatcacataaaaaggaaaaaagggatggagctgcctccttttatgattcatagagcttcttggaaacctgagtgtttctgcctaccttgtttctgtgagctttgattctattttgttttgcatagtcttcaaacttagaatatggtcatagttccagaaccagcccttccctttagttcttccctctcctctggctttcataattctagcttatgatccacaaggctttaccaagtaaggatagtacttaggcctgcttttagcttccaccttaaaattggttgctttcatcctttagtgacatttgccttgcctgaaggaccacttggaaatgagaaggaggagattatccatatcgctgaggaagaagctgtcatggaggaggaggaggatgaggaggatgaggaggaggaggatgagctcaaagatgaagttcaaagtcagtcctctgcttcctcagaggattacatcatcatcctgcctgagtgctttgatac

SEQ ID NO: 18176 - DNA, 2300 bp, Homo sapien
ttacctagtactttgaataaatctggaaagactagtatgcttgcaagatgatacaaatgtataaaataaacatttaaattatacagaatttttttttttttttttgctttgcttgtctctacacagccaataatttctgaagatcagacagcagccctgatggcccatctctttgaaatgggattctgtgacaggcagctgaacctacggctgctgaagaaacacaattacaatatcctgcaggttgtgacagaacttcttcagttaaacaacaacgactggtacagccaacgctattgaggagtgaccttgtattaaataactgcctgctgctcagagatgatctttattctgtcattggggtatgggatagaagcccttgcttatttttaatctgatgaatctgtatagagcccatcgttgagttaccaagacaatacctgctacagtattttggggagcaaactaaagaccagaacttaaattttcactttagacattggatgaatagtatgaagacagtttttcagttgatttggataaaactattttagtgcattgacaagtgtaacttcaacttcatatagaaccatttttctttctgcttttattgaaactgagtatttttctttggctaatgtggattttttatggggatatctgttaattttcaggttttgaaagacattaacctcggaagttgtttttaagaattattctcataattcttattctcataatttctgtaatccacctcaagcttcatagttatttggcattgaaataacacccagagcatgatagaaatgttgttactcttcctctctcaaggagaaagtaattttcctgcaatacttaataattggcaccgttgctttctaaagactccatggtgcattcaagagtatccaacttcaagggaatctccgcatttcaatgaaaggaggaagagtgtgctgataaacctaccagcacctattgagcaatgtctattatagtaattttgcatacatttttatttaagggaaaaaatataggtattgtgaaatattttgctaatcttatagaaaaggaaaaaatcccgttatttaaagggaaaagtaaatttaacagttgccttttttcttaatgtcagggcagatcttattttacagtacagtgggggaaatagaaacatgtgaaaggcaaaaggcaggctcctaaattaatgtcagtgaagttcagggtgggcaaatgagtgtgtgtgaggtataggaaatgctgatgacttctttaatgcttgaagtccgttcacaggtatctagccctagaatgcctagaacaggaagaggcagctggtgttctgcaaaacttggacaggggcaaagttgctgaaaaagttttggtttaacccgaagataagtggaaaagagcttgtccatgaacccaggttctcactctgtttacagaagtgtgttgagtacagttggtgaaggaagaggtaacaaaaaatgctaaatattttatccatgaaaatgacttccagaaaaggaagaatatgaaccccagaccgaaggggaaaagatagttaatagtattatctaacctggttggtatttgtaatgaatggtgattttaattagtcattagccataatgatgtttatttacagtataactcctgaatgctacttaaataaaccaggattcaaactgcaagccagccaggccgttcattatttaaaacgttttaatcggggcttccgggtagaaggtggagcggcagggtgtaattgggttgatgggtgggacctgtcttgaccatcggagttttataatcgagggccaggagggcccgggttgctctcctggttatgtatgtacttgtacataaccacctaaagaatggtgaaataaatgttcttggaaattcctacccggactggctagtccttgcggaagcagcgtccgggccctcgggtaacgtttgaagagctggcagcgtctcaggctgctgcgtggcgaaggggcggaccgggggacgggggggtgggcccttaggggctggggcgggacttccctgggcactgagtcaaagcttgaggggagtgttcgctcccgcattttcgattccactctcttccgtttctgtcgctgcagtcgtccgcgggtaaggccctccctagaccctttatacctactttacctttcggaggtcaagacacctcctgttgccgcctcctcgcccaacacacaggcgccccccgcacgggtaccaagcttgactaacggcctctaggggtgtgtggtgggacttgaaat

SEQ ID NO: 18177 - DNA, 2300 bp, Homo sapien
gctcccaaagagctgggattacaggcgtgagccactgcacccagcctaataatatattttacttaaccccatgcatccaaaacatcaatatgaacatatcagtgaagtattttatattctttgttttcatactaagtcttcaaaacctagcttgaatttgaaacaacagcacatcttaatttggacactaaattttcatcaaaaatatttcattgatttagatttcataaatttacagttgaaaaagtagatgtacatatccaaattgtcccaaacatgcttaaaatttttccagtatgtatgttgttttaaaatatttatatttttgttgttgttgttgttgttttttaagatggatttttgctcttgtcacccaggctggagtgcaacggcgcgatcttggctcactgcaacctccacctcccaggttcaggcgattcccctacctcagcctcccgagtagctgggattacaggtgcgcgccaccacgcccggctgatttttgtatttttagtagagatggggtttcaccatgttggtcaggctggtctcgaactcctgaccacaggtgatccacctgccttggcctcccaaagtgctgggattacaggtgtgagccactgtgcccggctgggagcaagactggagcaagactccatctcaaaaaaaaaataaaataaataagtgaattaattaattaaaggccaggcatggtggttcacacttgtcaacattttgggaggctgaggtgggaggattgcttgagtccaggagttccagaccagccagggcaacatagtgagaccctgtctgtattacaataataaaatcaaataaagtttttaattttttttttgagacagagtctcactctgtcactcaggtcagagtgcagtggcactatcttggctcactgcaacctccacctcactgattcaagtgattctcatgcctcagtctccccaggtagctggaattccaggcaagcgccaccatgcctagctactttttgtacttttagtagagaccaggtttcgccatgttggccaggctggtcttgaactcctgacctcaactgatccacccaccttggcctcccaaagtgctggattacaggtgtgagccaccatgcccggccaaaataacatttttaaaaactaaattaaatttatataacactgaccgggcatcatggctcatgcctgcaatcccagcactttgggaggctgaggtgggtggatcacctgaggtcgggagttcgagaccagcctcaccaacatggagaaaccgtgtctctactaaaaatacaaaattatctgggcgcggtggcacatgcctgtaataccagctactcgggaggctgaggcaggagaatcacttgaacccgggaggcagaggttgtggtgagccaagattgcaccattgcactccagcctgggcaacaagagcaaaactccatctcaaaaaaaaaaaaaaaaaaaaatttggttcctcagtcacactccaaggctcaatatagcatacaggctgggggttaccctattggacagaacatctttaaacctcccaggcctagtacccttgccttcccctagactattacaagagggaaattgagtcagctgatagtggtccccccaacacagacacagtctatctgagagaacgccaaatgaccttgctttcctcctacccccagcaaacagcattcaccaaatagtaggcagcttcctagggatctctctccattctccattcccttcctgctccagagaggaccctgaagaacccagcctatcccatgcacctgttctttctgctgcagctcctgctgctgctgggccatcagccatctccttcggtccaaagccatctgccggcgccgggcctcccagtggtaggcactacccatgatagtgggatggtatgaggccccaggtcggggtggggacaggcagagcccactgctcccaccacctctgtctcttcccactcagacccctctgcctataactggaaccacctcacaatgtggttactgccagggcaactgggcaggccccgcctgctttgttgagggaggaaggcatttttcccaaggctcccagggaacatctgcaaagtacctttctctcctgggtcctgatcagatagaagaccttcccaccttagctttgagtctcaatgggccccatggacaattcagcagtaaagtcttttctctctggcttctttcccccattcttcctcagagggttccagcatcatcatctgacccttcctctgctcatctctcccca

SEQ ID NO: 18178 - DNA, 2300 bp, Homo sapien
ctcactgcaacatctgcttcccaggttcaagcgattctcctgcctcagcctcctgagtagctgggattacaggcgctggccaccatgccaagctcattttttaattattagtagagatggggtttcaccatgttggacaggctggtcccgaactcctgacctcaagtgatctgcccgccttggcctcccaaagtgctgggattacaggcgtaggctaccgtgcccggccttgcagctgatatttcacaggacttatctgcttgtgcttctgtgtgtgtgtgtgtgtgtgtgtgtgtgtgtgtgtgtgtgtgtgtttgagatggagttttgctctttcgcccaggctggagtgcagtggcgccatctcggccgaccacaacctctgcctcccacattcaagcgattctcctgcctcagcctcttgagtagctgggattacaggcgcccgccagcacgcccagctaatttttttgtatttttagtagagacggggggtttcagtagagacggggtttttcagtagagacggggggtttttagtagagacggggggtttagtagagacggggtttcactatgttggcctggctggtcttgatctcttgaccttaggtgatccacctgccttggcctcccaaagtgctggaattacaggcgtgagccaccatgcccggccctgcttgtgcttctaaccacactttgcttcttccaaaacagaagattctgggtcttgaataacaacaaacttgctttattttttgtagagatgggggttgggaaatggtggggtgggcatgccagttgatatgtcgtgtctatgttgcccaggctagtctggaactcctgggctccaacaatcttcccaccttcacctccaaaagtgctgggattacacgcatgagccaatgtcccagcctacaggctttatttgtttgtttgtttgtttgtttgacagagtcttgctctgtcacccaggttggagtacagtggtgcaatcttggctcacagcaacctccacctcctgggttcaagcgattctcctgcctcagcctcccaagtagctgggattacaggcggccgccaccatgcccggctaatttttttttttttttttttctgagatggagtcttgctctgtcacctaggctggagtgcagtggcgctatctcggctcactgcaacctccgcctcccaggttcaagcaattcttctgcttcagcctcctgagtagctgggactacaggcatgtgccaccacactcggctaattttttgtatttttagcagaaacggggtttcaccatgttagccaggatggtcttgatctcctgacctcatgatctgcccaccttggcctcccagtgtgctgggattaccacctcgcccagccactttgggtgatcttaaatgcacagtcccaggccaggcgtggtggctcgcgcctgtaatcccagcactttgggaggccgaggcgggcggatcacttgcaggacttgcttgaaccagggtggcggaggttgcggtgagccaagatcatgccattgcactccagcctgggcaacaagagtgaaactccgtctcaaaaaacaaaaaatacaataaaaataaaatttaaaaattaaaaaattaaatgcacagtctctatccccaaaagccttcctgggcttcagagaataatcctctcacctgttcactccacctactgaggacacagtccttggaagggtcaggtaggataataataccaacctgtagctaaacaattttatactttatcttttatttcccatccattattctatttgatccttataccagctatgtgaaagaaggtaacaagttatcacttattcttcaggcaaggaaactgaggtccagacagattagggagggtctccaggattataggaagaggtggggtgaggccccaggtgggggtggggacagacagagcccactgctcccaccacctctgtctcttcccactcagacccctctgcctataactggaaccacctcacaatgtggttactgccagggcaactgggcaggccccgcctgctttgttgagggagggaggcatttttcccaaggctcccagggaacatctgcaaagtacctttctctcctgggtcctgatcagatagaagaccttcccaccttagctttgagtctcagtgggccccatggacaattcagcagtaaagtcttttctctctggcttctttcccccactcttcctcagaggctttttagtacagatggggtttctccatgttggtcaggctggtctccaactcc

SEQ ID NO: 18179 - DNA, 2300 bp, Homo sapien
ctccactcatagaatgggagcctcttgtcatctccactcagattgtcgggacctattaatacacttggctctaagaggaggagggccgtggacgaacgctaatgccggcagcgccttggtcgtttaggctcaggttaagtgcggaacttgctctatcagttactgttatttcgcgttacatcagcaaaggagatcttcaaacgctgtctgctgacaaggtggaatgggagcttctttcgttacctccacgcgtttgcatcggatcttcggggcctgttagcacacttgtgtataagtcagcagcgcgtactttggagagtgtggctgctttaggtttcacttggtttagtcacatgcggtgtgacggtcattggattaaatgttactgcacccacatcagtatccgtattctgactggtctctgctattacttggcacactcagatgcgatattcggatcgttatatttaagtttagcgcccctactttactatcccaagcgggactgttttttcatttacgtgtctccatccgaggcagtataaacatctttccattcaagtttcccgcatgtgtttcactatccagagtcggactgcttttggatttacgtggctttgtgggatgcggtatgaagatcgttgctttcaagtttgctttgaagatagtaatgtggggctgggtgcggtacctcatgtaatcccagcactttgggaggccgaggcgggtggatcacctgaggtcaggatttggagaccagcctggccaacatggtgaaaccgtgtctcttctaaaaaaaaaaaataaataaaatacaataatacaaaaattagccgggcatggtggcgcgctcctgtaatcccagctacttgggaggctgaagcaggagaaccacttgaacctggcaagcggactttgtggtgagccgagatcgctccattgcactccagcctgggcaacaagagccaaactcttttcgtgtttatatcctctttctttaactcttacaggggcccctttcccaaggctccgcccagccctgcaaccagtcagagcatgtgctcccctgagggctgcaccctggcctcctcgaaaacttgcccttgccggaccagacagttgagaaatggctagagggacgagacctgagtacctgtctccatgtgtgcagctatacaaaatatgtaattgccgggcgcggtggctcaagcctgtaatcccagcactttgggaggcccaggcgggggatcatgaggtcaggagatcgagaccatcctgactaacacggtgaaaccccgtctctactaaaaaatacaaaaaattagctgggcgtagtgggggcgcctgtagtcccagctcctcgggaggctgaggcaggagaatggcgtgaacccgggaggcggagcttgcagtgagccgagatcgcgccaccgcactccagcctgggcggcagagcgagactccctctcaaaaaaaagaaaaaaaaaatgtaattagacgtctgtaacacatgtaataaagcaagtacagcaagatgactttaggtgatgggcatacgggtgttcaccaaacaattctttcaacgtatgtgtgaaaaaaagtttaaagtaatgttggatgccagctaggtcaggacgagatggggagggggagggggaagggagggggaggggatgcggaggggaagggaggcggagggagaggggaggggaaggggagggggaggaggaggaaagaagagcctcctagagctcttcgtgtcttttccgttgtgggtttttcctcctgaagggcaatgaagccgaaggagctttcccaagattccagtgatttacaggcgcttttctgttcagtggttggcaggcagggcacggcggggcatgcaaatttaaaatggctgcttctctcgggagttatgggagcaaaaaaggaaagtgaatatcctccaaaatagtaacaatattacttacgcaggtgttcagatttggataaagatacacaatctcaacgtaggagagagagttattcagggtgctatctgtcaccctgaggttaggatgtgtgggagaaggagtacagtggccgatcgttaacattttcgttttgaaaacggtgttgatacagtggaaggcttgtggtgttgctggcccttgatcgctggaaggattccgaggtgtagttttcgaagcgggagttttgttcgcattgggcgcttagcgtctgttactgtcgctaacgggagattgtcaacgtgtttgcattgggccatttgcatcagttgggaccgttgttactgacct

SEQ ID NO: 18180 - DNA, 2300 bp, Homo sapien
tctgactcctgacgtcgtaatctgccctcctcggccttccaaagtgctgggattacaggcgtgagccaccgcgcctggccttggcccttatatacttttatagttccatttttttcactttgaaatctttggcccacttggcatttatcttggtgtatggtgagtgaaccgtgattgtaacactgcactccagcctggacaacagagggaaaccttgtctcaaaatatagatagatatggccaggcgcggtggatcatgcctgtaatcccagcactttgggaggccgaggcacgcggatcacgaggttaggagatggagaccatcctggctaacacggtgaaaccccgtctctactaaaaatacaaaaaatcagtccggtgtggtggcacgcacctgtagtcccagctacttgggaggctgacgcaggagagtcgcttaaacacgggaggcggaggttgcagtgagctgagatagcgccactgcactccagcccgggcgacagtgcgagactccgtctcagaaaaaagaacagatagatagatagatagatagatagatagacagacagacagacaggccaggcgcagtggctcacgcctataatctcagcactttgggaggccgaggtgggtggctgccatattgcacttcacagggtaatagaatggagatgacaatgactcggtggagactggggtaaagtgaaatgagggaaacacttgctgagaggttaaaaaaaaaaataagggggcaccaaaagactcagcaatccagataaatggcttgattatcttataatcgagataagatatattgcattgaactattatttattttgattactgaagggttctggaggatcaccccctgaaattcgaacctagaggaatgacctcaccctaatcctggccgtggctaataataacgcccatctcttagggctgtcgagtgaactaaaagagataatgcacgtagagccctcggacccgaggctggcattgggaaaggcacagtttatattttttgacctggttgttcaccaggcaatccctgccatccggctttccatcctgcagggggagcatgactgactgagtgtcactatcggatctatgataccttcttgcttttctgaaatcaaataaaagagccataaactctcatctcaactgttgtgttaggaaggaggacgggaatggtaaatgctgacgctacaggcggcagtctgtgcctcagagagaaaatttatcccaaccttgctgggggccttgacgcccatcttcctccagagcaccccgacagtcaccccgccctctggtgtcctcccaccccgagcccgatcttcccccttcacgcctgccccgggccaatagcctcctaactgcgtcctctctgattgcgtgtgtcgtgctcattacgccctatccgtcgtttcttcgctccacaaacgtttactgagcgccttcaacttgccaggcactaattagactagcgcagagaaacggggataagtactgatgagggtcccagccctcagcgatcggatttcagagggggagataaaggactgcccagaagggtggtgagtggagtagttgatataaacaacgaggtgcgatgaaatacacaggagggctgctaatcacatatggggtgggtgccgagggcccttaattaagggaggcttcctggacgggtgacacccaagcggagtcctgacgacccgcgtcagaagtagtcaggcgaggaggagggtaaaggaatccacgtcccaagcagagaagcagctttccctacacagcacaggacacggtccgcgcacagaagccgcaggagacgcaggcacaggggctggggagaatccttgctgggccctcgccgtccatgcgccgcctccctctgcccggtgtctggtgtcagcctcctgcctggcagaggaactccagcccctgctccccgaagctcctccaggccttctgcttccctgactcggaatgggcccgctgtccagtgggtacaaggctggtctccccgcccactggtgacgacgtaaagatccagctcagcctggtttcccctggtgatgatatcttgcgactcgtctttctccaggaaaacagggaccgctctccgcctacaggtctcttccacagacctatcttgttttcaccccctgtctcttttggttcagtcttttcgctcatacaaacaaggaagtcgcccctagcccagccgcggctccttagctggaggcgggcccgggggtggagtcaaccgcggtggccacgcctcctgggaa

SEQ ID NO: 18181 - DNA, 2300 bp, Homo sapien
agtagagatggggtttctccacgttggtcaggctggtctcgaactcccgacctcaggtgctccgcccacctcagcctcccaaagtgctgggattacaggcatgagccaccatgcccggcctattattagtattttgtagagacagggtatccctgtgttgttcaggctggtcttgaattgctgggctcaagtgatcttcccaccttgccctcccaaagtgttgggattacaggcatgagccaccacccctggtgtcctctatacttttttttttggtctttttttttacaatttttatttttatttttaaaaattatttgtagagacgaggtcttgctatattgcccaggctggtctcaaactcttgggctcaagcaatctgcccaccttggcctcccaaagtgctggaattacaggcatgaaccaccgtgcttggccctcatatacttttttttttttttgagacagagtcgcactctgtcacccaggctggagggcagtggcatggtcttggctcactgcaacctccacctccgagttcaagcgattctcccgcctcagccccctgagtagctggaactacgagtgcgtgccatcacacccagctaattttatttttagtagagatggggtttcactacattggccaggctggtctctgactcctgacgtcgtaatctgccctcctcggccttccaaagtgctgggattacaggcgtgagccaccgcgcctggccttggcccttatatacttttatagttccatttttttcactttgaaatctttggcccacttggcatttatcttggtgtatggtgagtgaaccgtgattgtaacactgcactccagcctggacaacagagggaaaccttgtctcaaaatatagatagatatggccaggcgcggtggatcatgcctgtaatcccagcactttgggaggccgaggcacgcggatcacgaggttaggagatggagaccatcctggctaacacggtgaaaccccgtctctactaaaaatacaaaaaatcagtccggtgtggtggcacgcacctgtagtcccagctacttgggaggctgacgcaggagagtcgcttaaacacgggaggcggaggttgcagtgagctgagatagcgccactgcactccagcccgggcgacagtgcgagactccgtctcagaaaaaagaacagatagatagatagatagatagatagatagacagacagacagacaggccaggcgcagtggctcacgcctataatctcagcactttgggaggccgaggtgggtggctgccatattgcacttcacagggtaatagaatggagatgacaatgactcggtggagactggggtaaagtgaaatgagggaaacacttgctgagaggttaaaaaaaaaaataagggggcaccaaaagactcagcaatccagataaatggcttgattatcttataatcgagataagatatattgcattgaactattatttattttgattactgaagggttctggaggatcaccccctgaaattcgaacctagaggaatgacctcaccctaatcctggccgtggctaataataacgcccatctcttagggctgtcgagtgaactaaaagagataatgcacgtagagccctcggacccgaggctggcattgggaaaggcacagtttatattttttgacctggttgttcaccaggcaatccctgccatccggctttccatcctgcagggggagcatgactgactgagtgtcactatcggatctatgataccttcttgcttttctgaaatcaaataaaagagccataaactctcatctcaactgttgtgttaggaaggaggacgggaatggtaaatgctgacgctacaggcggcagtctgtgcctcagagagaaaatttatcccaaccttgctgggggccttgacgcccatcttcctccagagcaccccgacagtcaccccgccctctggtgtcctcccaccccgagcccgatcttcccccttcacgcctgccccgggccaatagcctcctaactgcgtcctctctgattgcgtgtgtcgtgctcattacgccctatccgtcgtttcttcgctccacaaacgtttactgagcgccttcaacttgccaggcactaattagactagcgcagagaaacggggataagtactgatgagggtcccagccctcagcgatcggatttcagagggggagataaaggactgcccagaagggtggtgagtggagtagttgatataaacaacgaggtgcgatgaaatacacaggagggctgctaa

SEQ ID NO: 18182 - DNA, 2300 bp, Homo sapien
aacagatgggaagcttatttatcagcacttgattgaggagggtgggcaggaaaaggctgggccgtgctgtctggcaatgacttcccttctcctttttccaatccctctcacacatagcccttaaaaagattaatactgaattacacaataaataaaataatccacgcctgtaaatcccaacactttgggaggtcgaggcgggcggatcacctgagatcgggagttcgagaccagcctgaccaacatggagaaatcctgtctgtactaaaagtacaaaattagccgggcgtggtggcacatgcctataatcccagctactcgggaggctgaggcaggagaattgcttgaacctgggaggtggaggttgcagtgagccgagatcgcaccattggacaccagcctgggtaacaagagcaaaactctgtctcaaaaataaataaataaataaataaataaataaatagataaagttacaatttacaatttcattcttctttgattggccctcttctctcccccacctaattgctgttgtccttttggtcacactgccctttgtgacatctccttcctttcagggctgcccagactgtagcaggctgcagtggctggggagaccctactcattcctgtgcccctcctaaccagtcctagatagggctaaagaacgtctataaaccttttcagaagcttccagttgacacattctctctcttctctgaaatcctacaagtgctatctcatgatttacaaagacccaatacatgtgctgtctcattctgtcattgccagtcttaagtcttaagccctttgaggcctgattctacagccgagacatcctctatttctccaccatctctctgtctcattcagagcacacagtatgaatgaggtcaataaacacagtgttttttgttttgttttgttttgtttttgttttttttgagacagagtcttgctctgttgcccaggctggagtgcaatggtgtgatctcagctcactgcaacctccgcctcccgggttcaagtgattctcctgcctcagcctcccgaatagttgcaattacaggcgcccgccaccacacccagctaatttttgtatttttagtagagacggggtttcaccatgttggccaggctggtctcgaactcctgacctcaggtgcttcgcccacatcggcctcccaaaatgctggtattacaggcgtgagctaccgtgcccagcccaataaacacactggttttttttttttgtttgctttgttttgagacagagtcttgctctgtcgcccaggctggaatgcagtggcgctatctcagcttactgcaacctccgcctcccgggttcaagcgattctcctgcctcagcctcccgagtagctgggattacaggcacccgccaccacgcccggctaatttttgtctttttattactgatggggtttcaccctgttgtccaggctggtggaactcctgagcttaagtgatgtgcctgcctcagcctcccaaagtgctgagtttacaggtatgatccactgcgcctaaacatactgttgagtgtaacctcaaataggtcatttaacccttcagggctttgtgtatctgtaaaaggcagacaacagtccctaacaggctattgcagataatgggcttagcactatgaagcagctgttttatggggctccaggttcaccttaggtttgacaattgaattatgaaagataaaggagaaagacttgtcagcctctccgagtagatcctttggccgaaggagtgtccatgtggggtggtatctcggcctggtggagggggatgcgatggtagtgagaatattagggtattcatatctttcctcccgagtcaaacgttgccaggcacgttcctttcgcccctcccaccctccattctgcattaattccaagtttaattccaaatattagagtgtggtagaaaaggtcaaatagagcagccacggattaagcaaacgcccctccgcgtatggtgggggctgcagcgcccgtagctccacgctccgccccgccgccgctgattgtcccgcgccttgtgacgtcacacgcgggtttttaaggccgaaccctaggcaggctctgcagaggcagcggttggaggcgcggtgggtgtctgcgggggtctcgcggggcggctgcggtgtttcaccgggaaaggctcgaggagagcgcggctcacgagaggtaaacggaccctgcagaccgtgctgaggcggtcccggtgccgggccgctggagctggggtcggccatcggaggagggcgggcgggc

SEQ ID NO: 18183 - DNA, 2300 bp, Homo sapien
aagtttggacactactgtctatactacaggcagaaatttttgtagagacggggtctcactatgttgtccaggctggtcttgagctcttgggctcaggcgatcctctgagccacaataaggtagaagagggaaatgtagagccaagtggttacaagtaaggactttggagtcagtttgtctggtcccagctgcagcacttaccacctgtatgtccttgggcaagttactaaatctctcagtacctcggtttcttcattagcaaaattagggcagtaataatgcccatggaagggctgggggtacgaaatgagagggtgtaggtggcaaagggaaactctccactcttatctactgtattatcatttatttgggtagcaacgttgttctgtggccatcaggggaagctaccctccacctcctggaggaggtgtcattggagctgaacctcaaggcctggaaagacttccagaagctgagatgggtgcattgaagtggtggaagctgctctttagaacctatattttgccccaaaccatatattcctccccaaagagagaagttttcctctttcttgttccatcccctcctctcttcatcctgcgctgtcctctcatcaagtctttttctttcttttccctgtctctccttctcacctgccagaggcttctatgggcccctcttgtgtccttggccttatgaagtcaccgacacttgggttatgggctgctgctctgaggctgcagggtcaccttcggcccctcgatggggactttacactctactccaaacagaagcaggatgctgtcttggggattctttccccctgcagtctggtgccctggtgccagtgctcagggaatgaatttagtgctgggtcacttccagtacaaattattgagcaattttctgtgtggacatcaggcctatgttgagacaacagctctgccagttcgagcttgttccgttaataatttactggcggagaaatgggagttaaatgagccaggaggcatattttgcatgaactttgagggtacctctgacagcagttcatgtaatttgtccgggaagatactaaagctgtctgaaatctaatgtcctgcctgccacactgaccctttggatccattttattaacacagttggctttgatttatgtttattttattgctttggtttctcttctgaactcataaccagagtggtggtgcatgtggaaaatggctctgtgaagaattaggttcccaggtgtgcttgtggaaggaaacctagcagcagctgtgggtttttctcggctttgcaggactgggatgtcttgtggcaaaactgcccctttctgagtgactggccactgtgtgtgtgcaaggccagcaccattgatgtgtgacctgtgcagttaagcagggccccatgtttagaaggaccccctgcttgatttaatgctctgctgtcaccatttaaacgtcttaataatttagaaacaaggagtcatccttttttttttttgaggcagagttttgctcttgtcgcccaggctggagcgcaatggcgcgatctcagctcactgcaacctctgcctcctgggttcaagcgattctccagcctcagcttcccaagtagctgggattacaggcacctgccaccacgcctggctaatttttgtatttttagtagagacggggtttcaccatgttggctgggctggtctcaaactcctgacctcaagtgatccacccacctcggcctctcaaagtgctgggattacaggcatgagccaccatgcctggctggattcatacattttatactggcccctgaaaattctgtaaccagccctgagtgtgtgccatggtccacattcccaattctttatgttgaacctaggtgattcgccaagtttattctgttctttctggggccatcccaaaatccttaaggaggctatggcaactctgtcccagtgtcttacaggcccaccagccaagatatctgaaaacacatacagataaaaagtttgcttaaaaaaaatcagttacggcctcttcccggccaccatcccatctaggaagtgaggagcgtctctgcccggccacccatcgtctgagatgtggggagcgcctctgccccgccgccccgtctgggatgtgaggagcgcttcggcccggccgcgaccccgtctgggaggtgaggagcgtctctgcccggccgccccgtctgagaagtgaggagaccctccacctggcaactgccccatctgagaacggcattccagatttttctgcagtccagaatagagcacc

SEQ ID NO: 18184 - DNA, 2300 bp, Homo sapien
agtatttattgctactactgctgctacatgttatggttccatagcccctattctgacagagctttgaaaacaaaacaaactccctatctgttcctccttccggttaaatattggaggaaagcagaatagtaatattaatttttaaagagaaagaagcacagagaatgaacatcagatagaataagcccttgaaatcgtaactccaagctggcaaattgagcacattggatcaagtgcagagttttccattctattcatggggagaaagaggaagcgaaatggggaggggtaggaagaactcagagggtttagtagtgattccttaggaacctggaaacctggagcttctggagacagtgagaacaatggctgggtttttctctgcctgtcatttttcagtccatgatgagatgttgaagaaacagagtccaaaggtacaccagtgtaaaaatgttgccaaagtgaaaagtgggagactgatttcctccttccgattgattggagagccattcactttagggtgcttctgtttccttactcatcacacagagcactggagtgtgggaaaaatccccatcccacattaaggttgccacaaaggtaaaaaagacctgaagcagaagttgggagacctgagcttatgaccttggacttacagcacagctgatatttgggggaataaggtttgttgttgtttttgtgtgtgtgttttgtttgtttgagacggagtctcactctgtcgcacaggctagagtgcagtggcgagatctcagctcactgcaacatccacctcccaggttcaagcaattctcccgcctcagcctccctagtagctgggactacaggcacataccatcacgcccagctaatttttgtatttttagtacagacgaggtttcaccatgttggccagagtggtcttgaactcctgacctcaagtgatccgcccgtctcggcctcccaaagtgctgggattacaggggtgagccacagtgcccagcccctgggggaataagttctgagaggacacaggaaaactggggattgaaaagcaggttttcacaagagtggaggcagctggctctgtgggttcccagactaaggggatctgtgcttgacagaccagaggccagttctgtgaccatcatctcagccttgaatttttttttttttttttttgagacaaagtctcactctgtcgcccatgctggagtgtagtggtgtgaactcaggtcactccaacctctgcctcctgggttcaagcgattcttgtgcctcagcctcccgagtagctgggactacaggcgcccaccaccaccacgcccggctaagttttctatttttagtagagatggagtttcgccacgttggccaggctggtctggaactcctgacctcaagtgatccaccagcctcggcctcccaaagtgctggcattacaggcgtgagccactgcacccggcctagccttgtgatattaacagtaactgtcatttgcggtgtgcctactctgtgtcacactccttgcagttattccatttagggtagagcaacattattctagtttacagatgagaaaactaaggccccagagattgatttgcccaagcagccagctggcagtggaagtgccagtttcttcgtgtgtaaaacaagagaaggcaatctactgcctactggcttgtcaagggtcacttgagatcggacgacaggaaccacaaagaagtgaggccgggaatttgcggatccacagtaaagcaagtttgtctttttccagacgtgcattaagattcctttttcaagtgttctaaagcgcaggcgcaggctgttttgcggttgcctcccggcgcctcttgtgcaggccggggtcgccctctgccgacccagggcgggagcgcgctgagtgaacgtttccaggcctgagggcgggcggagatttttctcgcctgtagagggcgcagatcggcgtgcagagtaacccactctagttgtcccttccttaagcacttcctgtttgatctctatgatccatcctgttgggacttgattcgttcctcaaattttcaatttaccgtaaacaaaggggacgcgcgctgacccggaagtgaaagctggaacccggccggagtagctctgagcgccggctgtgaggaaggaggttctgggcaagctatagccatggctgtggctgtagccatggcgggagccttaatcgggtcggagccaggccccgcggaagaacttgccaaactcgagtacctgtctttggtgtcaaaggtttgcactgagctggacaatca

SEQ ID NO: 18185 - DNA, 2300 bp, Homo sapien
tcccgggttcaagtgattctcctgcctcagtctcccaagtagctgggattacaggtgcctgccaccacacccagctaatttttgtatttttaatagagacggggtttcactgtgttagccaggctcatcttgaactcctaacctcaagtgatccgcctgccttggcctcccagagtgttgggattacaggcatgagccaccacacctggccagattttctctctttacccttaccagatggtggtctttgttttttattactgttggataacctaattagttttgttttcaccatacttgaaactgatttcttgttcatgtctcttcttttctgaattctgtttcttatttgcagctgaatttgtgatcagtcttgctgagaaaaataccacctttgatacttttaaggcttctctcgtcaaaaatggtgcagaatttacggtatgtatatgtggagaagataatctgtagatattaatgttttaatttatgtttgtttgtttgtttttttttttgagacagagttttgctctgtcgcctgggctggagtgcagtggcgccacctcagctcactgcaagctccgcctcccgggttcacgccattctcttgcctcagtctcccaagtagctgggactacaggtgcctgccaccatgcccggctaattttttgtatttttagtagagatggggtttcaccgtgttagccaggatggtctcgatctcctgacctcgtgatccacccgcctcggccttccaaagtgctgggattacataatttatgttttaatgtcactattgattttaaattttgatagggtttaatataggattttgatataggaaggagacaattttatacatatcaattaaataagccattaagtgtgtaatgttttcatgccattaagtagtgatgatttaaccagattttctgtgatacctctaggaaaacagggcaggattttcatcattaagtctttgtaggtatttacattcttgttctgtgagtcaggaagttggaaacaagttttgggggtagttctaaaccttgggaaataaaatggttgcagggagcctaataacttttctccccaaagagtcctaaatatcggctttctctgaagctattatactaggttcatgctacaccaggttgacacactatgtttcatgtattccaattagctaaattcaagtgcgtaaccacccttccctacaggacattctttgccttttaagtgtatttaagcactgatatgggagctgacaattttcgttctatgtttcttttcaaaggattctcttattagtaacttgctgcgtctcatacaaaccatgcggcctccagcgaagccttccactagcaaaggtaagcagagcttccagctgagcttagcttctagaatggtgtaggttttgaacatcctgtaaattgcatttgttttcctctcagcagttgctgagcaagtaaatgttccagtaagatttttcaaatgggctgggcctagcggctcactgctggaatcccagcactttgggaggccaaggtgggagtatcacttgagcccaggagttttagaccagcctgggcaacatagagagacctcatctctacaaaaaaataaaaaaattagccaggcatgatggcgtgcctccgtagttccagctacttgggaggctaaggaaggagtgttgcttgagtccaaaagggtgaagctgcagtgagccatagttgcaccaatgtactttagcctgagtgacagaggtttttttccccgtttcaaggggaaaaaaaatttcaaacgacttaagacaaaataaaaaagataagacataacccaatgagtattgctacactcctctttctgctacatttcgagatagtttgtgatcaatgtatttagaaaattaaattacatttatagtaacaggtatgattaatatatagcaaaatgccatgttctgtttcagtttgatacaaatctattgttgaagttattttgttaatcattaataatattaaatatatatctctttttttaaccccttcatgctctttaatgaaacaagatccagttgttaaacctaaaacagaaaaagaaaagctgaaggaactcttcccagtcctttgccaaccggacaacccttctgttcgggtactgataccattttaagagtgtctactataaatatatattctcaaccccttttctttgtctcatagtaattttattaattttaagtttgcctttgttgtaacttatttttaagaatgaaagtgtttgatcactccctgagc

SEQ ID NO: 18186 - DNA, 2300 bp, Homo sapien
aaagaatgttatttttctttctttttctttttttttttgaaatggggtcctgctctggcccaggctagagtgcagtggcacgatctctgctcactgcaacctctgcctaccgggttcaagcgattcttgtgcctcagcctcccgagtacctgggattacaggcaccagccaccgtgcccggctaatttttgtatttttagtagagatggggtttcgccatgctggccaggatggtctcgaactcctgacttcatatgatccatcgcctcggcctcccaaagtgctgtgattatagacatgagccacctcacccggacaaattattacttttcaatgagcaaacctatattcagattaaaagataaggggggcccccggggcatggtgagtcatctgtaatcccagcactttaggaggccatggcaggaggatcgtttgagcccaggaattagttcaaggccagcttaggcaacaaagtgagacctcgtgtctatttataaaaaagtaaaattaaaataaagggggatgtagatcctgccctcaggtagcttgtgacttaatagggaagttaaggcatttatttctatttaacaggtgtttgaggttttaattacctattaagaccaaactactgtgacaggaacacgagtgtgcagagttgggaaatacaaagatgaataggatgtgtctggtccctatccccacagaggcttaaaaatacaaagggatttgaatgaagagaaacatgaatttgaaactagccaggctcatggttcttgctagttctcaataggagggcagggttttcttgttttgttttgttttgtttgttttgagacagagtcttgctctgtttgtttgttttgagatggagtcttgctctctcgcccaggctggagtgccactgggttcaagcgattctcatgcttcagcctcccgaatagctggggttacaggtgcccatcaccatgcccagctagtttttgtatttttagtagagacggggtttcaccatgttgatcaagctggtagaagcacaggttaatatgtggcttacatatttgagcctcccaattgatgtatgccctggccagaggcaagggcagaggaagtagggacttctttaaattctagttccacctggctgttgactggagtgagatgcactcacctgtgttcataaatagctatagttcaaagcctcaagggccgaaggagggccagtcccaggaagggtccagaaaaccctgccttttcttctttcctcctggcttttgttacattagtagccctagatctgagtttattagagtaggcccagagctagctagaactttagaatttccctttttgtggtgcccacaaccgttcaagggcagggggatgaaccacaaccccccaggctgtccaactaagaaccggatggtgctcctgtcctcaaatccagggcataagcctgagccaggcttggcagtgagctggggagaggaggagggaggcactcttgccgctgaccttcaaaggctgtagaccggaggggattgtgttacatgcccttgaactcctgcccctccccccagctactcctgaatggagtcaggaattccattcacaaaatggaggcatgaatgagcccaccctcccgcctcctcccggaggtgtcatgtttcaccatcttctcattcataggtgggagtgcagtggggggagggcgggaaggggttggaacttgaacgggtggcttcacacagccgccttcccgatgtggagtgggaaggttcctatcctatggaatggaatgaaacgaagtggaatgtgctctgttagacctgaaaaaacaaggcccagtgcccactgcctcttccccaggtgcatgcaggcgcacgctctgtttctgtcacacacacacacacacacacacacacgcgcgcgtgcacagggctgggaacctgacctgctgaccggacatttttgtccattctgagggagtcttaggcgtggacaccgaactctttccccggacgttcatctcaccctccctcctccccctgaactcgcaggaaacagctgctccctggcagcttgggcccttcagaacagcttgcccagcccccgctgctgccttccatggcctcagccgcagccctcaagttgaggaggggttccagcatcacactccctctgggtgaactttccctgggattttgtggttggcaggcaacctgggcaaagaacagtcaccaggaagcaggctggaaggaagaaattcttgaatgtggataggacttcctcctcccctg

SEQ ID NO: 18187 - DNA, 2300 bp, Homo sapien
tagataaggatgtctataccatgaggcaggatgaaaaacatccacaccagagatatagtcaagaatgttgtatatggctaaaggaactgattcaggctatcatggaaggcttcctggaggagagggacaatagacatgagccttatagaatattacagcacctatagaaagggaagtttacttccatttgcacaagcagatctcatggaatgagcccttatgaacactaaacagcaattgtatgttttagccttagttctggccagacaggcccaaagagcttacatgtgtcatttccttctctgaaactccactgcctcatctgtaaagtggcgggtgttaggttagatgaatttgggaagccactcctgctggcctggcatttgaacattcttttgtgtttatcacaaacaggcaggataaaaaatcaggctgtcctcaaaggagtgcataggctggagacatagagaattgtctcagcaaaaaggcctttgaggattcatgtcctttgtgcccccatggccacagcccaagcaccccaggtcccctcagatgtctgtcttggacatagctgcttgcctggaacccagcactgtatctgacacgataaatgtttattgaaagaagtggtgaatggatgagatgacagagactatgaccagcttcttagctaaaactgaaacccatcctgcctccagatcatcagaacctttggggcttttgctccttttgctggctctcagataagagggaagatggctgagagggagctacactttcggaaatcatctaccctggggcttctggtttctgctgcaatcagtagaaagtgggtcacaaaacagctctgcagagaacagacccttgaggaaaagcctggattctgtgccagtttacatttattgatcacctactgtgtatcagttgtcacatagcttaactcatttaatcatggcttcagaggggtgtacaggagagtgtgagggatttgaggctgtaaaccccagaggtgctgactagctgagtgacctcaggagagttaccatccctctctgagtttcatttttaatatctgtaagatacaaacgatccatttcgccgggttatgggaacgaaatgagcacgtggaagcggagcgcttcataaatgctagttattattgttcctctgggcacacaagcccggtcgcctccctcctgggcgcacacagacatgttcatactcccacgtacacgcagatgcagagacgtgtgcagacgccagccggaggagcacgcggcgcatcagacccaagaccgtggcgagacggtgaagaagccgcggggtcctcggcttctctctttttctctcggttctttatgaatgaactccagccgcgagttttatttttttatgaatgggagccggagcactgaatgaagccgggagccaacccctacattctgattggcccccgcggctgggaaactccgccccccggccaggccggacgactctccggattggcgggcgtgcccagccctggggttccattcacaaaagtcaatgaaacaaagggaaacggggggcggtgtggcggggcggggggtggagagctgaggccgagcgaaggaaatgcaccaatcagctgctcccccgggctcacaactgtctgctgcgcccgaaaaacaagtcggtgcgctggggacccggggccggggccgccttactccggcctagccccgcggccctcggtgcgggctccagggcatgctcgggaccccccgcggctccagcccagacgccccggcctcaggtgaggctgcgggagggaaagggagggagagtgtctgtgattccccgcctcgcctccaatgcacaccacactcactctcaccacccgcctccgcagattccagggcgggggtgggaggtgctgggattcagggttggagggggcgcgggagttgtgggcatgcgatggtgtgcgcttcgcctgctcctccgcgcgcgcgcgcgtacacacacacacacacacacacacacacacacacacacacacacacgttcttatgtaaccgagcccgggtaaagcagggctgcagaaagcagaaacggcgagcccggctcctgggagcaggtgggacctcctttggcctttggcgggaggggagtggtggtggcgctcggcctggcaggcggaaacctcgccatcgccccagtgagtcggagaagtttcgccgtcggacccagagccttgggactgccccctccccgcccccatcgcagccctccctggacggtgtgcgaacgcagccccc

SEQ ID NO: 18188 - DNA, 2300 bp, Homo sapien
gtgagccgagattgcacctttgcactccagtgtgggcaacaagagtgaaactctgtctcaaaaacaaaaacaaaaaaactcagaaccagaggggcactggcatccctagagaggtcccatcctactgaagtgcccagtaccaacttaaagacctactggactcttcttcgttgtcatggagaccacatcaaagctgccttccaggaagagccctctgtcctcctctccacttctcttggccagaactcacacttgtctctaaactggttccatccagcccaaagctgggatttgcttgggcttgtttctccttccttgggcagggttcctgctaagctcaattaatttggtctttattgtacctattcactacacaagcatttcatgccaccctcataagcatgctaacaggctgaggaggactttcagaggcaaatgagctctggagagctctccatagataaggatgtctataccatgaggcaggatgaaaaacatccacaccagagatatagtcaagaatgttgtatatggctaaaggaactgattcaggctatcatggaaggcttcctggaggagagggacaatagacatgagccttatagaatattacagcacctatagaaagggaagtttacttccatttgcacaagcagatctcatggaatgagcccttatgaacactaaacagcaattgtatgttttagccttagttctggccagacaggcccaaagagcttacatgtgtcatttccttctctgaaactccactgcctcatctgtaaagtggcgggtgttaggttagatgaatttgggaagccactcctgctggcctggcatttgaacattcttttgtgtttatcacaaacaggcaggataaaaaatcaggctgtcctcaaaggagtgcataggctggagacatagagaattgtctcagcaaaaaggcctttgaggattcatgtcctttgtgcccccatggccacagcccaagcaccccaggtcccctcagatgtctgtcttggacatagctgcttgcctggaacccagcactgtatctgacacgataaatgtttattgaaagaagtggtgaatggatgagatgacagagactatgaccagcttcttagctaaaactgaaacccatcctgcctccagatcatcagaacctttggggcttttgctccttttgctggctctcagataagagggaagatggctgagagggagctacactttcggaaatcatctaccctggggcttctggtttctgctgcaatcagtagaaagtgggtcacaaaacagctctgcagagaacagacccttgaggaaaagcctggattctgtgccagtttacatttattgatcacctactgtgtatcagttgtcacatagcttaactcatttaatcatggcttcagaggggtgtacaggagagtgtgagggatttgaggctgtaaaccccagaggtgctgactagctgagtgacctcaggagagttaccatccctctctgagtttcatttttaatatctgtaagatacaaacgatccatttcgccgggttatgggaacgaaatgagcacgtggaagcggagcgcttcataaatgctagttattattgttcctctgggcacacaagcccggtcgcctccctcctgggcgcacacagacatgttcatactcccacgtacacgcagatgcagagacgtgtgcagacgccagccggaggagcacgcggcgcatcagacccaagaccgtggcgagacggtgaagaagccgcggggtcctcggcttctctctttttctctcggttctttatgaatgaactccagccgcgagttttatttttttatgaatgggagccggagcactgaatgaagccgggagccaacccctacattctgattggcccccgcggctgggaaactccgccccccggccaggccggacgactctccggattggcgggcgtgcccagccctggggttccattcacaaaagtcaatgaaacaaagggaaacggggggcggtgtggcggggcggggggtggagagctgaggccgagcgaaggaaatgcaccaatcagctgctcccccgggctcacaactgtctgctgcgcccgaaaaacaagtcggtgcgctggggacccggggccggggccgccttactccggcctagccccgcggccctcggtgcgggctccagggcatgctcgggaccccccgcggctccagcccagacgccccggcctcaggtgaggctgcgggagggaaagggagggagagtgtctgtgattccccgc

SEQ ID NO: 18189 - DNA, 2300 bp, Homo sapien
gtggcagacctggggcttgaactcagacccgtctaacctcaaaccccatgcctcctcctctgcatctggcctgctccaaactgaacagcaggacacctgaggccaagtgctgattccaccatttcttagctgtgtgagtctgggcagcccagtcatccatctgagcctcggttttgtcatctgcaaaatggagacataattcttacttacccatcctaggaaagttgtgaggctcagagaattgtgtgtgccacagctaagccctgggcaaagcagaaagatgagtctggttgacagctatgaccccatccactctactggtctacaacactctgaccgcttgttccagaagagggcacatcttttcatatgtacacccctccccatcttttacagctgctcctgctcccaggatgtgtatctgactggagtttctggattaaaggccagtcgtggcttcattccacatccctgggtgcccttcggctcctcctaggagcatctcctgcacccaccccccagggccccacctccaggctgcagagctaagacctaggggcccctcctcagggaaccctcgccgtctttggaagcagccagcagagacgctgctgttaaggtccatgcctgtttctgcccccatcctgctgctctgggccatgggaataaccagtggggaaggagttctggcccctgggtgttaggaatgtcgtcctccaagaaattgcattaaccctctgagagaccagcagggcgcagccatgaggaagactgggcatcaagatggcacttgggctggctgccctgtgatgtgcaccagcccggagacccacgtgcctgcttgccaaagaggctcctttggggaatgaggagcccctgattcctatttccctaccccaaattcctcggaagcctccgcctctgggggatgagaaagggaagcaggtgggtggaggtgaagggggcagggagcaggtgggaggagacccgaagaaacttcaaggaccttatttaagagccttgccattgctgtgaagaaaaatgacttgaaacctctctagagaagagtgtggctaattggcatgtatgttggaggttaaagagcggaaggaagaatctgattgtttttttaagttactgagaaagtgagaatgtcactctgggcagagagaaattctttttttctagagtgtgcctttctttgtactgcagaccacagtgggccgctgagacttgcaaaaaagatttcttttaatccaccttcctttttcgcaggcagcagtagaagggcctttaaatcaaatgcaatcaccaagcttgtctcttgctcttattcctcacttcactccctggaatttggcatttgatggattctggatctgacttaaggctttttctaaatccaagacttggggaattttgttaacagtgcaataaaaataacttcatagtgttacaggaggcacattaaagacggtgtgtgtgtatgtgtgtgtgtgctgctctctttccttaaaaaaaaaatacagacaatgtttctttaaaagtctccatctgcaaatcccattagatgtgcatataaggtttctgatgattaatagttgcctgctagggttttggttggaggggatcttgtgtgtgtgggttaacccctccctctcctctctcacatttcacttcagaaatttgtcactctctccccaccgcaggatttaaaagtgtgtcccagcagccctggtccagccctctgcaggcatttgctctgggctccaggacgaactcctcgtcagctggtgcgtctgggttgggacagtgaaaatgtttagtgtcattggcgacaaatacacatacaggggatcccagtaggtaggctggtgcattggaggggcaggagcaagcccgacataggtgtgtgcacacacataggagtagctggccacatgtgtgtgtactttaaggagagactttagttttgggtttttttttttttttggttcctggggtaaattttctgttgaacatttttccctcctatttagttttttttcttttgcatttttaaaaatttgaacataaaaagtataaagaatcaaatctttgaaaggaccgaggcgtgcagcggacagcagatggatcccgcggccagcagctgcatgaggagcctccagcccccagcccctgtctggggctgccttcgaaacccccactcggaaggcaatggggcctcagggctaccccactacccgcccaccccgttctccttccaccagaaaccagacttcctggcgacagcgacggca

SEQ ID NO: 18190 - DNA, 2300 bp, Homo sapien
attggccgggcgtggtggtgcattcctgtaatcccagctactcgggaggctgaggcaggagaattgcttgaacccaggaggtggaggttgcagtgagccaagattgtgccactgcactgcagcctgggccacagagagaatctgccaaaaaaagaaaaaaaaaaaaatttcagccgtacaaggatgttcatagcaaccctgctggaaataggaaaaaaaattggaaataacctaaactactcacaataggaatcagctaaaaccctgggggtttaattccagggagtactgtgaacaatgacaagtttgtggactgagtaaaaataaacagctgtcaatgacttaacattaaatgaaacagcagaagatgtcacagcaggttctcgctgagccattcagaggggtgtggatcatttagaggttcaagtccactggattcttctttttccttttaatattacttcacttccaaataaggaaaggaaaggaaaggaaatcacgtccagtcctgagacttgccatcctgcagtcacccctccttttgtctccagcaggtggcagacgcgttccagggatgaatcccactgcctctgtttaatgcagacggtccagccgctcccaacagcaggtggggctataagcatccatcctacctgctcaaggaacccaggcatcagaactgctctctcccaagtccattgcaagaaggcagtcgtctggtcatgagagggttaacagtccacattccagagcaagggaaaaggaggctggagggtcatagacaaggggaggtggcgcggagggccagcttctcacaacactaccggctctgctgggagagatagatcacccccaacaatggccacagctgttttcatctgccctgaaggaaactgacttaggaagcaggtatcagagagggcccttcctgagggggcttctgtctggcttgtaaaactgtcagagcagctgcattcatgtgtcggatgatggatgatggaaaggaggacagtcggctgcagatggacacagcgacttgcaagttgaggcaggtggcaaaggacttgcagaggctctgcaggtggggcatgctgattcattgcccagttaaaataccagaggatctgggcagcctcttcacaggagctgcttgtcctcaaacaatctgtcttcaatgaaagattcctctggccttcctttctcttcttgcacctcaggtgtgaatccttctcccccacgcctctacctgcccccccgccccccgccccggccctgtgtggctcattatatgcagggccaaggcagcattttctcttagcttctttgtgaccacttggtcctgggatggcttcatggaacacatcctgtggtgtgcaccaatgaagctttccatacaggactcaaaactgtttttgaaaaatgtaaccagctggaagacaagaaaataaaatgtcagcactaaaaacgctggctgtggcttttgctaaggaaaggaatttggtgttgtcttctcacacacacagactggttggggaaatgactgtcttcagcacatcaccctgcgagccacagtgagtgccctggctcagaagtgcctgtcacagtgcacaggatccctgaggagcatgagctgggatttcctctgtgctgtccaccacaggagcctgagtgaccagcgcatcctcgatttgtaaccagaatcctgccctctctcccaagcgggcacccttgctctgaccctctagttctctctcttgccttccagagaataccaagagaggctttcttggttaggacaatgaatgctgagacttgtggagttgggaccaatgggatttctttaaaagcatctttttgcctctggctgggtctatgggggtcaaacagaaacgccttgggccatttgttggtggggtgacaaatgaacttggcctgagaaatggaataggccgggctcagccccgcgaagcactcagaactgcacattttctttgttgagcgggtccacagtttgttttgagaatgcccgagggcccagggagacagacaattaaaagccggagctcattttgatatctgaaaaccacagccgccagcacgtgggaggtgccggagagcaggcttgggccttgcctcacacgccccctctctctgggtcacctgggagtgccagcagcaatttggaagtttgctgagctagaggagaagtctttggggagggtttgctctgagcacacccctttccctccctccggggctgagggaaacatgggaccagccctgccccagcctgtcctcat

SEQ ID NO: 18191 - DNA, 2300 bp, Homo sapien
aaaattccatgcccgaattgtgacgtcggcccgttgccatggcggcgaaggcagacattccgcggtgacctcactgcagaaccaggcagctgtcacatgacgcgcgggcaggagaccggccgggcgaccgagggtcacctgttaagtgaacatggtagccccgaccccgcccaaggccaagccccaagcgggtggcggctgggacccgggcaggcgccacccgggctccgtgcaccccgccacggggaagggccgcgcccggccaggcagggttccagttccttggccccacgcgcgggggtaggcgtcgactccaggcccctcccaagcccccgctgtggctcccggaggggccatcgcgcccgggctcccccaacccaagactcgcgacaccccgaccccagcctcgggtgggcggggcgtcccgagagggacggcggggccgggctcgcgaaagggactcacgcgttgcccacgtagatccgcggggtgacctcgttgcagggctggctcgggaggctgtagcagccgctgccgtccgagagcaggtcgttgagatcctgcaccgagagctcgaacgagcccgacatggcggcggcggggccctgcacgcccggcaggagcaagcgaggcggagagcggcggatcagctgggcgggggctcgcgccgggagccgccccgtcccgcccctggggcgggcccgccgggctccgggagctgcggagcgcgggcgccgtgacgcgggggccccgcgcgccactcctgggcgcgtcccggggggaagacgccaccgccctggagtctcaggggtcctcgccccatcccggtccaggccgtttgtgtatctttgtaaactggcaagcgcggtaacttccttccctgaattaaatgcagggcccaataaacatttcgtggcggaggtacacctaggggtcgcttcagtctttcatgattacagggaccgccgggttcggctcgtgagcggctccctgcagtggaggcaccacccgggcgcttgacagaatccccgccccagcccagccctgctggatcagagtggacattttacggaccccaggaggtccctacggtcaaagtctgagaagccctactctggggcgcatctgctttcaacattcattgagagtcatcgtcgtgcttaaaagcagtcaggtttggaattctgaggaattacttaacctgagcctgtttgcagggaaaaaaaaaaaaagcgggatagtaatggtacctaattctagggttgctggaagggttaaatgtgacattcaaagaaggcacccagcactgcatggcgagcactcaataggtgttagtccttcatcaacaaatgcgttgagcacccagtgggtgctataccctgtgctggggtggagataaatcagactcctgcagcccttcctggagcagatgccagcccaccataagccactcagcatttcctgaactcccactaagtacaaaagatagtctctgtactggaggaaagctgccctcccctactgccatgaaaaactggcagtttccttcctgcaaaagggcaaatttggccttgaattcaggaaccccacatcctgagcccagccctgccaccaacttggttcttgagtaacgttgctgctgctgtggtcttcagtttcctcatttgcaaaaggaattggatccgattatcattagggtcaactttctcctcctccaaaacttgtggtcttgcaccttcaggggagctattgcagtggagactacttagctgatagcccaagatgtgtaaccaaggctggaatttctgtatccctcaccccaccccgtgcctgcccacccctcccggtgcaccacttctttccttctggtgttggctggcagcatctgcattctaagcagcggggaaagctttcgagttccttgaccttcatcttgacttgagccgaggttagcattaaaaacacaagcccagaggcagccagccatgctctgctgctcctactcccttcccgggacctgtccctgatgtcataactgggtaactatgacagcttgtcatggggacagctaggcacctcacagaggagtctgggtacctcatttctgaagtgagactaggaagagaagatgaacaattccctggattatctggcctaccctgttatcgtctctaatcacaggcaaagcacaaccttcagaaagaaactggactttggccactacgtatctcacaagaatagaatacaaataggtatgtgggcagtttgggctggacactgctattagggattttggaatg

SEQ ID NO: 18192 - DNA, 2300 bp, Homo sapien
gaattccagtagcggcctcagaaaaccagcactagacaatgtccttgactaatgaacaatttcgaattaggaccttaatgcgactcaagaagtttggtttgatttatcaaatgaacatctctggagagttttgagcagaaacaaaagaatagtgaaaataaaatttacagagataaatgtccttctaatccaatgaaagagcttctcttccaatctttttccaatattattagcctgtctattggcttctgaagtcttatcccctttctaacgtacttcggctttaaggagtttaaaggagtatttccatccagtgaactccctggtggaagatacattttgttattggtgctaatgccctcttccccaaactcagcagataaggccatatcatcccaaagctgtgacctggtctggtttcctgttgatctctttatggggtaccattccaaaatccctaatagcagtgtccagcccaaactgcccacatacctatttgtattctattcttgtgagatacgtagtggccaaagtccagtttctttctgaaggttgtgctttgcctgtgattagagacgataacagggtaggccagataatccagggaattgttcatcttctcttcctagtctcacttcagaaatgaggtacccagactcctctgtgaggtgcctagctgtccccatgacaagctgtcatagttacccagttatgacatcagggacaggtcccgggaagggagtaggagcagcagagcatggctggctgcctctgggcttgtgtttttaatgctaacctcggctcaagtcaagatgaaggtcaaggaactcgaaagctttccccgctgcttagaatgcagatgctgccagccaacaccagaaggaaagaagtggtgcaccgggaggggtgggcaggcacggggtggggtgagggatacagaaattccagccttggttacacatcttgggctatcagctaagtagtctccactgcaatagctcccctgaaggtgcaagaccacaagttttggaggaggagaaagttgaccctaatgataatcggatccaattccttttgcaaatgaggaaactgaagaccacagcagcagcaacgttactcaagaaccaagttggtggcagggctgggctcaggatgtggggttcctgaattcaaggccaaatttgcccttttgcaggaaggaaactgccagtttttcatggcagtaggggagggcagctttcctccagtacagagactatcttttgtacttagtgggagttcaggaaatgctgagtggcttatggtgggctggcatctgctccaggaagggctgcaggagtctgatttatctccaccccagcacagggtatagcacccactgggtgctcaacgcatttgttgatgaaggactaacacctattgagtgctcgccatgcagtgctgggtgccttctttgaatgtcacatttaacccttccagcaaccctagaattaggtaccattactatcccgctttttttttttttccctgcaaacaggctcaggttaagtaattcctcagaattccaaacctgactgcttttaagcacgacgatgactctcaatgaatgttgaaagcagatgcgccccagagtagggcttctcagactttgaccgtagggacctcctggggtccgtaaaatgtccactctgatccagcagggctgggctggggcggggattctgtcaagcgcccgggtggtgcctccactgcagggagccgctcacgagccgaacccggcggtccctgtaatcatgaaagactgaagcgacccctaggtgtacctccgccacgaaatgtttattgggccctgcatttaattcagggaaggaagttaccgcgcttgccagtttacaaagatacacaaacggcctggaccgggatggggcgaggacccctgagactccagggcggtggcgtcttccccccgggacgcgcccaggagtggcgcgcggggcccccgcgtcacggcgcccgcgctccgcagctcccggagcccggcgggcccgccccaggggcgggacggggcggctcccggcgcgagcccccgcccagctgatccgccgctctccgcctcgcttgctcctgccgggcgtgcagggccccgccgccgccatgtcgggctcgttcgagctctcggtgcaggatctcaacgacctgctctcggacggcagcggctgctacagcctcccgagccagccctgcaacgaggtcaccccgcggatctacgtgggcaacgcgtgagtccctttcgcgagccc

SEQ ID NO: 18193 - DNA, 2300 bp, Homo sapien
ggcaccactccagcattacacaaccccctagtgagtctcaggcacgttacattttgaggagcaatagtgtagatatttcttgaggaatgaggataatttttgaggaatgaggggaaacatcatcatgacatttgctgcctctcacagcctccccatgcactacagcctgtggggcctgccaacccattttccctggttactgtgcagggctagatttacttccagacttaacctctgggtccacctctcctgacatgtgctgtgccgttctttgctgctgggattgagggaagggggcccactcactcacccactcctcaccttttaatacccacaaccacctgctcactcacccagcagttcctatgctctcccctatacacattctttcaccaggaacctcagtttcctcaattgcagaaccaaaataagaatggtcttgatatcaggaactactgtgaagggaagtgatctgaggagtacctgggcatggagacagcacaatataagtcagttatcgtcatggccatttcagagctctttttccagtaaagcccctggatgctgctcgcctctgctatgtagcctcactcccctgcagccgggcagaatggagtccccctcctctccagcctgacttctcctcccctgctccgcgtccccagggcagcgtgcaccgataaatctttcccagcgcgttgcattgttacagcgagttgccctcgcatccgaccggccccccgccccacctctggagatcttcaaacccaggatctgtgccttggtcgtctttgaagccccggcccctggcacagcgcctggcacctggagggcgctcaataaatgtttgcaaaatcgaattctctgttgagcaggtgtccacccctccactcgcggagggtgggttgcgcgggcggaagggaagtctggctgtgtgccagggtgcggggggacacaggcaggggactcagggagcgggagagcgggagcgggtacgacgccggctagcggagcccggcccggagggtgcggcggtgccagacgcggagggcggcctccgctcctcccccgcctcctccccgcgccgcgcctcctccccgcgccgcgcctcctcaggctccgccacccccgcccggcgcggcagccgcagggaggggtccgggaaggcggagccagcggcggcccaggctctgggcactcgcgcggctcccgttcgcggagcacacatcccggcgcgacgaggtaggaggccgcgaggggaacggacgagggagctgggcgccgcggcgggaggggcgggaggccgggccgagaccctcctcccgtgctcccggacagcctcgcggcccaccgagcccaccgcgggagtctcaaccccgcccctcggcccccgcctccctcttcccgcgcccgccccgccgcgcgccccccgctccctgctgctccgcgtcctccgggaccgccctccgaggtcccccggggtcgctgctcctgcgcccagtgcgctccttgttctcccacaggttccttcggagagcgagcgggagtcggtgctcggcctcctgcggggagcagcccgagggtgagtccggcgtggcgtggcggggcggggcggggcggaggctggagggcccggggccgctcttacgcctcttagtggcaccggggctcggcgctgcgggctggctccatgtttgcggaatgaatcagtcatgactctccttctcctcttcctaaggaggactttttgaggtccacgtgctgcagagcacctttggagggcctcatgagataggggtcccccctcctgcatagtggaagcccgactcccatttccccccctcctctctgcactccagtctggaggctccctttgggttgggtcttggggggtcggggacagggggcttgtaggcccagccaggtagttgtggaaggtgtgtcccagcaggagacttgagccagggctcttagaaggttgcagtggagggggcgcgctgcggaggacagctgacactgtcaggcagggtcacttggcacctccaaggccagcctggaagagcctgcttgaatatggattttgacccacagcttactgaaagcttccacgccgctgtttcttcatcaataaaatgggaacattcgcagtcatttctcaggactttgtgcagacaaaaagtttatcatagaaatcaccccacacaatgcttggcacatcgaggacactcagcacatcttagctttatttccttcctctctgaaaaaagtaagcagagttatttgttcccatcctctctgtc

SEQ ID NO: 18194 - DNA, 2300 bp, Homo sapien
tcttttttttttttttttttgagatggagtctcactctgtcacccaggctggagtgcagtggcctgatcttggctcactgcaacctctgcctcccgggttcaagcaattctcctgcctcagcctcctgagtagctggaacggacacaggtgtgtgccaccatgcctggctaattttttgtatttttagtagagatggggtttcactgtgttagccaggatggtctcaatatcctgacctcagatgatccacccaccttggcttcccaaagtgctgggattacaggcatgagccactgcacctggccaatagtgttttttgatgagcaggagttttaaattttgatgaggtccatttatcaattgttttcagggtccatgctttttttaaaaattttttctttttttagaaacggtgtctctttgtcacccaagctgaagcgcagtggactgatcatagttcactgcagccttgaactcttgggctcaagcaatttgcctgcctcagcctcctgagtatgtgggatacaggctcatgccaccatgcctggcttttttgtatcctttctaggaaatctttgcataccccaagatttaaaagataccctcctgttttattctagtagctttatcgatttgctttatgtttaggccaatgatctctcttaaattgcgttttgaatatggtgtgaggtagggattgggtcccttcaggcacataaatatctacttgttccaacaccacttcctggtgttcttgtccaaaatcatttgacccatatcagatggatcagatggttctcattatttttccaacagtaaacattgcagctaagaatgtgtctcatgcagtctctctccactcaaaaagtgtggtctgcagaccagtggcgtcacatcacctgggagcttgtcagaaattcagaatctggcaccactccagcattacacaaccccctagtgagtctcaggcacgttacattttgaggagcaatagtgtagatatttcttgaggaatgaggataatttttgaggaatgaggggaaacatcatcatgacatttgctgcctctcacagcctccccatgcactacagcctgtggggcctgccaacccattttccctggttactgtgcagggctagatttacttccagacttaacctctgggtccacctctcctgacatgtgctgtgccgttctttgctgctgggattgagggaagggggcccactcactcacccactcctcaccttttaatacccacaaccacctgctcactcacccagcagttcctatgctctcccctatacacattctttcaccaggaacctcagtttcctcaattgcagaaccaaaataagaatggtcttgatatcaggaactactgtgaagggaagtgatctgaggagtacctgggcatggagacagcacaatataagtcagttatcgtcatggccatttcagagctctttttccagtaaagcccctggatgctgctcgcctctgctatgtagcctcactcccctgcagccgggcagaatggagtccccctcctctccagcctgacttctcctcccctgctccgcgtccccagggcagcgtgcaccgataaatctttcccagcgcgttgcattgttacagcgagttgccctcgcatccgaccggccccccgccccacctctggagatcttcaaacccaggatctgtgccttggtcgtctttgaagccccggcccctggcacagcgcctggcacctggagggcgctcaataaatgtttgcaaaatcgaattctctgttgagcaggtgtccacccctccactcgcggagggtgggttgcgcgggcggaagggaagtctggctgtgtgccagggtgcggggggacacaggcaggggactcagggagcgggagagcgggagcgggtacgacgccggctagcggagcccggcccggagggtgcggcggtgccagacgcggagggcggcctccgctcctcccccgcctcctccccgcgccgcgcctcctccccgcgccgcgcctcctcaggctccgccacccccgcccggcgcggcagccgcagggaggggtccgggaaggcggagccagcggcggcccaggctctgggcactcgcgcggctcccgttcgcggagcacacatcccggcgcgacgaggtaggaggccgcgaggggaacggacgagggagctgggcgccgcggcgggaggggcgggaggccgggccgagaccctcctcccgtgctcccggacagcctcgcggcccaccgagcccaccgcgggagtctc

SEQ ID NO: 18195 - DNA, 2300 bp, Homo sapien
aaatgtagaggatcagaaattattctgtgtaaggacaaaaataaataaatagaagagcaaagatatgctatcaaatgctagaataagtattactttaaggccgggcatggtggctcgtgcctgtaatcccagcactttgggaggccgacgtgggaggatcgcatgaagccaggagtttgagaaaagcctgacaacataacaagaccctgtctctactaaaaataaaaaattagccaggcaacagtggtgcacgcctgtagtgccagctacttgggaggctgaggtgggaggatcacttcagcctgggagtttgaggctgcagtgagctgtgatggcgccactgcactccagtttgggcaacaagagtgagacctgtctcaaaaataagtaaataaacaaatacttttttttctttttttagatagaatttcactcttgttgcctaggctggagtgcaatggtgtgatctcagctcaccacaacctccaccttctgggttcaagcgattctcctgcctcagcctccctgagtagctgggattacaggcatacaccaccatgcctggctaattttatatttttagtagagactgggtttctccatgttggtcaggctggtctcaaactcccgacttcaggtgatccacccgcctcagcctcccaaagtgctgggatgacaggcgtgagccaccatgctgggccataaatattttttaatctgtgtttttttaaaactgcaaaaacagatcaccttttgtagtctgtacatgtaaaagagagtcaggggctgagatcatggtaacagttttccccaccgtgaacagctggccctgcccactaaatggcagcagtgcttcgcagtcattgtgaaattaaaacacttctccccacgttactagactcacacacacacaatcttccctcccagaaccactgagttaatgcttcagatattaacctgacaagtcagtaaaattccaactgaacatttggaaggatatatgccaaaatattaatggtgcttttctaaagcagaaggggaattacaagaagcactcccttttttctttctttcctttttacgttctgtattgtgtaaaattttgcttacaacctgtatgaactttgcaaccaaaccaaaaaaaaagtcatttttgaagccagtgtgtcagagctcccagtagtgtacatgtttgttttggtcctttcaaggaggattcaagtctgcgatggagaaaccaccaattcactttttcaaatgccaaaacaactccgcaggcgtggaggagacctatcttgcagcgctgtaggcccaaggcaccagggaatccggtccagctcagccctacagctttgctcagccccgtctgcaccgccgccccgtggccaagggcagtactgcgtcctccaaaaggcaagggcggaggaggggccaggggccttgccccaggggcaagcttctttctgtcccactgaccacatggcagtctggtgaagtttatggacccctctctcagtataatggcgggtaaatatataaataaaatatatatgctggaaagaaaactaatactggtgagatgattcttaaaactctttataaatgtgtaatataataatagccgtttcattattgtaaataaccagctctaggggcaggtctaggaactcattgttttccaagcagtgaggggtatacacgacgtttcgagatatccacaacttgatgtgccagtgtctgtgattgtaattggtaacaaagttgcaggtactgctaacagtacactctgaataagaggaaaagctaaatattagaagttgatgaaagtcaatatgtaactttttcccatgcgaattcgacttacagaccccttagggcgcacggaccacaggttaaggcccccttgaaggggcacgagtttaggagaaactctggtgtgggttttcagtcctggaaggtgagccctggggtaggcacgcgtgggcgctcagaaaagggaaggcagaggcgcctccccggctgggcctgcggagggatgacccacacgcccctcccctcgcttccttggcctggtttcacgcgactagagaaagttaaagacccgtgtgactgaagaggagctcacagttcccagcgtctgctcccacggtgtccagcgcccagaatgcggcttctggtcctgctatggggttgcctgctgctcccaggtgagatggggagagggtctcgggagggatgtggggctcacccttgtggtctgcagggaaaggacctcttgactgactgatagccccacccca

SEQ ID NO: 18196 - DNA, 2300 bp, Homo sapien
ctactgcctctgccagaggttccagggctgccactttgggtagaatgattcctctgtgcctcctctccgagaaagtgaagggagtgagccagggcctaaactgtggtacacttgtccaggaaaggcctcttctccttgcagtggagggatggcaccaatgtccccagcttctgcagcatcagagggctcagtcccccatctcctgtccagcctgctgggctccctggggtctccctgcctctttcagcctgcctaggccccactgtaagctgcttaggcattaattaaacccacccctgagcctgtgcttaatggcctctccagccgggactgcccagtaaacccaccaatagtgcctgactggggcgtaggaggaggagcaagcccagcaatttggcttcgttgttgcagaccacttgatgggggcgtggtgggggaggatgggggacagggagtggagccttggggtgtggcggtgggttctgcttcctcaaaggactcctggggctcctgctccccttcatgttgttcgaggggctgctcctggcttctcatattcaaaggaagaagtacaaagtgtttttcttccttcaggcagcctctgtcctatcctgagctacattagctcccagcttcaaaaatctaatggtggattctgccccttattatctggtggtcattatacttcccacaggatagagagacagctgtgtccctgcctctgagttcaggctccccttccctcctcctcccctgggagatccctgccttggactctgcaaagggcaaagctaataagatcctttttccgcccttccccatgggtcagtatggttgaagggagggaaagggtatgggtgtattcctcttgcagggagaccccatatctactttgggtagagtcaggggcccttttcctgagacttgggagataaatggacagtggcactgggctgagaacttagagatcctgaacctggcatctcctgacctgcagccttgctccctcttcccctgtcaccagattccctcccttttttggatcaaggctgggatatgtggctgctttcaggtggagctgtccctttaaatctctcctccatccctgggttactgtcctggtgtgtaattctactgtcatggcaaccaggggtgcaatgcgacctggtgccactcctcagggaatgtctgagtggaggctgcagtaccctgatggtggcctcttgggcacaagatctcagaggaatggggtcaccggagcggagctgagtccttcccttctgcccacacttttccctgtgtgcaaatgtgccctcatttttcctttctggggaactgagttccaagatgcctgacttgcttcctgggcatcatccccttcattaagaggaagaactcatgggagatgggggaggggaagaagctgctgtgaggcgaggggtaagcagggctggggcaccatccctacccacagcgatgccacctcccccacgtaccctgcctcccagtggctgaccaagggtgggtagggggaggcgtctgaggcttgaggtatttgccccatgcccaagtgaggctgcctcccggtggagggctgagtcgttcttggggacttccttagactgagggactattgtaaaggaaacagggcctggagaggggactgagagcagaggtcagagggcatagggaggaggtggcatggggtgtattagaggaggggcttctagaaaagagggtacagggacaagatgggccaagacttttctccctcgggtctcctgaagctggctgtgaggggagggtctcggagtaccgcgccagtcttgaaggggcagcatgcctaccccctcctcaaaacttcctgttagccgcctcctccccatccccaccgacactgacatgctggggatcgggcaatctgtgggactagggctccctcccaccactcttctcccacccgggttaccgcctgctctgcaccgcgcagcgccagtcagggctttagccaatcagcaaggcggtcacggcggctgagccttcccattggctggttcctcagagggcgctcctcgactcccgccttccccagcccggccaggctttggctggggaggcggtagacggcggcgtgtaggacgctccgggagtccccgggtctgggggccgccatggcaggcagcccaggcagcggggtctccttggagggtatatccctggagtcttctgaggaagcggagctccagagggaaggtagggaagggcgggccagatgggggcggggcagctggccccttagc

SEQ ID NO: 18197 - DNA, 2300 bp, Homo sapien
tgcctggcacagaagaggagcatcctattctgcatcaataaatgtttcttctcattctgtaactgcacaaggctgttgtgagaatgaaacaatttgtcaattgtaaggtcctgaacagatgtgagaggctggcattctgcaaggcctttattagagagatacttgttgaccgacgaatgcagtggggcagccgctaagaataatgagttgggctccacctccccaggtgggccagaatctgagatcccagactgtcctgaggatcctaaatggaatggaagatttgatgtgggtcgctatggaggtaataattgcttgattaagaagtaattaatatcttgtagagattcaagatccttcctcttccaaaatacaaatagctgagtgatttccagcccagaggtggacaggtgacagtggagggtagcctttataatggaaaggggaactcttcctgaattcaattataaggattttctaggccgggtgcagtggctcatgcctgcaatcccagcactttgggaggctgaggtgggcagatcacctgaggtcaggagttcgagaccagcctgaccaacatggagaaaccctgtctctactaaaaatacaaaattagccaggcatggtggcgcatacctgtaatcccagctactcgggaagctgaggcaggagaattgcttgaacccgggaggcagaggttgcgacgagccgagatcatgccattgcaccccagcctgggcaacaagagcgaaactccgtctcaaaaaataaaaataaaaaagaagaagaagaagaaggattttctagcttgcagatagaggaaagagctgcaagcaatgcgctccaagaaccctctttgtttagagaccaaagcctgcaattcctgtcaaagctatctgggttcgatggctttcttctctcagtaaaagcctgggtcacctaaacaatgtggttttcagcagttcggccgcctctgtggctttttcctatatccaaacttatacccttggaactcaggggagagctgagtcttggaacccagggaccagtcccctgctttcgggatagattcccatttctgagatttccaagcaagtttccagaatgtaatccatttcttttctttttgtttcttttgagacagggtctcactctgttgcccaggctggagtgcggtgttgcaatctcggctcactgcagcctcagcttcccaagtagctgggactacaggcgcgcgctaccacgcccagctaattttgtttattttattttttgtagcgatggggtttcactatgttgcttgggctagtctcgaactcctaggctcaaccgatgctcccgcctccgactcccaaagtgttgggattatgggagtgagccaccgcgcccggccaaagatgcagtccatttatgatcttaggaatccagttagcaaggaaaagggatgactctcacattttgttcagggcaactggacggggtggctgaacgccgaggtcggagaagtagcgtagctggccccaaatgctagtcgcactgcacagagcctcccgtatttggaggcccagcatcttttactagcagatgtggggtggagccggaggctgggcgaaggcgggccagtgggtttaaccctttatttactttttgggctgggactctgaggaaggctagccagttacttctttattccataggcaggaaaatggaccaggcctccctcacctagacctaaaagaggctctcgaatcctttcaggaagacatttcctcttttttgcaaaatttctggaaagtctggaatccggatatccaccctctgagtccttaaaaagctgcccctgatcccgaggccttctggggctggtatcctgcttcctgggagtctctctgaagtcctcctattctttttctcaatatggaagcaggataacgaggaaaagtgaggcacgcctggaactagaacgccggtctaagccaagatgggtgggcggagtaatcaagccggtctcattaggcacttttaccatcgcccctttaagggatccttgggagccgaggggcaccagcgggtactggtaccagtcctgcctccctaacccttcccagtgggactccagcagggcgtcgtggtctgtgcggtgtctcccaaaccactacctggctgcccccgtaccagctgctgggaaagactacttcctccgagttgtgccggcctccgcgttctcctcacctcccctctcctccggacctccgccccctcgcggagaggccttgccgctttaagagccgggctagcga

SEQ ID NO: 18198 - DNA, 2300 bp, Homo sapien
taatcttgaactcctggtctcagggaatcctcccacctcagcttcctgagtagctgggactacaggtgtgcatcaccacacctggctctaggtgctcagttaatacaaggtgcagaatctctgggaggcagggcaacacaatagtggtttgtaacgttccccaggtgattcccatatacagccaggcgaggcctgcccggcaactacatgcagagaggacccccgaggcctctttcctcagaaggtagctgtggtcatggagggcactcagggtggcaaggcctgctcctgaaaaagccgtgaaaacccagaggagatggaagagaagaggccaccaacaaaggatggccccaacagtgcttcccagtgcccaccctgcaaaaggggcttctgtttagtactaaggacatggagttcagagaggctgataactggcccccgaccacacccagccagcagctccagggtctctagtcctcacagtccctggcattgcatctgagagtaggggcagagctaatgccatcagtaggagtcacttttgtcccctaacttaggggagactgtcctgtccttacaaaggaatgtgtaagcacagctgatcaacatctgcataaggaaagatgtttctttatgcatttctggctccatcgagactcgtgactcaaccagtcctgtggctgccaaccagaagcagactcagcattcaaggaccattttccatacccctatatctgcatgcccaaccaatcagcagcacctctaccctaccctagaccctgcccaccaaactatctttgaaaaactaatcttcaagttttgggggagaccgatttgagtaataactatttcctgtgtgcccggccttgtgtcaattactctttctttactgcaatgccatggtctcagtggattggttttgtctgtgcagtaggcaggaagaacccatcaggtgattacagtacctgcacccccaacctgctttgggaagaatccagccaaaaaacttgaggcctgcagcctcagggtgagaacaagacaaaagggggatggagggagattgactcgctgtgtctcagctccagagcagcccccctgcagcctcccaagggtttatgcaaatcatcaaagggattccttgaggcaaaaggtttgagtctgcagttctgagacccccaaggatgtgaggagagacccaggcctatctcctttgggaggggccccaaacttgggggaagggatactggatgccaactgaaacccaaacataaaattctaagctcacccaaccatctgaatggactcctcctctccactcagcaaagggcattccaaagttaacctgaaaactagttcaggccatgatgggaaggggagcccagtcatgcctaattatacgatccctccttttggacttactgatagaacagactctttaagtctgaaaggaaacatttacagtctattctctctgaagcctgccacctggaggcttcacctgcgtgataaaaccttggtctccacaatctcttatcttaacccaaacattcctttctgttgattttaagtctttagacagtaatttaactctttccaccaattgccaatcagaaaatctttcgatctacttataacctggaagtcgtccacttccccaaccccattccagttgtccagcctttccagatcaaaccactgtacatgtcgcatatattattgatgtccgatgtctccctgaaacacataaaaccaagttgtggcctgatcaccttgggcacatgttctcaggatctgctgaaggctgtcatgggccattggtcatgcatagtaggctcaaaataaatcccttcaaatattttacagagtttgactcttttggttgacacaccaagctcaagcaggaagaaccgggctcaagaactgtctctctcctttctctctgttaggcatgggggggaagggagtgttgtgttaggcatgcggaggggaagggaacagggttgtgtgcagaggaaaatgcaaattcttaccttgtcagggtctctgacctgatggcgacccgtggtggagtcttcacagagacagataccactgcaagggcagacccagactgtgcaacccccaaagcaggtctcctcactcaccgggatagatagaactatcggccccaattcctcagccctacctgcaaccaccgcttgccatggtttccttgtgggtggagggtactttcccgccccctggtttcgggcttgcccacgtggcttgctctggccatggaatgaagcagaaacgaaagc

SEQ ID NO: 18199 - DNA, 2300 bp, Homo sapien
agatccctggagtttcacctccagtcccctcttccccaacagtcccccccatctcccaacttcttggtatactgatctgggacagcagaacgtcagcagtcataagtccttagctccgtacttggtgtcaccgtgtcattcagacacagccagttaccactccttggcctaagcaggggagggagactgggggttgggaagagacgctgggcaggggagactcaggggcttctggtggggatggattagtggggttgagaatctaagccagaattcggaacctcggtagctatgagatcttgagcaagcgtctttacctctgtgagcctcaggtttctcagccaaaaagtgggaaattataacaatactttgacggccccacttaggaaaaaaaacagtccaggtttggagttaaattttggggtctgactggctgtggggtttggggccagtgatttgacatctctgagcagatttcagatcctgaatctgtaaaatgggttgttgtggggatttagtgaggtgactgagctggcagcactttggaaaatgtgaggctttacaaatgaagctggtttttagcacttccctggaatgggggctctgagatggggagggaaatggatactggaaaccggcacccccctcaacatttcccctgaacccaggcacatgagttctcattctgcatcctatgcacccaccaaatgggtttctccaagcctggcaccccactcctttccaccttgcctgaggacctgaggccccttccctcttcccaccttgttctagttgcaagctgcagaggatggcctgagtttccattcttcagcctggaggctctggctgtagcctcagtcttccagctgcagcctcaatcttctgccccaagagaatccgttggatgatttgggttgatctttgggaggcaggagagctagttccaaggcctgtgaccaaaacctttcagtcactctcgagtcccagaaccccatctttcttgaaccaagcctgctctggtgcccaaagggaaggggtgtcagtgatgggggcccacaggagacttttactgtggtccagttttatctgttatgctgctggtctggcacccacagaactgccctgtccccctcccgtctctggcctcagtactggcgttgccagtatgaggagacagtgagaggaggggtgagggcttcggagtgagagaggctgacaggaggcggggactctggggggctgaggactataaagcggcccagccgagggcaggggcccatccggcctgaggcaggtgctcgcttggtctagtgcccatttactctggactccgggtaagtgggctcagcctgcctggggctctgggggcctcccccaggctggggcctgggatggagaggaggtggtgctttgcagggccaggggccttgggaggcctaaggtcctgcttgggtcttgctttctgcatctggacagacctgtcacgctagaagagccgtctgctgactgcacgtgtgtgtgcacactcgtgtgcatggctgtgaactggaatgtgtgactgtgaccttgtgagtgactggggtccctgtgtgagtgcctttgctggtctgtgcaggacgacatggacagtagcgtcttctccaggaccgatatctgtgtctctatcgcagggtggagggccagacccacaaggccatggatttctgtccttggcttcccgagttcattctgtgtcccccaccctgtgggtgacctggcatgcccttattcccactagctgctgcctcctgggagccatgaggccctggatgtcatgagtcccgtgtctccaggactcacatccccattttctctgctatacttttctaacttgcgaggccctggcttgctgggctgctcacaggacaggctgtccgtgccttcagagcagtgtctaggaggtggagtggccagcttggagtggccctttgctctgcccccttgtccccaggcttggagaaatggatgatgggctaaggggctggatagttgggccctgcttcctgggcacgggaaaatctgcagcccgggctctccacctcccctctgcttgctcctcagatggctgccgcacgcctctgcctctccctgctgctcctgtccacctgcgtggctctgttactacagccactgctgggtgcccagggagccccactggagccagtgtacccaggggacaatgccacaccagagcagatggcccagtatgcagctgatctccgtagatacatcaacatgctgaccaggcctaggtgtgtgcc

SEQ ID NO: 18200 - DNA, 2300 bp, Homo sapien
agcagtatgagaaggaactaatacacatggccatgcagtgtagaaagcacatctactaccacttcctcctggattgtcaccacatccctgagaggacccagaagaggaatctgttgtttgcaaaggagaaaaatgaaagctacggtttggttgacatttgtggagtgcctgttatttcttaggcacttaggtttacctctgcgacaggatagaactgtaagtggccctggcatctgagtcaatccctagatccattgtctgttgggtggggctgggtccccacatgagtagcagccagaacaggtccctccaaggccatggtcctgtgggagctcagatccttttaactagggttggagcctggcgccctctggcggcgagctgcaacctctacccgccaaacccaaggccaggctgagaccagccaccaattcacacccttgttttgcaagtggaaaacctcagtccagagaaaggcccgggcttgctgagacagaatgactttcgtatttgctttgtggaatgtaagttgtctggtgaagcattattgctcttcttgttaaccaaaatcaaaattgagagggtcaaggcagaacactgatgtttgctgagccttcctttattctccctatcttcagatgggtgtgatgagcctattttactgagaggaaaagtgaagctcagagaggctaaagaaattactttcccaggctcacagagccagccaatgcagagccaggatttggacccaggtctgtctgactctaagcccaccctgccagatccctggagtttcacctccagtcccctcttccccaacagtcccccccatctcccaacttcttggtatactgatctgggacagcagaacgtcagcagtcataagtccttagctccgtacttggtgtcaccgtgtcattcagacacagccagttaccactccttggcctaagcaggggagggagactgggggttgggaagagacgctgggcaggggagactcaggggcttctggtggggatggattagtggggttgagaatctaagccagaattcggaacctcggtagctatgagatcttgagcaagcgtctttacctctgtgagcctcaggtttctcagccaaaaagtgggaaattataacaatactttgacggccccacttaggaaaaaaaacagtccaggtttggagttaaattttggggtctgactggctgtggggtttggggccagtgatttgacatctctgagcagatttcagatcctgaatctgtaaaatgggttgttgtggggatttagtgaggtgactgagctggcagcactttggaaaatgtgaggctttacaaatgaagctggtttttagcacttccctggaatgggggctctgagatggggagggaaatggatactggaaaccggcacccccctcaacatttcccctgaacccaggcacatgagttctcattctgcatcctatgcacccaccaaatgggtttctccaagcctggcaccccactcctttccaccttgcctgaggacctgaggccccttccctcttcccaccttgttctagttgcaagctgcagaggatggcctgagtttccattcttcagcctggaggctctggctgtagcctcagtcttccagctgcagcctcaatcttctgccccaagagaatccgttggatgatttgggttgatctttgggaggcaggagagctagttccaaggcctgtgaccaaaacctttcagtcactctcgagtcccagaaccccatctttcttgaaccaagcctgctctggtgcccaaagggaaggggtgtcagtgatgggggcccacaggagacttttactgtggtccagttttatctgttatgctgctggtctggcacccacagaactgccctgtccccctcccgtctctggcctcagtactggcgttgccagtatgaggagacagtgagaggaggggtgagggcttcggagtgagagaggctgacaggaggcggggactctggggggctgaggactataaagcggcccagccgagggcaggggcccatccggcctgaggcaggtgctcgcttggtctagtgcccatttactctggactccgggtaagtgggctcagcctgcctggggctctgggggcctcccccaggctggggcctgggatggagaggaggtggtgctttgcagggccaggggccttgggaggcctaaggtcctgcttgggtcttgctttctgcatctggacagacctgtcacgctagaagagccgtctgctgactgcacgtgtgtgt

SEQ ID NO: 18201 - DNA, 2300 bp, Homo sapien
gtctcagcaagcccgggcctttctctggactgaggttttccacttgcaaaacaagggtgtgaattggtggctggtctcagcctggccttgggtttggcgggtagaggttgcagctcgccgccagagggcgccaggctccaaccctagttaaaaggatctgagctcccacaggaccatggccttggagggacctgttctggctgctactcatgtggggacccagccccacccaacagacaatggatctagggattgactcagatgccagggccacttacagttctatcctgtcgcagaggtaaacctaagtgcctaagaaataacaggcactccacaaatgtcaaccaaaccgtagctttcatttttctcctttgcaaacaacagattcctcttctgggtcctctcagggatgtggtgacaatccaggaggaagtggtagtagatgtgctttctacactgcatggccatgtgtattagttccttctcatactgctttgaaaagaactgcccgaggccaggcgcagtggctcacgcctgtaatcccagcactttgggaggctgaggcaggcggatcacctgaggtcaggagttcaagaccagcctggccaacatggtgaaaccccatcactactaaaaatacaaaaattagccgggcgtggtagcgcatgcctgtaatcccagctacttgggaggctgaggcaggagaatcacttgaaccagggaggcagaggttgcagtgaaccgagatcgtgccgctacactccagcctgggctgtaacagagtgagacaccatctcaaaaaacacacaaaaaacaaaaagaactacctgaaattgggtcatttataaaggaaagaggtttaattgactcacagttcagcatggctggggaggcctcaggaaacttaaaatcatggtggaaggcgtaggggaaacaaggcacctttctcacaaggcggcaggaaggagaagtgctgatcaaaggggagaagagcaacttataaaatcatcagctctcgtgatgactcactcactatcacgagaacagcatggggaaaactgcccccatgattcaatgacctccacctggtctctcccttcgcatgaggactacggggattacaattcaagatgagatttggtggggatgcaaagcctaactacatcactatgtctagaacacagcaatggttctcactcatcttgatgtgttcctgtcagaggcgtttgaaccacagcgactccatcttgaacaagggctgggtaaaatgaggctgcaacctgctgggctgcattcccaggaggttagacatttttagtcacaggacaagataggaggccggcacaagatacgggtcacaagaccctgctgatagaatgagataaagaagctggtaagaacacgcaaaaaccaagagggtgatgagcatgaccgctgattgccctcactgatttttctttttttctttttcagcagagatgaggtttcaccatgttggcaaggctggtctcaaactcctgacctcaaatgatctgcccccatcggcttcccaaagtgctgggattacaggcatgagtcaccgtgcctggcctcgctgatcattatacactaattataatgcattagcatgctaagagatgctcccaccagcatcagacagtttacaaatgccatggcaacatctggaagttaccctccatggtctaaaaggaggaggaaccctcagttctgggaaatccccaccccttttctggaaaactcatgaataatccaccccttgtttattagtatatgatcaagacataaccataaaaatagccaaacggcagccctgggggctgctctgcctatggagtagccataggcttttatttattgattgattttgtagcgatggaggctcacttttttgcccaagctcaaacaatcctcctgccttggcctcccaaaatgctgagattacaggcatgagctaccgcacctggcccttgtttccttacttatctaataaacttactttcactctactctgcggaatcaccctgaattctttcttgcatgagccccaagaaccctcttttggggtctgggtcaggacctgttttcagtaacattcccacagtgcttgccacagagccctgcttaaagaaagcaccagttcctggcctgcagacccactaaatgaagatgatagtggtacctcttcccctgcccaacaccacgccctctggcacaaggtggatggccactggcagtgatggggatggagtaagtgctatgagactaggagaggaacaccc

SEQ ID NO: 18202 - DNA, 2300 bp, Homo sapien
gtgcccagcacatggacacagtatgaagtaacattgaatcatatcctgtgaatgttttcaagcctttcaactcctttccaaaacttgcttaacagcatggatctggagcagaactgcttcctagaccagctccacggcttgtgagctgagtgaccctgatcctcacatatttctgtacctccattttctcatctgtaaaatgggaataatgataatagctatcctggagtcactgagaggattaaatgaatgactatttgtgaagtcctttgcatagtgcctagcattcgacatgtgttagctattcctctaccacacagaaggctttgcttggtgctagggtatctttaacacatggcacctgctaaccttccatgttaccaagaaagcaggcaagctatgcagatggaatataatggaatgtaataacattgttttcctctcacttgattcttttttaattttgattttaattttaattttaatttttttgagacagggtctcattctgtcgcccagacgggagtgcagtggcacagtctcagttcaccgcaatctcctcctcccaggctcaagtgattctctggcctcctgagtagctgggattacagaaacatgccactactgcctggctaatttttgtatttttagtagagatggggtttcaccatgttggccaggctggtcttgaacttctgacctcaaatgacccacccgcctcctcacttgattcttaaggcttatggcaagtgatactggcctagttacagacctaacatggataaactttaagtttaaaaaggttaaagagggccgggcgtggtggctcacgcctgtaatcccagcactttgggaggctgaggcaggtggatcacgaggtcaggagtttgagacaatcctggccaacatggtgaaaccctgtctctactaaaaatacaaagattagccgggtgtgatggtgtctgcctgtaatccctgctactcaggaggctgaggcaggagaatcgcttgaacccagaaggcggggattacagtgagccgagatcgcaacactgcactccagcctgggcaatagggtgggactccatctcaaacaaacaaacaaacaaaaaaaaaaaaaaaaaaaagggttacagaggtcgagtgaagtagctcacacctgtaatcccagcaccttgggaggcagaagtgggaggactgcttgagctcaggagttcacgaacagtctgggcaacatggtgaacacccgtcttcaaaaaaaataatttttttttaaatcagctgggcatggtggtgtgcatttgtggtcccagctactagggagactgaggcaggaggatcatttgaacctgggaggtggaggctgcagtgagctatgattgcaccactgtactgcagcctgggcaacaacagagtgagaccctatctcaaaaaccaaaataaaaaactctattttattttatttttaccagatgtgatattcgataaagaaaagcattaacactaaagtattataagttttgaggggtgttttgaggatatcacagaattcctcaagctggtacccagtgactggagtttggcaaaccctggtaacctcatggtcattcattaggatcttttttgagctcaggcaacaggacagacaaggccagcaccacccgcccccgccctcccactgccccccttcttctactctttccagcgccctccttccagccccctgcccagccctgtgctcaaagccacctacagtcccttcttctctggtcagaatgccaatcatccaaggccctgcagactcccaaagccgcccctggaacctaccttggcagcagattaaagacaacccgccacatttagtctcggccccatgaccgatagtgggttcagttcctccaggggcgggggagcctagtggccccgccccctgactcatggcctgaccctcctcaaacgcacccagaggagactcctggtcccctgtccggaccccgccccgaccaggtccagccccgcccaacggcaagttaagagccccccagtgccagacgctccagacagactgccactcttggggggcaagagttggttgtcgtcatggcgacggcgctgatggctgtggttctgcgggcagctgctgtagccccgaggctgagaggccggggaggcactgggggcgcccgaaggctgagctgtggcgcgcggcggcgggcggcgaggggcaccagcccggggcgccggctcagcaccgcctggtcgcagccccagcccccgcccgaggagtacgcgggcgcgga

SEQ ID NO: 18203 - DNA, 2300 bp, Homo sapien
ccactgtactgcagcctgggcaacaacagagtgagaccctatctcaaaaaccaaaataaaaaactctattttattttatttttaccagatgtgatattcgataaagaaaagcattaacactaaagtattataagttttgaggggtgttttgaggatatcacagaattcctcaagctggtacccagtgactggagtttggcaaaccctggtaacctcatggtcattcattaggatcttttttgagctcaggcaacaggacagacaaggccagcaccacccgcccccgccctcccactgccccccttcttctactctttccagcgccctccttccagccccctgcccagccctgtgctcaaagccacctacagtcccttcttctctggtcagaatgccaatcatccaaggccctgcagactcccaaagccgcccctggaacctaccttggcagcagattaaagacaacccgccacatttagtctcggccccatgaccgatagtgggttcagttcctccaggggcgggggagcctagtggccccgccccctgactcatggcctgaccctcctcaaacgcacccagaggagactcctggtcccctgtccggaccccgccccgaccaggtccagccccgcccaacggcaagttaagagccccccagtgccagacgctccagacagactgccactcttggggggcaagagttggttgtcgtcatggcgacggcgctgatggctgtggttctgcgggcagctgctgtagccccgaggctgagaggccggggaggcactgggggcgcccgaaggctgagctgtggcgcgcggcggcgggcggcgaggggcaccagcccggggcgccggctcagcaccgcctggtcgcagccccagcccccgcccgaggagtacgcgggcgcggacgacgtctcccagtcgcccgtcgccgaggagccgtcgtgggtgccgagtcccaggcccccggtgccccacgagtccccagagcctccttcgggccgctcgctggtgcagcgggacatccaggccttcctgaaccagtgcggggccagccctggggaggcgcgccactggctcacgcagttccagacctgccatcactccgcggacaagcccttcgccgtcatcgaggtgagcggagcccggcgtgggccgtgacgcagcgaggggatggggttgtgcggccacctgtcctcaggcatggcaggatacgctgcgggctctgcgcagcggaagcgggaaggagcccggcagggcccagaccagcgccgccgggaatgggagaggccgtaagctcctccggaagcctcccgcccagcccgagtgaggatcctgggggaccccacccgccaggtgtgatgctctgaagaaggcccccaacatgggcgcagttaggggttcagaaggacctggacaggagccgcttgcactgcccctcccccaaagatgtcccggagtccaaggtcggagggaggagggcgggaggtaccccagcgtgagacaagggagtggcaagacccaacggggcaaagggcggagcaggtgggcactggtggccagaactgggtcctgacagcttctggaagggtagggtcaccgagacggccctgcaggccaggctgtgggagccagcggctcaggtccgtgtcacgctccttgaaagcccactcctccgcaggtggacgaggaggtgctcaagtgccagcagggcgtatccagtctggcctttgccctggccttcttgcagcgcatggacatgaagccgctggtggtcctggggctgccggcccctacggctccctcgggctgtctttccttctgggaggccaaggcgcagctggccaagagctgcaaggtgctggtagacgcgcttcgacacaacgccgccgctgctgtgccattttttggcggcgggtctgtgctacgcgctgccgagccggctccccatgccaggtgagtgcccgccctgcccgcccaggcgtcctcagagcgtgctactctgcccgccctgccccgtccggcaggcctggagggggccctctcgagcaccacgtctggcccacagctacggcggcatcgtctcggtggagacagacctgctgcagtggtgcctggagtcgggcagcatccccatcctgtgccccatcggggagacggccgcgcgccgctccgtgcttctcgactccctggaggtgaccgcgtcgctggccaaggcgctgcggcccaccaaaatcatcttcctcaataacacaggcggcctgcgcgacagcagtcataaggtgcggccct

SEQ ID NO: 18204 - DNA, 2300 bp, Homo sapien
accaggtccaggtcggcgggcaggttcacgttactcaggacctgtgtccggagtcagcgggtgagcctggcccacagccggcacggactgcccccctacccccacggacctctcttttctctgacccctttatccttacttccgcccggagtccttagccagggagggcgcagatctgggcacccagggctgaactcctcccctatactcccttaggcttttctacccacccggcttgctagtgagtctgcggcccgtcggggagaagtgcgaggggcgcaagagaaggcccggatcgccggcgtgggggaaggtgaaagaaagggccgcaccttatgactgctgtcgcgcaggccgcctgtgttattgaggaagatgattttggtgggccgcagcgccttggccagcgacgcggtcacctccagggagtcgagaagcacggagcggcgcgcggccgtctccccgatggggcacaggatggggatgctgcccgactccaggcaccactgcagcaggtctgtctccaccgagacgatgccgccgtagctgtgggccagacgtggtgctcgagagggccccctccaggcctgccggacggggcagggcgggcagagtagcacgctctgaggacgcctgggcgggcagggcgggcactcacctggcatggggagccggctcggcagcgcgtagcacagacccgccgccaaaaaatggcacagcagcggcggcgttgtgtcgaagcgcgtctaccagcaccttgcagctcttggccagctgcgccttggcctcccagaaggaaagacagcccgagggagccgtaggggccggcagccccaggaccaccagcggcttcatgtccatgcgctgcaagaaggccagggcaaaggccagactggatacgccctgctggcacttgagcacctcctcgtccacctgcggaggagtgggctttcaaggagcgtgacacggacctgagccgctggctcccacagcctggcctgcagggccgtctcggtgaccctacccttccagaagctgtcaggacccagttctggccaccagtgcccacctgctccgccctttgccccgttgggtcttgccactcccttgtctcacgctggggtacctcccgccctcctccctccgaccttggactccgggacatctttgggggaggggcagtgcaagcggctcctgtccaggtccttctgaacccctaactgcgcccatgttgggggccttcttcagagcatcacacctggcgggtggggtcccccaggatcctcactcgggctgggcgggaggcttccggaggagcttacggcctctcccattcccggcggcgctggtctgggccctgccgggctccttcccgcttccgctgcgcagagcccgcagcgtatcctgccatgcctgaggacaggtggccgcacaaccccatcccctcgctgcgtcacggcccacgccgggctccgctcacctcgatgacggcgaagggcttgtccgcggagtgatggcaggtctggaactgcgtgagccagtggcgcgcctccccagggctggccccgcactggttcaggaaggcctggatgtcccgctgcaccagcgagcggcccgaaggaggctctggggactcgtggggcaccgggggcctgggactcggcacccacgacggctcctcggcgacgggcgactgggagacgtcgtccgcgcccgcgtactcctcgggcgggggctggggctgcgaccaggcggtgctgagccggcgccccgggctggtgcccctcgccgcccgccgccgcgcgccacagctcagccttcgggcgcccccagtgcctccccggcctctcagcctcggggctacagcagctgcccgcagaaccacagccatcagcgccgtcgccatgacgacaaccaactcttgccccccaagagtggcagtctgtctggagcgtctggcactggggggctcttaacttgccgttgggcggggctggacctggtcggggcggggtccggacaggggaccaggagtctcctctgggtgcgtttgaggagggtcaggccatgagtcagggggcggggccactaggctcccccgcccctggaggaactgaacccactatcggtcatggggccgagactaaatgtggcgggttgtctttaatctgctgccaaggtaggttccaggggcggctttgggagtctgcagggccttggatgattggcattctgaccagagaagaagggactgtaggtggctttgagcacagggctgggcagggggctggaaggagggc

SEQ ID NO: 18205 - DNA, 2300 bp, Homo sapien
ccgcccaggttcaagcgattctcctgcctcagcctcccaagtagctgggactacaggcgcccggagtagctgggattacagccatcacgtctggctaatttttgtatttttagtagagacggggtttcaccatcttggccaggctggtcttgaactcctgacctcgtgatccacccgactcggcctcctaaagtgctgggatcacaggcgttagccaccgcgcccagcccaacaccttttcatttatctgtacagcacatatttcctgagggcatcctgtatactaggtcctgagggcatcctgtatactacagatggttcccagcattggagttttcaactttacattggtgcgaaagcagatctgcattcagtggaaactgtatttctcttacaatgctgggcagtgtcagcaagccacagcttccagtcagccacacattttcaacttacagtattttcaacctatgatgggtttatcaggatataactccatcacaagtcaaggagcatctgtaaacagtaaacagaaacccaggcaccgtgtttgtgcttagggagcttgcgatctagtaggggaagattgtcaataaaacaatcacaaatatattggctgggtgcggtgtctcacgcctgtaatcctagcgctttgggaggccaaggcggttggatcgcttgaggttaggagttcgagagcagcctggccaacatggtgaaaccctgtctccactaaaaataaaaattagccgggtgtggtggcaagcgccagtaatcccagctacttgggaagctgaggcaggagaatcgcttgaacctgggaggtgtaggctgtagtgagccaagatcgcaccactgcactccagcctgggtgacacagtgagaccctgtctcaaaaataaaaaaaaagcatatatatgtaaagcagatatatatatatgtgtgtgtgtgtgtgtgtgcgtgtgtatctatatctatctatctatctaattgccaccgtgccaagtgattcaaaggaaggtagctgatgttatgagaacatataaacgggtggggcgtgggagaaggggctgagaacacactggaggggaatgcagagaccacctggatgtctgctgcaattaaactgacaaagtatgacaatttgggttacagcgggagcatggcagctggagaaatggactgacttgagatgtcccagatgttcagatctcctttttctctcagggcacaggcaaaaggcaaacccaaagaggtgactttgagccaggaggaccccttactttgatcttaacagaaacgggggtttcctctggtgcgttatgtgtatcatttattgaaccactactatgtactaggaccgaccttgtcacatttaaagttcacaactctggcctggcgcggtggctcatgcctgtaatcccagcactttgggaggccgaggcgggcggatcacgaagtcaggagatcgagaccatcctggctaagacggtgaaactccgtctctactaaaaatacaaaaaattagccgggcgtggtggcgagagcctgtagtctcagctactcaggaggctgaggcaggagaatcgcttgaacccaggttgcggaggttacagtgagccaagatcgtgccattgcactccagcctaggcgacagagtgagactccgtctcaaaaacaaaacaaaacaaaaaaaaaagaaaaaaaaagttcacaactctgaggtaggtgtaattatccccatttcatgatgagtctcataaagtttaggtgatgtgcccagaatcacacagggttggaatcaggattagggccctgatcgggctgcattcaaagaccagtttgcttcaatacatcatactacggtccaagacttctgctatcctgaacccactgttccttcctctagtctagttttcaaattcgcagggacaaatatggccctgaaggctccatgagcagacgagaaggctggacttcgcaactgggtcaccttagatccggaactagagaatgacaccgttgtttccgggaggaaaaagaaaaagcgcttgacccggaagctgcgtgtcccatccccgcgcctgcttctctgactggggtgaggccgcagcggactgccctttcccaagatggcgtcgaagataggttcgagacggtggatgttgcagctgatcatgcagttgggttcggtgctgctcacacgctgccccttttggggctgcttcagccagctcatgctgtacgctgagagggctgaggcacgccggtgagcaggcctacgcagccgctaaacgcggcag

SEQ ID NO: 18206 - DNA, 2300 bp, Homo sapien
ggatggtgaccaaattggtccttgcctgttttgggggagagtaagttcagggcagagtttgtatctgagctagggatagtggcttgtttcgctgatgcgtgtgtatgtgtggtgggggggctgtgctgatttttaggcttctcggtcatttggaagttgctgtttaggggatgtttgcactggaaacctgttccagagagggcttgccaggggcttatgtggtttggggatgtgtgagttacaggtgaaagagtgaagttctcatgctgccttgatcagtccagcacatggagtccttttacgtagtagcagcctcccttttgaaagtagcaatgttaaactgattggaaaaggtggcctgcttctttggggtggaagtgacttctgaattactccaggaaactcagtcttggaaatgaaacacttccttgttgggataaatgtgccacggcttccctttttatgtgagccacaggtgggtttattggaatttttttttggaggagtaattttttatggcatcttttttttttttttttttttaagatggagtctcgctctgtcgctaggatggagtgcggtggcgcaatctcggctcactgcaacctccgactccctggttcgagcgattctcctgcctcagcctccggagtagctgggattacgggcacgcgccaccacgcccagctaatttttgtatatgtttttttttaacagagatggggtatcaccatgttggccaggatggtctcgaacttctgacctcgtgatccgctggcttcagcctcccaaagtgctgggattacaggcctgagccaccgcccggcttttttttttgttgtgttttttgagacggagtttcactcttattgcccaggctggagtgcaatggcgtgatttcggcttactgcaacttccgtctcccggattcaagcgattcttctgcctcagcctcccgagtagctgggattgcaggcatacgccaccgtgcccggctaattttttgtatttttagtagagacggggtttcaccgtgttagccaagatggtctcgatctcctgacctcgtgatccacccgcctcggcctcccagagtgctgggattaccagcgtgagccaccgcgcggcctaagaatagttgcttttttaaaaaaataagaggttacacctggaagaaataagaccttttacattagtggtttagttggaagggtcttgtaactaggaattacttttttttttttttttttgagacggagtctcgctctgtcacctaggctggagtgcagtggcaccatctcggctcactgcaacctccgcctcccgtgttcaagtgattctcctgcctcaggctccagagtagctgggattacaggcatgtgccaccacacccggctaatttttttttttttggtagtgacggggttttgccactttggccaggctggtcttgaactcctgacctcaagtaatctgcccgcctcagcctcccaaagtgttgagattacaggcgtgagccatcacgtgagcctggctgaattactcaacttttacttgacatacagtaggctcttaaatggttggagaatgagtttgtgaatgaatgaatggattaactggctgggtcaccttgggtgaatttcctttccagtgtgtagttttctcctctgcaaaatgggaaagctcacatctgaaagagtaaaaagaatactgtgcagacacagagagtattatacgaagaacagaaaggtctagctcttttgtctggctcataggttcaagacaaacgcattaaatctgcattatgcctctccataaagccagtagagagaaagtgacagaactcctttggaagcttccaaggatttgggcaggaggaaggtgacaggcagagatttcctgaggagaaccgtgattcttataaggccctcatgctcctggcctgccttttacaagccttgtgtgaatcgtgttttctatgccccttttgggatgtgtcagtgcctctgcttgtcctatttttccttaacttttttttttctcaccagaatgtccctcttccagtggaaagcccaaccatgcagacatcttgctcataaacttacagtatgtttcagaagtggaaataattaatgaccgaacagaaacccctcctcccctagcttcactcaatgttagtaaggtaaggactcaagggcagatctggctctctaaaatggtgggaaagatgagtctcattgagtcttagtgatacattgttgtctattttttattttttaaaattgacttaaaattgtttg

SEQ ID NO: 18207 - DNA, 2300 bp, Homo sapien
tctgcctggaacatggccactctttttccttgccaatccttcaggtctcagtagagatttttcacttcctccaagaaggcctttcctaatggctcctagaagtcttatatgaaaacctataatcacgattccatataaaaagtggaaaactggaatggcaattatgtatgatttattatgggggccagaacaaggatgagaggcatgaaagttctctgaggccggccacatggctcacgcccgtaatcccagcactttgagaggccagccgaggcgggaagattgcttgagcccaggagtttgagaccagcctggccaacatggtgaaaccccatctgtactaaaagtacaaaaattagccgggcatggtggctcgtgcctgtaattccagctactccggaagctgaggcaggagaatcgcttgaacctgggaggtgcgggttgcagtgagccaagatggcgccactgcactccagtctgggtgacagagcgaggctctatctcaaaaaaaaaaaaaaaaaagttctctgaaaaagcacactatgaaggagcagaatttttattcctattataatgagtgtatcaatacttccaacaccaggaagtttatgtttcttggagggcaaggaaatacttttgaactttgttcaggttaagccgcgccaagactggccctttgcttccctctggactagagaaaggtcaacctgtttcttatacatgaagcgaggatccaaaatttctatagtgagcggtgggtgggttagcgacagccattggtggtagtagggcttgaaaatgcacgctcatagtcctttgcataagattaagaaaacgactgttttgtacatcagacggacattcaagggcaggggcgcaaaacccctcctccaagcccctttttgtcactatccgctgctcctcattcctgccttttgcctggctttctgggagagagggcaaaaagggagaaggggaagtgtcttgacttctaagagtgatgggtgactaagggggaactaccatttattaaagacctagtacatgccatgcacttatacccgttaccgcatttaaacctcctaactatgaggtaggtattattatgtaacagagtatagcagtaaatagcaccgtccttggaaataggcagactgtttttgctagttgtggaaccgtggacaagtttagtctaaaacttagtttatgtaaaaggaggacattgattcctacctcaaagggctgttagatgctcaagaagtgacaatacaaatgcctatgaagaaacaggatcaggtaatttgcttgctcaaggtcaggtgatttagtaagaggctgacctcggattctggttccagcttatctaactccacagccaatgttctttccactatcactcagtagttataatcatctttttttgtttgtttgtttgttttgagacagagtctcgctctgttgcccaggctagagtgcagtggcacaatcttggctcagtgcaacctccgccttccaggttcaagagatcctccagcctcagtccccctagtagctgggattacaggcacgcgccaccgtacccggctaatttttgtatttttagtagagacggggtttcaccatgttggccaggctggtctcgaacccctgacctcaggtgatccacccgcctcggcctcccaaagtgctgggattacaggcgtgagccaccgctcccagccttataatcatcttgtccaagtatcgttaagtcctctgaggctctgattcctcatatgcaaaatggggttaacatattttataaaattcattcattaaactcttgtgtggaaggtgtgcatataatggagactgcagctccctcctctttccccttttcattccacgtaggtcatttatccttaacttctaaaatggactctacaagcacttaaccgagcggacgcagctatacaaatacttttcagattcccctttatttcctcttctttcccactccacctaggatcccgccccaaccagcgccaggccacgccccggcgtgtgacgcaagcacgctccgtgcgcgccgtcgcgtcgcggcgctcactgggggcccggctttcgcccgctgctgccgccgccgccgccggccgcggctgcactcccaagatggcggctcctccgggcgagtacttcagcgttgggagccaggtgtcgtgccggacgtgccaggagcagcggctgcagggcgaggtggtagcctttgactaccaatccaaaatgctggctttaagtatccttccctgcgtgaagcccga

SEQ ID NO: 18208 - DNA, 2300 bp, Homo sapien
gaggttgcggtgagccgagatgggaccactgcactccagcctgggcgacagggcgagactctatctcaaaaaataaaaaaaaataaaaaataaaaaaggtgctgggcacagtggctcacccctgtaatcccagcactttggaaggccagggtgggtggatcacctgaggtcaggagttggagactagtctgaccaacgtggagaaaccaaaccgtgtctctactaaaaacacaaaattagctgggtgtggtggcacatgcctgtaatcccagctactcaggaggctgagagaggtgaatcgcttgagcccaggacgtggaggctgtggtgagccaagattgtgccattgcattccagcttgggcaacaagacagaaattccgtctccaaaaaaaaaaaaaggtgtaaaggagggaagctggatataaatcttcgtttattgcctttgtagtgaacagaatttttattcctattacaatgattataccaatacctccaacaccaggaagtttttttttttttgagacggagtctcgctctgtcccccaggatggagtgcagtggcgcgatctcagctcactgcaacctctgcctcctgggttcacgccattctcctgcctcagcctcccaagtagctggcactacaggcacccaccaccacacctggctaatttttagtatttttagtagagacggggtttcaccatgttagccaggatggtcttgatctcatgacctcgtgatccgcccgcctcggtctcccaaagtgctgggattacaggcgtgagccactgtgcccggacaataccaggaagtttttaattgccgaagagaaagcctacattgtttaccgagtctttgaggtttgccctcaaccttaagcagcctactcccacactccgctttgtaatatttctgacctatacattccttgaaatcaccaagttctctcctcttaggggtcctggcccgtgcagttccctctgcctggaacatggccactctttttccttgccaatccttcaggtctcagtagagatttttcacttcctccaagaaggcctttcctaatggctcctagaagtcttatatgaaaacctataatcacgattccatataaaaagtggaaaactggaatggcaattatgtatgatttattatgggggccagaacaaggatgagaggcatgaaagttctctgaggccggccacatggctcacgcccgtaatcccagcactttgagaggccagccgaggcgggaagattgcttgagcccaggagtttgagaccagcctggccaacatggtgaaaccccatctgtactaaaagtacaaaaattagccgggcatggtggctcgtgcctgtaattccagctactccggaagctgaggcaggagaatcgcttgaacctgggaggtgcgggttgcagtgagccaagatggcgccactgcactccagtctgggtgacagagcgaggctctatctcaaaaaaaaaaaaaaaaaagttctctgaaaaagcacactatgaaggagcagaatttttattcctattataatgagtgtatcaatacttccaacaccaggaagtttatgtttcttggagggcaaggaaatacttttgaactttgttcaggttaagccgcgccaagactggccctttgcttccctctggactagagaaaggtcaacctgtttcttatacatgaagcgaggatccaaaatttctatagtgagcggtgggtgggttagcgacagccattggtggtagtagggcttgaaaatgcacgctcatagtcctttgcataagattaagaaaacgactgttttgtacatcagacggacattcaagggcaggggcgcaaaacccctcctccaagcccctttttgtcactatccgctgctcctcattcctgccttttgcctggctttctgggagagagggcaaaaagggagaaggggaagtgtcttgacttctaagagtgatgggtgactaagggggaactaccatttattaaagacctagtacatgccatgcacttatacccgttaccgcatttaaacctcctaactatgaggtaggtattattatgtaacagagtatagcagtaaatagcaccgtccttggaaataggcagactgtttttgctagttgtggaaccgtggacaagtttagtctaaaacttagtttatgtaaaaggaggacattgattcctacctcaaagggctgttagatgctcaagaagtgacaatacaaatgcctatgaagaaacaggatcaggtaatttgcttgctcaaggtcag

SEQ ID NO: 18209 - DNA, 2300 bp, Homo sapien
ggagccattaggaaaggccttcttggaggaagtgaaaaatctctactgagacctgaaggattggcaaggaaaaagagtggccatgttccaggcagagggaactgcacgggccaggacccctaagaggagagaacttggtgatttcaaggaatgtataggtcagaaatattacaaagcggagtgtgggagtaggctgcttaaggttgagggcaaacctcaaagactcggtaaacaatgtaggctttctcttcggcaattaaaaacttcctggtattgtccgggcacagtggctcacgcctgtaatcccagcactttgggagaccgaggcgggcggatcacgaggtcatgagatcaagaccatcctggctaacatggtgaaaccccgtctctactaaaaatactaaaaattagccaggtgtggtggtgggtgcctgtagtgccagctacttgggaggctgaggcaggagaatggcgtgaacccaggaggcagaggttgcagtgagctgagatcgcgccactgcactccatcctgggggacagagcgagactccgtctcaaaaaaaaaaaaacttcctggtgttggaggtattggtataatcattgtaataggaataaaaattctgttcactacaaaggcaataaacgaagatttatatccagcttccctcctttacacctttttttttttttggagacggaatttctgtcttgttgcccaagctggaatgcaatggcacaatcttggctcaccacagcctccacgtcctgggctcaagcgattcacctctctcagcctcctgagtagctgggattacaggcatgtgccaccacacccagctaattttgtgtttttagtagagacacggtttggtttctccacgttggtcagactagtctccaactcctgacctcaggtgatccacccaccctggccttccaaagtgctgggattacaggggtgagccactgtgcccagcaccttttttattttttatttttttttattttttgagatagagtctcgccctgtcgcccaggctggagtgcagtggtcccatctcggctcaccgcaacctccgcctcccgggttcaagcgattctcctgcttcagcctccctagtagctgagactacaggcgcgtgcccccacgcccagctaatttttgtatttttagtagagatggggtttaactatgttggccaggctggtctggaactcctgaccttgtgatccgaccgcctcggcctcccaaagtgctgggattacaggtgtgagtcgccgcgcccggcaaaaaaaaaaaaaaaaaaaaaacttttcaagaacaaagttgattgaggtaggaagaaactaaggagacactgttcaacagtattctaggcaggacctcgcctagaatagctgagatttctattttctatgtgagttcccccagatgactgtttcaaactctgtcgcgggtgtgtgccaatcctcttcccataccaacactgttactatctcttggtttcatctgcctaagcagggttttggatggcaggaggatgggggtgggggaagcaagggaagaactggaaggaagtgtgactttgcgctatatgtgagaattcgcctttttagggaagacccctcaaaatcaagagacttatctgtcagcctccagattaatagcaggcgaattagaaagggggagtcttgaggctggggaggaaggagtgaactgattaggggtgtatgcaaatttaggatcccgcttcagctcccaggaggaggggctgtctgcagccttttctccaaaggatctcagatttatttatttttttgctgtttgtttttttttttttttttttggtgggtattggtgctggagaagagaggtccggtggggaaagaatcccggccctggagattatatatccgccttcgcatcagcggagcagggacgctgggagcgcgcgcggcccgccggctagtcagtcccctgacccggaaccgcactggtgccgccgctagccggctgcccacgtgcctgcaacagtggccacgtggggccctgaggaaacgcctttacaaaggtttgtcccctgcgctgcccagtagggaggaaaaccggaggagagcgcaggaggaaacagtaccggctggaggccggtcttgcaggagcgggggactgctgggggcggggcttggtggtgaccgctggcggggcggggcctggggctcagaggggtgggctttggagatcagagggtcgacgctgcttcgttgcctggactctggtttccgccctggagcaagccggg

SEQ ID NO: 18210 - DNA, 2300 bp, Homo sapien
aggaggggcccgacttggaggagcctggtgctggatacaaaaaagtgagccccgtccctggtcccagtccttggtcaccacccctctgtccttctccacccctgcctctgcccttgtctttccctctcccccatctgcagtttccaggctgtgcaggagcagctttctgtagagagcaaaaggggagtgggaaggaggccggtggggagaagggggagctgtttgtgttgatctcagagttgtgtctgtcctaggctgccagttccctccctgtgtctgtgatactggcctgcctctctgcttgtgtgtctgtgtatgcatgcgtcggtccctgtgcgtgcctgtgcgtgtgtgtacacacacgcccccgctgttactactgtctgcctcgcgcctagctggcactccattcattgcggacacagccgagccctccgggcctgactcatcccgcccccaccccgcccccgcccccacccctcccagcctcttacctcaatgctactctttgatgtgactcatcacatctcccccatccctccccatctcagaggagatgtgtctcctgtccctggagggagcaagtgggaggaggtgggggaaggagacttggaagaaaagggctggattggggccccactggaggccctgacagggcctgccctcacccctgtcctggctgagtctgacccaggccccctcccattctcccctccagctgttctcagatgcccagccgctgcagcctttgcaggtgtaccaggcgcccctcagcctggccactgtgccccaccaggccctgggccgtacccagtcctcccctgctgcccctgggggcatgaagagccccccagaccagcccgtcaagcacctcttcaccacaggtgagcccccaccaactgttaggtccttctgccaggcaccagagggcctgtgtgtggtgtctgccccatggcagggggaagaggctgctggggccccttaggcaccctgaaaggaggggacacaggccttcgttctctccctgtaccccagagctgttcatggtagcggcagggccttctgcctcagccgggagagtgggtagcgtctttctcaccccgctgaaggaaggactgccccacagcctgaagtgctgggtagagagagcctgctgtccctgttgggccctgaccttctaccttcccttccttctccctgtgaggtctgggatgagaccagagtcctcttccctatgaagctgccacaggctgggctctggggggacacagacgtgcctgagggtggccctgtatcacccgtggagagtaagacacgggtttggcaggagggggaaagcaggaggtgccgtgagaagggtgcagctgaggaggcacagctggcagagatgagactcatgcgagtgtccagggcagccttgctggggcttgaggagcagggaagcttctgataggcaataatggagcaaaggaatttcaggaggagtcaagagggggcaaaggctggagaggaaaggccaggtgcagtggctcacacctgtaatcccagcattttgggaggccaaggtgggaggatcacttgagcccaggagtttgagaccaacgtgagcaacatagtgagaccccgtctctttaaaataaaaaataaaaaaataggttgggtgcagtggctcacgcctgtaatcccagcactttaggaggctgaggtgggtggattacctgaggtcaggagttcgagaccagcctggccaacatggtaaaaccccgtctctactaaaaatacaaaaattagccaggcgtggtggcacatgcctgtaatcccagctactcgggaggctgaggcaggagaattgcttgagcccaggaggcagaggttgcagtgagccgagatcgtgccactggacctggccgacagagcgagactctgtctcaaaaaaaaacaaaagaaaagctaggtgtggtagtgcctatagtcccagctactcagaacgctgaggtgggaggatcgcttgagcccagggtggtgggggcagtggttgaggctgcagtgagccatgatagcaccactacacactccactccagcctgggtgacagagtgagaccctgtttcaaagaaaaaaaaaaaaaagctggagaggagagggggcaggtttgtggcagggtggctgcagtggccatggggaggtgtttggacctgggggttggagacagctccatgagccctgctgaggatcatggtagccaggctgggatcctgggcccagagcagtgctggctgacacataggtctgtggcccag

SEQ ID NO: 18211 - DNA, 2300 bp, Homo sapien
ataaaaaaattaaaagaagcaagtggagccacacatggtggctcaagcctgtgagcccggcactttggaggccaaggcaggtggatcacttgaggtcaggagcttgagaccagcctggccaacatggtgaaatcccatctctactaaaaatacaaaaattagctgggcgtggtggcgggcacctgtaatcccagctactcgggaggctgaggcaggaaaattgcttgaacccaggaggcggaggttgcagtgagccgagatcgctccattgcacccaagcctgggcaacagagcgacactctgtctcaaaaaaaagagaagcaagtggaattaatttcaccacatatatttaactcattatatccagaatattacaatttcggtaatacatatgcagttattctttctattttttaatttttgtagagacaggatcttgctatgttacccaggctggtctttttttcgagactgagtctcgctctgttgcccaagctagagtgcagtggcgtgatcttggctcactgcaacctctgcctcccgggttcaagcaattctcctgcctcagcctcccaagtagttgggattataggcgcctgccaccgcgcctggctaatttttgtatttttaatagagctggggtttcaccatcttggccaggctggtcttgaactcctgacctcaggtgatccgttcgcctcggcctcccaaagtgctgggattacaggtgtgagccgccatgctcatcctttttttttttttttttttgagacagaatctcactttgttgcccaggctggagtgcagtaagcaggatctctgctcactgcaccctccacctcctgggttcaagcttcaagcggttcttttgcttcagcctcctgagtagttaagactacaggcgtgtgccaccacacccagctaatttttttttttttttttttttttttttgagacgaagtttcactcttgttgcccaggctggagtgcagtggcaagatctcggctcactgcaacctctgcctctcgagttcaagtgattctcctgcctaagcctcccaagtagctgggattacaggcatgtgccaccatgcctggcttaattttttgtatttttattagagaagaagtttcaccacgttggccaggctggtcttgaactcctgacctcagatggtccacccgccttggcctcccaaagtgttggaattacaggcgtgagccactgcgcctggcctaatttttgtatttttagtagagacggggtttcaccatgttggccaagttggtcttgaactcctgacctcaagtgatccacctgccttggcctcccaaagcgctgggattacgggtgtgagccaccgcacccagctgcccaggttggtcttgaactcctgggctcaagccatccccctgccttggactcccaaagtgctgggattacaggtgtgagccactgtgcctggccaatatgcagttaccaatgagatattttggtttttgtttcatactctttgaaatctagtgtatacttcacacttatatcacatttcagtttagacaggttgtgtgcaagggctcagcagtcacatgtaactagtagctatgggactagacagcacaactttagacagcccttaagtaccagggctgtctaaagagccctggcaccagaagaggttctgcttgaaagatacatgatcctggccctagggcttcctagcctggcgggatccacggggaggatccatgatcagggaggccttgttgcacttagggagaaaagtcattgttcgttcagagggctcaagactaaatgtatactcagtttattcagttaaggaaatcgaagggaaaagatggtgaatccaggaaggcttgctggaggtggtaccttagagctgtgaaactcttcattcatggggaagaggaagaatggagctcaggtttgggtggggggtgcttcaggtcccccagggtttttcctgagtatataggtggtgatatgccagagggggttgtgggggcaagatgcagggtcggtgggagggcagtcaggtgccctgacaatggtgcttagtcatcacccccaactccgtagtgccactccacgggcagtccccactagtgacgggtgaacgtgtggccaccagcatgcggacggtaggcaagctcccgcggcatcggcccctgagccgcactcagtcctcaccgctgccgcagagtccccaggccctgcagcagctggtcatgcaacaacagcaccagcagttcctggagaagcagaagcagcagcagct

SEQ ID NO: 18212 - DNA, 2300 bp, Homo sapien
tgggtctcctagaatcctgcgtggtagcctttgggcctcaggcatgactggagtctggggctgggcccactaactccttcctgtctcttctgcccacagtggaggtgaagccggtgctgccaagagccatgcccagttccatggggggtgggggtggaggcagccccagccctgtggagctacggggggctctggtgggctctgtggaccccacactgcgggagcagcaactgcagcaggagctcctggcgctcaagcagcagcagcagctgcagaagcagctcctgttcgctgagttccagaaacagcatgaccacctgacaaggcagcatgaggtccagctgcagaagcacctcaaggtgagcgaggggggtgcggggggccgcccagacctccgatccccgcccgggcctggctcacttgtgcctccgttcccatgcccctgcagcagcagcaggagatgctggcagccaagcagcagcaggagatgctggcagccaagcggcagcaggagctggagcagcagcggcagcgggagcagcagcggcaggaagagctggagaagcagcggctggagcagcagctgctcatcctgcggaacaaggagaagagcaaagagagtaaggcagggcctcctgggacctcgtagggccccgcccgtgatgcctgcccctgccatggggggtctggccccaagcagccaggtcagttgtgccctgtcctgcaggtgccattgccagcactgaggtaaagctgaggctccaggaattcctcttgtcgaagtcaaaggagcccacaccaggcggcctcaaccattccctcccacagcaccccaaatgctggtaatggccctgggcaggcatgggtgggcataggtgagccgctcaggggctgcctggctataggatggcaaggggcttcttccccgtgcccatatacgggccctgcaatctctccttagagacaggacccccatccctggtttatttcctcattccttccccaagatccacgtcctcttcctatatacaaacgatttttcataaatgtagattgccaggtggcaggtccagcagactgggtgataacctagatctgcttccatccccaccccccccccaccccaggggagcccaccatgcttctttggaccagagttcccctccccagagcggcccccctgggacgcctccctcctacaaactgcctttgcctgggccctacgacagtcgagacgacttccccctccgcaaaacaggtgagtgagtcccccacctggcctcccagaatatggctcctgggaggcagaggtgggcttgtggcagtgtcagccctgaccccagtgggctcagctgcagatgtgtgctgctgtgcgcgtatctgaacctcggttaccttctctccagcctctgaacccaacttgaaagtgcgttcaaggctaaaacagaaggtggctgagcggagaagcagtcccctcctgcgtcgcaaggatgggactgttattagcacctttaagaagagagctgttgagatcacaggtgccgggcctgggggtaagggctgctctcatgtacctgttctgagggtctgggaatcaggggtcgggggtagttcacagcaggcccaggtgacagccacttctcctatagcgtcgtccgtgtgtaacagcgcacccggctccggccccagctctcccaacagctcccacagcaccatcgctgagaatggctttactggctcagtccccaacatccccactgaggtacaggcctggctgggggctggtggggcggggacagagttgctccttcccatggaagaaagagtgcagctccttccagtctgtctgcctgagtgcccagcagagacctctctgcccacatgaataggctggaggatccttgcttggacttaattgcattgaaggggaatttgtcccacaggactatgaagagccctgatggctcagtctccctcagtgggagctcagggtagagggaactgggcaccattcagagaccttggccttggccccaggttgccctcccttgttgcctcccctttgtgcactctcatgcctgtctcttctgactgctccccagatgctccctcagcaccgagccctccctctggacagctcccccaaccagttcagcctctacacgtctccttctctgcccaacatctccctagggctgcaggccacggtcactgtcaccaactcacacctcactgtaagtacagggcatataccccatcttccctctggtgttgaggtcacaggtcctgcatgcccccag

SEQ ID NO: 18213 - DNA, 2300 bp, Homo sapien
ccccctgctgttacccttcttcctgtctgattccctttcctttcctgtctcctcctcccacctcctccctgctgcctgcccgcccatcctcttattccccctccccccaggcacagctgctgtttggctcactctatatatagcggcattttcagggtaattacaataaaactgttgaaaggagataatccagcaaaggaagcgagtcttgactcccagccccctcctgtccctggcttggtgcagccctgcaccccctttccccgaggcctcctgttcccaccccacccccattcccacagcctctccctcctgcccagtctgccccagatagggatgaggccccagaaggggacagagggtagagatatccagaaggtctccaccagcctctcctggggttaccaagggcactgtcagtcctagaaccaacctctgtgcctcagtttctcttctagtatgaggctttgcatggggcacggtgttgagaaatgggagcgggcacagtggttaaaagcttaggatttggactcatattctagttattggatcacctagctgtgtctggttgctacttaaacttctctaaacctcagtttcctcatcagtaaaatggggtaataatagcatctaagtcatagggtaactgtgatatttaaatgagtcattgtaaaatgcccagagatgttgactatcaatgataatattatgtgttgaaggctgggcagtggctcacgcctataatcccagcactttgggaggctgaggtgggaggatcgcttgagcctaggagtttaattcagcctgggcaacatagtgagaccctgtctctactaaaaaattaaaaattagcctggtgcattggcatgctcctgtaatccctgctacttgggaagctgaggtgggagggttgcttgaggtcgaggctgtcatgagccacgatcatgccattgcattccagcctgggcgacagagcaagaccttgtctctgatatatatataggtagagagataaatacacacacatatgtatgtgtgtgtgtatatatatatatacacacacatacgtacacacatatatatacacacacacacacagatacataaaatgcgtcgagtagtcacaatctgtcaggtacagcttcatgcttatgcacattttctttatttttttgagatggaggctcgctctgtcgcccaggctggagtgcagtggtgcgatcttggctcactgcaacctccacctccagggttcaagcgattctcctgcctcagcctcctgagtagctgggactacaggcgtgtgccaccacgcccagctaattttttttgtttttagtagagacaggatttcaccatgttagtcaggatggtcttgatctcctgacctcgtgatctacccgcctcagcctcccaaagtgctgggattacaggcaagagccaccgcgcccggcctccccctttttgttttttgttttttttttttctggagacagtcttgctctgtcacccaggctagagtgcagttgcatgatcttggctcactgcaacctccgcctcccggggttcaagagattcccatgcctcagccatctgagtggctgggattacaggtgtgcaccatcacgcccaaataatttttgtatttttagtagtgagggggtttcatcatgttgaccaggctggtctcaaactcctggcctcaggtgatctgcctgcctcagcctcccaaactaacctgagattacaggtgtgagccaccgtgctcagcctgtattttcctattgaagttcatggcttcagcctcatttaattaaggtaaaatgttgcatccatggagcagagggatttgacttcctctctgtctctgttctctttgggtctcctagaatcctgcgtggtagcctttgggcctcaggcatgactggagtctggggctgggcccactaactccttcctgtctcttctgcccacagtggaggtgaagccggtgctgccaagagccatgcccagttccatggggggtgggggtggaggcagccccagccctgtggagctacggggggctctggtgggctctgtggaccccacactgcgggagcagcaactgcagcaggagctcctggcgctcaagcagcagcagcagctgcagaagcagctcctgttcgctgagttccagaaacagcatgaccacctgacaaggcagcatgaggtccagctgcagaagcacctcaaggtgagcgaggggggtgcggggggccgcccagacctccgatccccgcccgggcctggctcacttg

SEQ ID NO: 18214 - DNA, 2300 bp, Homo sapien
gatcagcccgcctcgccctcccaaagtgctgggattacaggcgtgagccaccgcgcctggcctcttcttcttcttttgtttttgttttttgtttttttgagacggagtctcgctttgttccccaagctggagtgcagtggcgcgatctctgctcactgcaacctccgcctcccgggttcactccattctcctgcctcagcctcccaagtagctgggactacaggcgcccaccaccacgcccggctaattttttgtatttttagtagagacgggtttcactgtgttagccagggtggtctcgacatcctgacctcgtgatccaccagcctcgacctcccaaagtgctgggattacgggcgtgagccaccatgcccggcccacgcccggcctcttttttaaaatacagacagtgtctcgccatgttacccaggctggtcttgaactgggctcaagcaatcctcccgcctcggcctccaaagtgctaggattgatgacaggcaagagccaatgcacctggcccctttaaaacttttttttttgaggcagagtttcactcttgttgcccaggctggagtgcaatggcacgatcttggctcactgcaacctccgcctctcaggttcaagggattctactgcctcagcctcctgagtaggtgggattacaggcgcctgccaccacgcccggctaatttttttgtatttttagtagagacggggttttaccataatggccaggctggtctcaaactcttgacctcaggttatccgcctgcctccgcctcccaaagtgcggggattacaggcgtgagccaccatgcccggtcccctataaaacttttaatgtctggataatattttactgaatgaatgtctcctgctttgcttgccaattccctatcgatggatatttaggttgttttcaacttttcacatcattacaaacaatctcatgttcattttttaacataacaacgtttatttatttggaatacatttttgttagtggaattgctgggtcattgacaaattgtctaggtctaattaaacatgttcatactgtgtaccaagaggagatgtagcgtggatggcaccaaagtcagggaagtctttccggctcctggtctgctggtctgcccttttgaaggccttggagtgttacagccataccctggcctttcccaggcttttctttccctggcacggatgcagtgtgtgcggtcagagctggcgagttcgagacttgtccgaaccatccacccgcagccaggccccgctgcagaggctgcggtggccctcccagcccctgggaatctatccccaggtcccctccccgaccgcgggagggcgtgttaggggagcagcttaggcaagcgacgattgcaccatccacgttttgaaaagaaagtccggggagcgcaaggaggaaacttttacaatccaaaggttgagccccagcatccatactcggcccctgcagcgatccttccactcctgctcgctgggttccgatcccttcccttccaccccgtctcggccgaaccctgtgctgggcactggccctttaaggagctgtcacgatggcgtcgctggccccgcccggcggggagggccgagaggcaggggaggggttggtggtggctgcgggcaaggggaaggcggggggggctggggggggggtctgggtctatttttagctccgggtcgggtcacgtgacgggagtgacgtctccgaatgttgttgttggtggcggcggcgagcggagccggaggagccgccgcaaagatggaggagccgtcgaggaggtgctgccgccgctgccgccgccgctgctgccgccgccgcccgcgaagccggagctcgagccgcagcgggtgagcgcgccgccccggcccagatcccatcttccccggaccccgggacgcgaggcggcgccccctcctcctgctgtctctgtccgcgggctcccagcgcgcgcgccgcgctccgcgccccccttccttcctcccggccctgggagccagccggcgccccccgggagcatcggcagcccgtgagcgggacatcggggttgctgcgcgcgcccctccctgcccctcccagacaggggcgccttccctacaggtaagggaggggcccgccttctcgcgccctgcgcccccaaatggctcggagaccggccggggttgtctgatttgccccttccctggcggcgcatgttgcgttgcagagccatttgagccctgcacccggattctgtgcagacccctcttcgctggacacccctttcttggtactctga

SEQ ID NO: 18215 - DNA, 2300 bp, Homo sapien
taatttttgaatttttagtaaagacggggtttcaccattttggtcaggctcgtctcgaactccagacctcgtgatccgcccgcctcggcctcccaaagtgctgggattacaggcatgagccactgcgcccggctatttttttattttttttgagacggagtctcacactgttgcccaggctggagtgcagtggcgtgatctcggctcactgcaacctctgcctccagggttcacgccattctcctgcctcagcctcccgagtagctgggactacaggcgcccgccactacacccggctaatttttttttgtatttttagtagagagggtttcgccgtgttagcctggatggtctcgatctcctgaccttgtgatcagcccgcctcgccctcccaaagtgctgggattacaggcgtgagccaccgcgcctggcctcttcttcttcttttgtttttgttttttgtttttttgagacggagtctcgctttgttccccaagctggagtgcagtggcgcgatctctgctcactgcaacctccgcctcccgggttcactccattctcctgcctcagcctcccaagtagctgggactacaggcgcccaccaccacgcccggctaattttttgtatttttagtagagacgggtttcactgtgttagccagggtggtctcgacatcctgacctcgtgatccaccagcctcgacctcccaaagtgctgggattacgggcgtgagccaccatgcccggcccacgcccggcctcttttttaaaatacagacagtgtctcgccatgttacccaggctggtcttgaactgggctcaagcaatcctcccgcctcggcctccaaagtgctaggattgatgacaggcaagagccaatgcacctggcccctttaaaacttttttttttgaggcagagtttcactcttgttgcccaggctggagtgcaatggcacgatcttggctcactgcaacctccgcctctcaggttcaagggattctactgcctcagcctcctgagtaggtgggattacaggcgcctgccaccacgcccggctaatttttttgtatttttagtagagacggggttttaccataatggccaggctggtctcaaactcttgacctcaggttatccgcctgcctccgcctcccaaagtgcggggattacaggcgtgagccaccatgcccggtcccctataaaacttttaatgtctggataatattttactgaatgaatgtctcctgctttgcttgccaattccctatcgatggatatttaggttgttttcaacttttcacatcattacaaacaatctcatgttcattttttaacataacaacgtttatttatttggaatacatttttgttagtggaattgctgggtcattgacaaattgtctaggtctaattaaacatgttcatactgtgtaccaagaggagatgtagcgtggatggcaccaaagtcagggaagtctttccggctcctggtctgctggtctgcccttttgaaggccttggagtgttacagccataccctggcctttcccaggcttttctttccctggcacggatgcagtgtgtgcggtcagagctggcgagttcgagacttgtccgaaccatccacccgcagccaggccccgctgcagaggctgcggtggccctcccagcccctgggaatctatccccaggtcccctccccgaccgcgggagggcgtgttaggggagcagcttaggcaagcgacgattgcaccatccacgttttgaaaagaaagtccggggagcgcaaggaggaaacttttacaatccaaaggttgagccccagcatccatactcggcccctgcagcgatccttccactcctgctcgctgggttccgatcccttcccttccaccccgtctcggccgaaccctgtgctgggcactggccctttaaggagctgtcacgatggcgtcgctggccccgcccggcggggagggccgagaggcaggggaggggttggtggtggctgcgggcaaggggaaggcggggggggctggggggggggtctgggtctatttttagctccgggtcgggtcacgtgacgggagtgacgtctccgaatgttgttgttggtggcggcggcgagcggagccggaggagccgccgcaaagatggaggagccgtcgaggaggtgctgccgccgctgccgccgccgctgctgccgccgccgcccgcgaagccggagctcgagccgcagcgggtgagcgcgccgccccggcccagatcccatcttccccggaccccgggacgcgaggcg

SEQ ID NO: 18216 - DNA, 2300 bp, Homo sapien
caaagtgctgggattacaggcgtgagccaccgcgcccggctggaagatgtattattctttattttttaattttttttttgcgacagaatctcactttgttgcccaggctggaatgcagtggcatgatcccagctcactgcaacctccgcctcccaggtttaagccattctcctgcctcagtcccctgagtagctgggattacaggcgcccgccaccatgcccggctaatttcttttttttttttttttagacggagtcttgctttgttgcccaggctggagtgcagtggcgtgatctcggctcactgcaagctccgccttccgggttcatgccattctcctgcctcagcttcccaagtagctgggactacaggcgcccgccaccacacccggctaatttttttgtatttttagtagagacggggtttcaccatgttagccaggatggtctcgatctcctgcccttgtgatccgcccgcctctgcctcccaaagtgctgagattacaggcaagagccaccgcggaagtgagcattgagttgcccagccattcgcactccctcctgacaaatggcatcaagtcattcaacaaacacttgttcagcctgggcaacatagggagccttcatctctacaacaaataaacataaaaaaattagctgggcttaggccaggcacagtggctcacgtttataatcccagcacttcgggaggccaatgcgggtggatcacgaggtcaggtgttcaagaccagcctgggcaacatagtgaaaccctgtctctactaaaaatacaaaaagttagctgggcgtggctgggcgcagtggttcacgtctgtaatcccagcactttgggaggcagaggcgggcagattacctgaggtcaggagttcgagaccatcctggccaacatggtgaaaccctgtctctactaaaaatacaaaaaattagctgggcgtggctgggcgcagtggctcacgtctgtaatcccagcactttgggaggcagaggcgggcagattacctgaggtcaggagttcgagaccagcctggccaacatggtgaaaccctgtctctactaaaaatacaaaaattagccaggcatgatggcacatgcctgttatcccagctactcgggaggctgaggcaggagaattgcttgagcctaggaggaagaggttgcagtgagccgagatcatgccactgcactgcagcctgtcctgcagagcgagactgtctcaaaaaaaaaaaaaaaaaaaaaaaattagccgggcgtggtggcgggcacttgtaatcccagctacttggtaggctgaagcaggagaatcgcttgaacctgagaggcagaggttgcagtgagccaagatcgtgccactgcactccagcctgggcaacaatgtgagactccgtgtcaaaaaaaaaaaaagttaactgggtttggtggtgtgtgcctgtgatcccagctactcaggaggctgaggtgggaggactgcttgggcccaagaggtggaggatgcagtgagccatgactgtgccgctgcactccgggctgggtaagggagtaaagtaagtctcaaaacaaaaacaaactcattttctgagtgtcttcaatgtgccacatgctggttcacaaaggtgaaaagccacagtcttgctctgaagcagtattaagtcaagcagggaggccgggcgccatggcttacgcctgtaatcccagctacttcgaaggctgaggcaggagaatcgcttgaacccgggaggcggaggttgcagtgagccgagatcgcgccactgcactccagcctgggcgacagagcgagattcggtttaaaaaagaaaaaaaaaaaagaacggaaaagaaaggggcgggggcaggattaggcatcgtggggccaagatgcttgatctcacctgaaccagtgctgaaccagccgactgggaagaggagccgcttgggggcgaccgagagcccatccgtttcccctttaagaccagagcggaagactacagtgagaaggccctttgtgtcggcgggaaagaaatatgcctgcccctttaagaaggcggagacgccccagtggcggcgtcttcgaatgcggcctaaggcgcctgccgccagtctcctggcgactttccctatatcgcagagactcatccctctgaccccagcccggaagcactgtccctcggagtccgagacttccacctgggtcgtgtccaaggccccggcgactccccggactcggggtgccgggccaacctccccgccgaggcccacccgccgtcgctatggtaatgccgcgc

SEQ ID NO: 18217 - DNA, 2300 bp, Homo sapien
cattcctccccctagaggctcctggaagcacagctgctttctcctaagagtgaacaggtctgtggcttaaacatcttaggtccattcccagagtttccagctcaaccccttggctctcctcaggccggccatgtgagcccccttagcagctgggttaaaaaaataaatcaaggatgattgaaggtgctgggagctgtggctcacgcctgtaataccaacactttggggggccgaggcgggcagatcgcctgaagtcaggagtttcagaccagcctggccaacatggcgaaaccgactactaaaaatacaaaaatcggccgggcgcggtggctcacgcctgtgatcccagcactttgggaggccgaggcgggcggatcacgaggtcaggagatcgaaaccatcctattcttggctaatacggcgaaaccttgtctctactaaaaatacaaaaaattagccaggtgtggtggcaggcgcctgtggtcccagctactcgggaggctgaggcaggagaatggcgtgaacccgggaggcggagcttgcagtgagccgaggtcgcgccactgcactccagcctgggtgacagagcgagactccatctcaaaaaaaaaataataataaataaaaatacaaaaatcagctgggcatggtggcatgcacctataatcccagctactcaggcagctaaggcaggagaatcacttgaaccccaggaaacggaggtttcagtgagccgagatcaccccactgcactccagactgggtgacaccatgagaaaaaaaaaaaaaggatgattgaaggcagtttctacagactagtctgtcctgcttggagaatgggggaggctgccaggtggctgcagcagctgaaggcaaaaagtgtaccatctttttttttttttcttctttttttaagagatggagaggcagggggtggtggctcacgcctataatcctagcactttgggaggccgaggcgggcagaccacgaggtcaggagttcgagaccagcctggccaacatggtgaaaccctaaattaaatctctactaaaaatacaaaatttagctgggcatggtggcgggtgcctataatcccagctactcaggaggctgaggcaagagaatcgtttgagcccgggaggcggaggttgcagtgagccaagatcgtgccattgcactccagcatgggagacagggtgagactctgtctcaaaaaaaaaaaaaaaaaaaaaaaagatataggtctcactgtgttgcccaggattgtctcaaactcctaggctcaagcaatcctcctgtcttggcctcccaaagtgctaggattacaggcatgagccaccattcttggcccaaagcacaccatctatgtggggtcctggctctgcctctcacaaactgtgaccttgagccagtagattactttgttaagccttaaattcctcatctgtaaaacagagataagaccacccatctcaggggcattcaactgtgataatttcatttattgtccaaaccaagtttactaattattgggtgggctgggaagtatgatcccctgggtgaaggtggatatgaatgtgatttaaacaccgtgaaactctgtgcatatgtacagagttattgctgttactgcagatgctgggaagagctgctcaccttctcagtaactctgccttgacctccccttacctcctgtgctgaggtcagccctctctcctccacgtgggccaatggtggctcctgccctccagccaacatcagagaggctggaggcaccttgtcttcctcccagccctgcccatctccatgactgacctttttgcgcaccctggaccttgccaacccaagatgctcgctctagagatgaaggtggatgcagatgctggggttcgggggtggcctcagctgagggcctgctgaccaaccaaagggtatcggcaggggcaggggctggccctcaccctgggctgggggttgggccagcagcttctcagcaccaggatcatgactctgagcaaaccatgtttaccagagcagcaaaggacctatttatagcctcagctgctgctttctctggctcacggtggcgggggcagggtggctcctcagagcaagggaggtagtcgggtcgagggaacctggctctgcccaggtgccactgcccaaacccctgggccccatccatggcaagagagaccttccccttcacctcctccatgctgcgctctctccgcctgcagcaggagtggctggaatgggaggaccggcggcgggcggctgcccagcagtgccggagccg

SEQ ID NO: 18218 - DNA, 2300 bp, Homo sapien
tttttttttagagatgggggtctcaccatattgcccaggctggtcttgaactcctggctcaagggatcctcctgcctcagcctcccaaagtgctgggattacaagtatgagccactgtgcccggctttgtgaatgtacttaatgccactgaattgcaaacttaaaaatagttaaaatggttttaagttttatgttacgtatatgtatatatttatctttagagatagaggtctccctgtgttgcccaggctggcctttaactcctgggctcaagtgacactgctgagtcagccttcagagtagctgggactacaggtgcatgccactgtgcctagctatgtttattttaccacaatgaaaggacttacaaaaaagaagctagacaccgaagaggatacacagttggattccatttatagcaagtacaaaaacaggaaaaactaatgtatggtgacagacgtcagaatagtgattactctttggaggttaatggctagaagaagacatgaagggggagattctggggtaattctttcttttttttttttttcctgagacagagtctcgctctgtcaccccagctggcgtgcagtggctccatctcagctcactgcaacctccgcctcccaggttcaagccattctcctgcctcagccttctgagtagccaggattacaggcgtgcgccaccacgcccggctaatttttgtatttttagtagagacgggatttcaccatgttacccaggctggtcttgaactcctgaccttgtgatccgcctgccttagcctcctaacgtgttgggattacaggcgtgagccaccgcgccagtcctaattatctatttcttgatctaagtgctacttctgccagtgttcagttggtagaagccaccgagctttttgcttatgtttgcccctgtctggattatttatcctttaatcagtagttctccaaaaccccaaactccagcgcttttttttttttttttggagacaaggcctccctgtcgggtgcaatgcagtggctcagatcatagctcactgcagcctcgaactcctgagctcaagcgatcctcccacctctgcctcccaaagcggtgggattacaagagtaagccactccccccggccacagtaagtttttagaaaaaattttaattgcggccgagcgcggtagctcacgcctgtaatgccagcactttgggaggccgagacgggggcggatcacctgaggtcgggagttcgagaccagcctgaccaacatggagaaaccctgtctctactaaaatacaaaattagcggggcgtggtggcgcatgcctgtaatcccagctactcggcaggctgaggcaaaagaatcgcttgaacccgggggggcggaggttgcagtgagccgagatcgcgccattgcactccagcctgggcaacaagagcggaactcccgtctcaaaaaagaaaaaattttaactgcaaaaatctggataagttcttgaaagctggacttttccccctttttgtgtcctaagcctgcgccgaatctgtgccttctttgaaatgctttcccgccttctttctccgggtcccacactacctggggccgcactcttcaagcactggatgctgactaactggtctccttatctgtcttcccgactggcccagagctgagttcttactaatccccgctaacctggagttaggtgcgcgttgcaaagcagtaacgaatccaatcagccggggaggcagacagcagggccggaagaacaaagctggaaagggaaacgtcgcaccggctctgcccagcggcgccagcccgggcaaccttccgcagtcgcgaagccacgcccctttcccaagtacctccgcgctaactcctcccccctggccccgcctctcaccctggattgcctaaggccccgcccaccaggcgtggccccgctctgggagggccgcaatcccgccaacaatgactccacccctccttccgctgagaaacctgtcccttttatttaaagaataccttttacgtcagcccgtcttacgcagcttcgcgtcatcagtgcaaggcgcggaggcgggacttcctgtccctggtataacagcttccgggagaagccggaagagaccggaccctgaacagaatcgcagattgccagcccttttcccgacccctacggaaagacgagtccaggggccgtcctggcgaggtcaaaacatttagtctggtcttttcaggtgaggacttccccatccaggcacagtgccggtccaatccccctttaatttcccatgactcctcg

SEQ ID NO: 18219 - DNA, 2300 bp, Homo sapien
cgtgcgccaccacgcccggctaatttttgtatttttagtagagacgggatttcaccatgttacccaggctggtcttgaactcctgaccttgtgatccgcctgccttagcctcctaacgtgttgggattacaggcgtgagccaccgcgccagtcctaattatctatttcttgatctaagtgctacttctgccagtgttcagttggtagaagccaccgagctttttgcttatgtttgcccctgtctggattatttatcctttaatcagtagttctccaaaaccccaaactccagcgcttttttttttttttttggagacaaggcctccctgtcgggtgcaatgcagtggctcagatcatagctcactgcagcctcgaactcctgagctcaagcgatcctcccacctctgcctcccaaagcggtgggattacaagagtaagccactccccccggccacagtaagtttttagaaaaaattttaattgcggccgagcgcggtagctcacgcctgtaatgccagcactttgggaggccgagacgggggcggatcacctgaggtcgggagttcgagaccagcctgaccaacatggagaaaccctgtctctactaaaatacaaaattagcggggcgtggtggcgcatgcctgtaatcccagctactcggcaggctgaggcaaaagaatcgcttgaacccgggggggcggaggttgcagtgagccgagatcgcgccattgcactccagcctgggcaacaagagcggaactcccgtctcaaaaaagaaaaaattttaactgcaaaaatctggataagttcttgaaagctggacttttccccctttttgtgtcctaagcctgcgccgaatctgtgccttctttgaaatgctttcccgccttctttctccgggtcccacactacctggggccgcactcttcaagcactggatgctgactaactggtctccttatctgtcttcccgactggcccagagctgagttcttactaatccccgctaacctggagttaggtgcgcgttgcaaagcagtaacgaatccaatcagccggggaggcagacagcagggccggaagaacaaagctggaaagggaaacgtcgcaccggctctgcccagcggcgccagcccgggcaaccttccgcagtcgcgaagccacgcccctttcccaagtacctccgcgctaactcctcccccctggccccgcctctcaccctggattgcctaaggccccgcccaccaggcgtggccccgctctgggagggccgcaatcccgccaacaatgactccacccctccttccgctgagaaacctgtcccttttatttaaagaataccttttacgtcagcccgtcttacgcagcttcgcgtcatcagtgcaaggcgcggaggcgggacttcctgtccctggtataacagcttccgggagaagccggaagagaccggaccctgaacagaatcgcagattgccagcccttttcccgacccctacggaaagacgagtccaggggccgtcctggcgaggtcaaaacatttagtctggtcttttcaggtgaggacttccccatccaggcacagtgccggtccaatccccctttaatttcccatgactcctcgcgtcctgaagccccgcccccagttccccagccccgccccgaagtttgaggggtgtggacggtttgtgacccccttagccgaccctactcctcactggccgggacaactggtcttatcacggaggctggggccaggcagcccttcggttcgggtgggcccatggaccccagtccaacgccgagggaataggaccatccaaaagcggaaccttcgcctcagaaaaagggtgcgggacccctcctcaccgtgcggtcacggtacggacagggtagatcacaggctgagggacagagcaaagacccctgaggccggacacctggggtcctgccgggcccctccccacgagagttccctgtgtctgtgccaatcgttttcgtctttctttgccgcagtttcttttcctgtaaatcatggttaataacattaaccttcttaccatcaggggttagttgtggttgtgataaataattactaccgttattaagcaattgcaatttgcagtgtgccaggcactgtgccaagtattttgcttcgatgatttcacgtcatcttcaaaacaacctcatgaggtaggtactgtttttaaccccattttactgatgagaaagctgaggctctgagaaagttgtctgaggtgttatagctagtaagacgcaagactggggttataattagttgt

SEQ ID NO: 18220 - DNA, 2300 bp, Homo sapien
tgctttcacgttctgtgaccttcctctctcaaactccaacttcccaatgagtgtggatcagcaggaaaagcccacagccttgctgctgctgctactgttgttgcttttttggtgaatgaggaaaaatctttgctgaggcctgagtttctctaggatttctatcgcttggtcaagcaaatatgcctcctaagcagcctccaaagtggcttcagagagacccaaaagcctggaatattttactgtggggcccccctggaagcactgtttagccatccctgccagattgtctcatttgagcctatttcattcctggtcacagatccaggctgccagatgtcaagagccaaagaaaactgacctaccatcaaaagcagagtcagacaaatctaaaacgataactctgtagggaccgcgggcagatactatgcagcagacattatgtgccgcctctgaaacttctggcaagccctggggagcaacttgggacagacaccagaagcaccaccttcctgggtcaccatgggcccactcctgcaatgaccactccccaagtggagtgatttgaaaaagattccataacagctctcacaatccatatctcagtctctcttctttcactgtgaaggttctgctgctgcagtttcttagaaaggcaggaagggtccctgcttgctccttggagtacctactatttcccttggagaatctgctgctttcacagctgtccctgggcaaatccagtctggtgattaccattatcagactattctcacagcacctataaaacttcattatacttatgtacctgtccatctttctattagactcctggtagacaaggatcgtatgtatttctcttggtactgaagtgtccaatataatgccccagtagttgctcaaagaattatctgtggaacacatcaacatccttatttaatataccggccctggagttagaaaaacaactaattataaccccagtcttgcgtcttactagctataacacctcagacaactttctcagagcctcagctttctcatcagtaaaatggggttaaaaacagtacctacctcatgaggttgttttgaagatgacgtgaaatcatcgaagcaaaatacttggcacagtgcctggcacactgcaaattgcaattgcttaataacggtagtaattatttatcacaaccacaactaacccctgatggtaagaaggttaatgttattaaccatgatttacaggaaaagaaactgcggcaaagaaagacgaaaacgattggcacagacacagggaactctcgtggggaggggcccggcaggaccccaggtgtccggcctcaggggtctttgctctgtccctcagcctgtgatctaccctgtccgtaccgtgaccgcacggtgaggaggggtcccgcaccctttttctgaggcgaaggttccgcttttggatggtcctattccctcggcgttggactggggtccatgggcccacccgaaccgaagggctgcctggccccagcctccgtgataagaccagttgtcccggccagtgaggagtagggtcggctaagggggtcacaaaccgtccacacccctcaaacttcggggcggggctggggaactgggggcggggcttcaggacgcgaggagtcatgggaaattaaagggggattggaccggcactgtgcctggatggggaagtcctcacctgaaaagaccagactaaatgttttgacctcgccaggacggcccctggactcgtctttccgtaggggtcgggaaaagggctggcaatctgcgattctgttcagggtccggtctcttccggcttctcccggaagctgttataccagggacaggaagtcccgcctccgcgccttgcactgatgacgcgaagctgcgtaagacgggctgacgtaaaaggtattctttaaataaaagggacaggtttctcagcggaaggaggggtggagtcattgttggcgggattgcggccctcccagagcggggccacgcctggtgggcggggccttaggcaatccagggtgagaggcggggccaggggggaggagttagcgcggaggtacttgggaaaggggcgtggcttcgcgactgcggaaggttgcccgggctggcgccgctgggcagagccggtgcgacgtttccctttccagctttgttcttccggccctgctgtctgcctccccggctgattggattcgttactgctttgcaacgcgcacctaactccaggttagcggggattagtaagaactcagctctgggccagtcgggaagacaga

SEQ ID NO: 18221 - DNA, 2300 bp, Homo sapien
agggtgaaggagcagcagtccagcccttccctgggactgcctggagtttccttctctggaaactgtgctagatgtagcacctggagctcctgtgagccgggggagggattgaagaggccgtgggaccccaggtgggaacaagaggagagggtcctgcccaccctgatcgccagcctctcctgtccccagagatcgtggaccagccgggcttggacatctttggacaggttttcaaccagtggaagagcaaggagtgtgtttgccccaattgcagtcgcagcattgccgcctcccgctttgctccccatctggagaagtgcctgggaatgggtcggaacagcagccgaatcgccaaccgccggtgagggaaccagagctgcccgttctctgcagcctgtgccatggtgtagtcccccgggggcattgggaaggtacagagggtgggttttacttggccccagatgctccacctgcttctgaagttgggggcagagcggggtgaccaccttgacccctttctcttccttccccttggcccctttctcttccctccccttggcaggattgccaatagcaacaatatgaataagtctgagagtgaccaagaagataatgatgacatcaatgacaacgactggtcctatggctcggagaagaaaggtgcttggggatctggggaaacccggggggcattgggatgaggtgggaagcaggaattgggtatacagtggtcacaaattgttgccttgaatgatgaagagagagtgtagttacgcgatttccttttccttttttttttttttttttttttgagatggattctcgctctgtggcccaggctggggtgcagtggtgagatctcggctcactgcaacctccgtctcccgggttcaagcgattctcctgtgtcagcctcctgagtagctgggattacagtcgcgtgctaccatgcccagctaatttttgtatttttagtagagatggggtttcaccatattggccaggatggtctcgatcttctgacctcgtgatctgcccgcctgggcctcccaaagtgctgggattacaggcatgagccaccgtgcccagcctgttgtatggttttcttgagatgcttttagattgagaacttaacggaaaccctgctctttatgcttttgtttcccacagccaagaagagaaagtcagacaaggtgagagccgggccaggcattggggaaataatgggtaaaggacagataccctcccctttgggcagggagtcctcgagtgtcatgactcaaggctgaggtcattgggggcttgagggtgtctttggtgggtccggggcgggggagtgtgggtggggaaggggggtgggggagggcacatgggtagacaggcctcctactggggaggaagagtaggaatttgaggatgctgctttgtcaaatcttttttccttccctgggttctcggctcccccttttcgttaccctttccccaaagctatggtatctcccattccagaaccccaattcccctcgaagatccaagtcattaaaacacaaaaatggtaagtggagccggagcaatgggaatgcttctagctgtgtcttctgggactcattgccggggggtggaggtggggcccggggataggggaattgagggagggcctgtgatccttctgtcacccccacttcctctctggttattttcagggttctctgtctgtacctctgcatcaaacacccttccccttcttttttcttcttcaggggaacttagcaattcggatccttttaaggtgagtatgggccgcccctcatgcttgctctcattgtcctggttgtgaggtggtggggatttggacaagtagggatcagaatgctgacagccagaggcactgatgagctatttggatcttacatatttatgttctttctgagtcccaccccttatccattggcagatgggatgagagaaatcacttggaaaacggcagggtcgttctaaagcctcacttagaaagggaccagagggactgattctcacttccacccctgtccttctcttttctctgccccatctctaacctgtacctctggttgtcctgcagtataacaattcaactgggatcagctatgagaccctggggccggaggagcttcgcagcctgctaaccacggtgagggaggaccagcaagagagaaggtccctgggagtgggctggagccataggcagtggtcaaggcctgggaggaagctggtgacctagcagtcagggccgtatcgttctctctgtctggaattaggtt

SEQ ID NO: 18222 - DNA, 2300 bp, Homo sapien
gtctgtcccggcccggcgccggccccggcggctcggctgtcctccccccagtcggtatgatgcagcagcagtgccgcagggacgggggaagagccgaggcccggcctcctacccttcccagtgcccccggctcattcgtcagtccccaccccactctaggccggcagctcctgaaactcgtacccaccgttccgaggggccctgggttgtgggttctgtgtctgaatccttgggtgggggttcctggactttggggctcttggagagacttccgggctggtcctgagggagggcgggtggttatttaaaggaagaacaggtaaggggagtgcccgctcctggcgtgccaccctaccaggctcttcccccccaccccccgccgttcctgctcatggtggctagaaatgtcccttagctctaggctcctgtgggctctgctcccctcgtggagtggcaggctgatttcaagggaagacagagtggggtgaaggttgtagggtcctagggccatttctacttctggtagcagtacccccccaagtggacatcctggctgaaagcagaggtgactctgaggagagtctttagggaaggcggggggtgtatttaggagtctgtgcagttctttgccacaccctgtgggtttgctttgaggccttggagttccttctcctccccctgctgcattgcaccatgggtatcaaagaggggtttgagttttggggacctagggtgagctgctgcctcctatagacccagactctgattggcagtggagtccagggcctgagctcaggcctgggaaagactaggccccctttaggtttcaggccttgaaggaccatccagacttagggagcctgggccttggggagggagagaccctgatgccaggactgagctttgggcagcgaggtggggagggaaggtggccgcattcagaggtgccttggactcacaacaacacccccacccccgtgtgtgcagccgtgttgccgcccgctgtgctatgagcagtcagagcgccgtctccacaagagtttacaaatgaaaatggaggaaatgtctttgtctggcctggataacagcaaactagaggtgagggctcccccacgtgtgcctccagttctttctcttgatgtctctacgtcgctgtatctggcatccacaccaaagaggaatttgggtagtcagccttgttccttaaagggaatagccagctgaaaaagccaaggatccaggaagaagaaagaacacgaagtcaagatggggaaaatggcaaagaaagcatgatttttggctggggccagttggcagcagatttggttggtgagagtccagggggctgtgactcttgtgaccgtagatgttctcccctggggcccaggccatcgctcaggagatatacgcggacctggtcgaggattcttgtttgggattctgctttgaggtacaccgggctgtcaagtgtggctacttcttcttggacgacacggaccctgatagcatgaaggattttggtgagcttcagggtgaaggagcagcagtccagcccttccctgggactgcctggagtttccttctctggaaactgtgctagatgtagcacctggagctcctgtgagccgggggagggattgaagaggccgtgggaccccaggtgggaacaagaggagagggtcctgcccaccctgatcgccagcctctcctgtccccagagatcgtggaccagccgggcttggacatctttggacaggttttcaaccagtggaagagcaaggagtgtgtttgccccaattgcagtcgcagcattgccgcctcccgctttgctccccatctggagaagtgcctgggaatgggtcggaacagcagccgaatcgccaaccgccggtgagggaaccagagctgcccgttctctgcagcctgtgccatggtgtagtcccccgggggcattgggaaggtacagagggtgggttttacttggccccagatgctccacctgcttctgaagttgggggcagagcggggtgaccaccttgacccctttctcttccttccccttggcccctttctcttccctccccttggcaggattgccaatagcaacaatatgaataagtctgagagtgaccaagaagataatgatgacatcaatgacaacgactggtcctatggctcggagaagaaaggtgcttggggatctggggaaacccggggggcattgggatgaggtgggaagcaggaattgggtatacagtggtcacaaattgttgccttgaatgatgaagagagagtgtagt

SEQ ID NO: 18223 - DNA, 2300 bp, Homo sapien
ggggggagcggagggtggcgggggagagagcggggagccccgagggaagggcgggggagcctgggccggaaggcgtcccaggctcggctggcagccggcgctctctttcgacgccacccgctgcccccgcccccgagccggccgggacggcaaaacgtctccgcccccagcgcaccgcgcacctcaccttgaacgccgccccacccacccccatcttattggtcctcccgggccgaggcctccctgcgattggtcggggaggtccgcgaaggccccgcccatctctccgcccccgtccccgtccgccggtactttggacggcggcgtggcgcccctcctcccctcccggtccccgccccctggagcaaatgctgccgagctgcggccgcggggcagatgcacgcgctcgggcccttctagcaggcgcgagcagtcgctgggcgcgcgaaagcgaaagaaggaagaggaagggagggggagggcggggtgttggggaggggcgggaggaggaagaggaggaggttggagcgcgctcgcgcttggcctcgcgcccgcgcagagggagggggagaggggcgcgcgcgcgcacgctcgcgttcacgctcgctccatccatccatcctccggtcgcggcacacgcgcgcgcgctccgggctcgcgccgcaccccccgcccgggagaggcgggctggagtggggggcggggggaggggcgcgcggacggcgcgcggactgcgcgcgggcggggtgaggtgaggaggaggaggcggcgacgggacaagaagggaggggaaggggccatggccgcccggtgaggcggccaggcgggggggcggcccgaccccccggccccgggccctgggccccggggagaggcgaggacggaccgacggacatggggctccggagcagccgccgccgtcgccgccgccggaggacgcggccctgagaggctgccgggccccggcgcggccccccgggcggggtgagtacgggacggagacggggacggggacgggggaggggcctgtggggggcggggggcggggcccaaggcggggcttgggccccctccccccaggtctgggtcagcgccccttcccctccccccgggccgacgcggaaacgcccggcttcccccagcttcccggccgggccggggcccctggctctcccccgtctgggtcccccttgggcggggcagggccggccggggagggggcgcggggcctttgttagggagccaggccccagcccccgggacaatagagacaccctcccggactcctctccccggccggccggggctgctggcgggcggggaaggagaggggctgggacgcgtcccactctctgggggtcggtctgtcccggcccggcgccggccccggcggctcggctgtcctccccccagtcggtatgatgcagcagcagtgccgcagggacgggggaagagccgaggcccggcctcctacccttcccagtgcccccggctcattcgtcagtccccaccccactctaggccggcagctcctgaaactcgtacccaccgttccgaggggccctgggttgtgggttctgtgtctgaatccttgggtgggggttcctggactttggggctcttggagagacttccgggctggtcctgagggagggcgggtggttatttaaaggaagaacaggtaaggggagtgcccgctcctggcgtgccaccctaccaggctcttcccccccaccccccgccgttcctgctcatggtggctagaaatgtcccttagctctaggctcctgtgggctctgctcccctcgtggagtggcaggctgatttcaagggaagacagagtggggtgaaggttgtagggtcctagggccatttctacttctggtagcagtacccccccaagtggacatcctggctgaaagcagaggtgactctgaggagagtctttagggaaggcggggggtgtatttaggagtctgtgcagttctttgccacaccctgtgggtttgctttgaggccttggagttccttctcctccccctgctgcattgcaccatgggtatcaaagaggggtttgagttttggggacctagggtgagctgctgcctcctatagacccagactctgattggcagtggagtccagggcctgagctcaggcctgggaaagactaggccccctttaggtttcaggccttgaaggaccatccagacttagggagcctgggccttggggagggagagaccctgatgccaggactgagctttgggcagcgaggtggggagggaaggtggccgcat

SEQ ID NO: 18224 - DNA, 2300 bp, Homo sapien
agcaacggggattttttttttttaatgcagaggttttagttttcgggtttttttttaagtttcgtatgtgccgttcggcaaggagaggaccgcgaggtaggcaccgaagctggacgccgcgatcggcgtgcgtgcgccccaaaccagcggccacgctccgggggatgagggtgggcgcggaccgctcgctccgggaggcgggagagagctggcctggaagccctagtctgagctgggagaacttgggggagagctccggagcagggctgtgggcgccccccgagcctccccggacgccgggggcacctccgggcaccctctccgcggccgcacctcggccctccctcgccggcgaagcctgctagttcccccgcgggtctggcgaggtcgctctcggcgcccgcccgcccgcctaggctccgagccccgccgccatccgggcggctgcgtgtctccctgccccggcccccccccccttccccggcggcggcagcagcagcagcagcagccgccgccgccgccagcaccaccaccaccacccccctcccctccttccttccctccgcctcggccgcccgggtccccccagctcccgcccctcctcccagctgccccccgcggagcccgcccgggcaggctgtgggagggagcggagccggcgaggcgggcgggctggcgctcgctccccgggggtcggtgtgcgctctacggggaaggacgcgctcgctgccccgcttctcccgccccccctcccgctcctcctcctcccttctccctcctcctccccgctccggcggctgaggctgcggcggcggcggggggtgtgcgagctgaggccggggccggcggcgggcgggctgcctgcaggcggagggcgctgtgctttgtgcttttcgccgcgaggagcagcaggcagcagccacagccgccgccgccgccgccgccgccacagcagcagcagccgccgccccagcgccgccgcctcgcccggaggaggagccgctgccgccgcgggagggagctgcggctgtgcccggccgagcgggggagggcgccgccactcagagccagggagggagccgctggagcgggaagcccggaggccgcgctgcgccgggtaaccgaggcggctgaggacgcgcgctggggtcggggccggacggcgggagcgaaccgcggggtgcggtgggcgcccagcggggacccgaagcgaccaccgagcaggcgaccgggcgcgagcagaccagggcacttgggaggacgccgagagccgggggaggggaaggcaggaagcgaggcctgagccgagccccggccgctggcggaggagcccgcgcttctcggagccggcaggcgcagttctccccggccgccggagggggcggcggggccggtgagcgctgcgcccccgcctcccggccgccgtcctcccgccctctccttggctcggctccccggaggccggggcgggggcgccggcggggctgggccgcaggctcgggggaggaggcggcggttcccgccgcggtcgcgcctctgtgccgggctcctccgtgcgcgtcggggtggctgggcggtggcggcgcctctggccggggtgggtggctcgggggcggggggcaggctaggccgcttctctccggctgcttgcccgcctgtgcgggcggggacggcgaagggagcccgggaggggggagcggcgggaatccggatccggtccccgggggcggtgcggccgctccgctccggggctggcggcggctgcgctgcgtccgggtccccgccgggttgcggaggcggggggaaccggccggggggaggcgggaggaggagactggggcgcgtgcccgcttccgtggccgcgcgcgccctttacccgcccttcctcttcccccgccctccagcctggggcctccccggggcgggcgctccgaggaggaggagattttttctttttttttttttttggctggggttgggaagcggggcggagggcgggcgctcgctgcacgcgggagctaggagcaggccctcgcgtggccaggggagggcgcgcgccgcggagccgggctgcaggggctgggggagggggtcacgaggaagaggaggggcgcactcccattcccatagaccccttaagtctaataaggtcatggctgagtctctcagagtgtggacctgcccccttctactctgggcggttagaaagtcgttagtcgttcacctctcagccttcctgagtgggaactggtatgtcttccaaagggtgaggtggctttgaccccgggttgcccggccag

SEQ ID NO: 18225 - DNA, 2300 bp, Homo sapien
aattaaaaaaaaaaaaccgcgcacacactcagacacacaccagtggcgacaggggagagttggaaagacgcaggagagaagcaggaggcaggaggcagcggggatggagcaatgggagcgggaagcaggcaggtttccttgcaaatccccctccggcctcacgccgtctcgccggccccggcaggggagcgaggaccccggcgaacagatggaggagtggagctcgctctaggcagctgggcttggccggagaatggaggagccaccaagcgaccggctgattggaagagaaacgcagagcgatggaggcggggtaggaggacgatttctctgcggggactggcggcggcgtacacgcccgggtcgggcgctgcagagcttggctggctttcaacccgcgctcgccggctccagccccgcgcgcccccacccctagccctcccggcggctccgcaggtgagtgcgagctgggggcagaaatatccaaaagtctcaacatgcccgccctgcaaaaagaaaaaaaaaagacgaaaaccatttttctttaaaaaaaaaaaattttttttgtgcaacccctagagcagtgggagggaaggggtgaggctgagccgcccggaggaggcggaggggccaggcgaggccggggtggcccgggaggcggcggcgccgaggcggctctgacgggcaagcgctcggagcggcgctgcgctgcgccgaggcgggcgggcgggcgggcggagcggggcgggcggagcgcggcgcgtggggctcgccattagccgtcgctccgcttcgccatctcgggctttgtctggcgactcgctgccccggcgtcggctgcagcggagctgcggctcgactgttcggcccgccgtgctcccaggtgcccccggcctgcgctcccatccacacgctcggtaagtgagcccgggagccgcggatttcgggggagaggggttgctacgagtggcggcggcgccgatcttcatgcgcccgggcaggcctggagaaccatgccgggctggattgaaccggctcccacagcggcccctccgccggagcccgtcgttcccttgccgtttccggggtgtaaagagcaacggggattttttttttttaatgcagaggttttagttttcgggtttttttttaagtttcgtatgtgccgttcggcaaggagaggaccgcgaggtaggcaccgaagctggacgccgcgatcggcgtgcgtgcgccccaaaccagcggccacgctccgggggatgagggtgggcgcggaccgctcgctccgggaggcgggagagagctggcctggaagccctagtctgagctgggagaacttgggggagagctccggagcagggctgtgggcgccccccgagcctccccggacgccgggggcacctccgggcaccctctccgcggccgcacctcggccctccctcgccggcgaagcctgctagttcccccgcgggtctggcgaggtcgctctcggcgcccgcccgcccgcctaggctccgagccccgccgccatccgggcggctgcgtgtctccctgccccggcccccccccccttccccggcggcggcagcagcagcagcagcagccgccgccgccgccagcaccaccaccaccacccccctcccctccttccttccctccgcctcggccgcccgggtccccccagctcccgcccctcctcccagctgccccccgcggagcccgcccgggcaggctgtgggagggagcggagccggcgaggcgggcgggctggcgctcgctccccgggggtcggtgtgcgctctacggggaaggacgcgctcgctgccccgcttctcccgccccccctcccgctcctcctcctcccttctccctcctcctccccgctccggcggctgaggctgcggcggcggcggggggtgtgcgagctgaggccggggccggcggcgggcgggctgcctgcaggcggagggcgctgtgctttgtgcttttcgccgcgaggagcagcaggcagcagccacagccgccgccgccgccgccgccgccacagcagcagcagccgccgccccagcgccgccgcctcgcccggaggaggagccgctgccgccgcgggagggagctgcggctgtgcccggccgagcgggggagggcgccgccactcagagccagggagggagccgctggagcgggaagcccggaggccgcgctgcgccgggtaaccgaggcggctgaggacgcgcgctggggtcggggccggacggcgggagcgaaccgcggggtgcggtgggcgcccagcggggacc

SEQ ID NO: 18226 - DNA, 2300 bp, Homo sapien
atgatgaaaacaaaattaagttcagggccttgggcaggtcctgcaagttaggggcctagaagctgaaatttcattaacatctactagtggtaaatccgcttctcctacatgccagtgccctctgggaaaaaaaaaaaaaaaaaacaggacacaccagatcttgacagggcttcctccctgttggtgaaacctgatagaagtgggatgtggaagtcctgggaaagcaatctcatttctcccaggagacaagaggaattacagcagcagcgaggcaggccgagtgaaggagaaggctgcgtgccaggggagagtcgaaaggggctgggtgacccagctggccgagatgcgggcagtagagcgtcggtgtgggagactggcagcctgagagccaggagcaatggcgctgccccaggagcggtggctggaggctgggcccgttggaagcaggcttccttcagatggtcttctggctccctgcgtcctgtcctgataacctttcctctgaaaaggggaggcaaagacagtcaaccacggccgtggcagtgggagagtgggtggtggaccctgtccaggcctttcatccccggcctgcaggacagtgaaccaagggacgtcttgtcggaggctgccccgctgccacccggggcagcgagaaccgggtgctgggctcccctcgcggctgcccgccgccgccggggggcagcgcctgcggcctgctttcctagggatggccgaggctttttgacaagctgattgcgtggcggggattggctggtccgggtgtgacgccggtaacaacaaaggtggagttggaagaaattagattaaaggagaggaaaaaaattaaagggggagctggcataggacaggaggtagagaccgagggagagatgcgccaagcggtgtctcccggttccaactccccccacacccgcctcgaccctagaagatccctcgcgcaaacccactgggattttgctctttcccctaccccggcccagtgaccgacgccggggtagctgctgcttcttgaaaaatccccgcaactcccaccccgacacccgtcactacgacccagggggagaactttttgctcggactcctcggatcctaaacccagcgaaacgggacattgagaagcttgtcctaaaacccggaaggcccttgcggagcatggagatcggataaggcggggtgctcccccggttttccgatgtgttgcaaatctaagagcttctttctcgctttttttttccctgtaactacccccccccccttttgcttcagggttgcaaaagcaaagagcaattaaaaaaaaaaaaccgcgcacacactcagacacacaccagtggcgacaggggagagttggaaagacgcaggagagaagcaggaggcaggaggcagcggggatggagcaatgggagcgggaagcaggcaggtttccttgcaaatccccctccggcctcacgccgtctcgccggccccggcaggggagcgaggaccccggcgaacagatggaggagtggagctcgctctaggcagctgggcttggccggagaatggaggagccaccaagcgaccggctgattggaagagaaacgcagagcgatggaggcggggtaggaggacgatttctctgcggggactggcggcggcgtacacgcccgggtcgggcgctgcagagcttggctggctttcaacccgcgctcgccggctccagccccgcgcgcccccacccctagccctcccggcggctccgcaggtgagtgcgagctgggggcagaaatatccaaaagtctcaacatgcccgccctgcaaaaagaaaaaaaaaagacgaaaaccatttttctttaaaaaaaaaaaattttttttgtgcaacccctagagcagtgggagggaaggggtgaggctgagccgcccggaggaggcggaggggccaggcgaggccggggtggcccgggaggcggcggcgccgaggcggctctgacgggcaagcgctcggagcggcgctgcgctgcgccgaggcgggcgggcgggcgggcggagcggggcgggcggagcgcggcgcgtggggctcgccattagccgtcgctccgcttcgccatctcgggctttgtctggcgactcgctgccccggcgtcggctgcagcggagctgcggctcgactgttcggcccgccgtgctcccaggtgcccccggcctgcgctcccatccacacgctcggtaagtgagcccgggagccgcggatttcgggggagaggggttgctacgagtggcggcggcgccgatcttcatgcgcc

SEQ ID NO: 18227 - DNA, 2300 bp, Homo sapien
tagtcaggcatggtggtgtgtgctagctactctggaggctgaggtgggaggttcacttaagtctaggagtttgagactgatgtgagctgtaatcatgccactgcattctagcctggataacagagggagacccgctctcaaaaaaataaaaaagaagaaagaaatcagcagcccacactgagatagtgagaccctgtttctacacacagatttttttttttttaattacctgggcactgtggcatgcctataattccagttactcaggaggctgggccaggaggatccctggggcccaggagttcaaggctgcagtgaactatgatcatgccactgcactctaagcctgggtgacagagtgagactctgtctcaaaaaggaagagagagagagaggaaggaaggaaggaagcagggatggaggaaggaaggaaggaaggaaggaaggaaggagggaagggagggaaggagggagggaaaagaaaccagaacatgacagattgggtcaaggtggtggccagggagggcctctgaagaggagacatttgggccgagatgtgagaaggtctgaggtattggggggagggtgtccgggatatggacagctggatgtgcaaaggccctgggacaggaaagggcttagtgagttctaggaaccacaggaggccaataggctaggtggggagagagcgagagagacggagtgcaagatggggtcagggagagaagtaggaccacatcgtccagacctgcggaccactcccaaggatgctgcagcccatgcccggtgggcagcagctatttctgagagaagagcatgtgtttagagcccctcaggggagctaagcccccctgaagaagagaccagcaggtcccctggtattagctgagtcccagggatgggcaagaaaagaagccaggtgaagactagagaatgaaggagggagatggacctgagggtgacctgcccatcttccccaaacatccttcgctggtgccagccagacttacctcttccctgcactgcccctctctcccagcccctgctcacctaccctcacacctgcaaatccagctcgttctccctttccctccacacttccttcctctggccctaccacctccaacacgtggatcccctccactgacatgtggccccctctggaggaggaccaggagaccctgggatgccctgtgccccactcagcctgtgccctctgctgcagggacccgcggtgcgggttatgctgggggctcagatcaccgtagacaactggacactcaggaccacgccatggaggagctgcaggtgggtgttccctggcatcagcagtgctcccacctggaggctctggggacctggtcctagactcctatcttcgttgggggtggaagagcccctcacagcccagcctcagcggccacttcccacaggatgattatgaagacatgatggaggagaatctggagcaggaggaatatgaagacccagacatccccgagtcccagatggaggagccggcaggtgagcccctctccctccctcagctgggatgagctgctgagccctagacagggacaggaggggcacttgtcctctccccttctccacagtcctcctcccaagcaccacgggccgttctcccctcaattctggctgattgaaggataaacagagctttgtttgaaatgatcacaggaggtggctgggagagcaggggcagtcacccatccagtgcccctgcaatgtgagaagggcgggcagccagtttgggacaagggcgtgagcccacatgccatctgtgcccatccaatgccagcttccaggccagaaaatgggcttgttcttggggaaagaggtcctgagaaatgaggggcttgtggggaccctcctagatagaaagacaccaggaaccaccctgccttccctggcctgtccaaggtcttaggtggggagccccaggcaggacctgtttactgtcaacaggacttaagtgctggagattgggattaaagttaagaggcccctcttggaaatgagggctgggggtgggaggggtgggaatataaggggctgacccaccctggtgcctcagctcagtgagacactgtgctgacgggctcattgaggcaggtgggaggagagaagggagtctggtctcagaggtggcaggggagggaggaggtcctaggaggatcctgaaaattgccactcagggctctgccgtcaccttggagaggtcccttcacttcatcactgcggaggggctaggcctccctggctgaatcccgggtgtcctc

SEQ ID NO: 18228 - DNA, 2300 bp, Homo sapien
gtgctcagcaccccctccccacagcccccagtgctcggcaccccctccccacagcctccagtgctcaacacaatgccaggcacagagtgggaacctttgttgaaccgacccaattgcctgtcacctcaatgccctgtgctgtagtgggcgaggagggaaaagaggcacctccacacccagtctggggccaccttaggtgacccctgtcctccccttggacctgccctcacattcctggggaaggcacaccttcctctctgctagggacacaactgagaaaactgagaccccgagctcagaggcctcttggctggggcctagtcatcctggctccccagtctcagagccccaaccccgcaatagggagccattcttacaatcattcagtaaatgtttattgagcacctactacgtgacagccactctgctaggagtagtgaatttcgtggggatgggacatacagggtcttcgcactcaggtagtttcccttccaaaagcattgtcagataatatgaacacaaatcaatcaagaaaccacgtattggtttttttgttttgttttgttttccttctaaagagtctcactctgtcacccaggctggagtgcagtggtgccatcttggctcactgcaacctctgcctcccaggcttaggcaatcctcccacctcagcctctcaagtagctgggactacaggtatacgtcaccacacccagctaatttttgtatttttgtagacatgtggtttcactatgttgcccagttggtctcggactcctgagctcaagcaatctgcctgcctcagcctcccaaaatgttaggattacaggtgtgagccaccacgcccaaccaagaaaccatttaaaaattagtcaggcatggtggtgtgtgctagctactctggaggctgaggtgggaggttcacttaagtctaggagtttgagactgatgtgagctgtaatcatgccactgcattctagcctggataacagagggagacccgctctcaaaaaaataaaaaagaagaaagaaatcagcagcccacactgagatagtgagaccctgtttctacacacagatttttttttttttaattacctgggcactgtggcatgcctataattccagttactcaggaggctgggccaggaggatccctggggcccaggagttcaaggctgcagtgaactatgatcatgccactgcactctaagcctgggtgacagagtgagactctgtctcaaaaaggaagagagagagagaggaaggaaggaaggaagcagggatggaggaaggaaggaaggaaggaaggaaggaaggagggaagggagggaaggagggagggaaaagaaaccagaacatgacagattgggtcaaggtggtggccagggagggcctctgaagaggagacatttgggccgagatgtgagaaggtctgaggtattggggggagggtgtccgggatatggacagctggatgtgcaaaggccctgggacaggaaagggcttagtgagttctaggaaccacaggaggccaataggctaggtggggagagagcgagagagacggagtgcaagatggggtcagggagagaagtaggaccacatcgtccagacctgcggaccactcccaaggatgctgcagcccatgcccggtgggcagcagctatttctgagagaagagcatgtgtttagagcccctcaggggagctaagcccccctgaagaagagaccagcaggtcccctggtattagctgagtcccagggatgggcaagaaaagaagccaggtgaagactagagaatgaaggagggagatggacctgagggtgacctgcccatcttccccaaacatccttcgctggtgccagccagacttacctcttccctgcactgcccctctctcccagcccctgctcacctaccctcacacctgcaaatccagctcgttctccctttccctccacacttccttcctctggccctaccacctccaacacgtggatcccctccactgacatgtggccccctctggaggaggaccaggagaccctgggatgccctgtgccccactcagcctgtgccctctgctgcagggacccgcggtgcgggttatgctgggggctcagatcaccgtagacaactggacactcaggaccacgccatggaggagctgcaggtgggtgttccctggcatcagcagtgctcccacctggaggctctggggacctggtcctagactcctatcttcgttgggggtggaagagcccctcacagcccagcctcagcggccacttcccac

SEQ ID NO: 18229 - DNA, 2300 bp, Homo sapien
tacattcagccagggcaacaagaatgatctagaacatgtggtgtgagtggaaagaaccagcgtccaagctgctgtgcctctgcctggctgtctggtggggctgccagggggtggtgcctgcagaacagccaaacagctggccagattttccccctaagccagatgatgccatttgttgttccacccccagccagctgtcagtccttcccgggccccaggagaggtgccccattgctgccccctgcactcagctgtctctgactcctagggcaggcagaggggcaaggggactgggcacactggctgggtcaaggagtcaaaggtcttcacttggcactcactgccacaggccataggaagccaacccagtgtgggcccagggtttgggacagatcccaccagctggagcaggagaaggcacctccagccccctttagccagggcctctctctgttcctgaccggcaccaaggcctgggtggtgggaggggctcagatctggcagaacaccagctgtccaggcagattagcaggtcggagtgcccacgctggcttcaccagcccagaggacttgggcaagtcactgctctccttttgctgccctttctctgtgagaggtgaataaacatcgtaaacagtgttgtcctcagatgggcttagagagcttggcaagctagagcgtgtgaagtccaggcatggtgcactgcacggggcaggtgctggtccgttgggcattctttttcctgggaaagcctctctgtggctttgtttcctcctctgtgaagtggggggtttgtaggaatccagcgtgaccacaagatgaaggcctcagcataattcctggaaccgaggtcctccataaacaggattctgcctcaggacccgtgtccctccccttttctctctccacaggactcagcccctggcaggcttgtggtgcagatagtgaatggtcttgcagtggcgggatttgtccacctgtgtgtccctgtgtttgagtttcttctgcttgagtctgaacttcaggctggtggccacataacccaacactctcactttacggatgagaaaacagaagcccagagagggccagggacttgtccaggttccttcagccagtccatgccggagctgtactaggacaccctcctctctgtgcccagagcgatggccacaacacccctttctgtctgcttgaaaacccctcttcattcttgctgatctgtactcatctttcagtctctgcctctttagcaaccagagcctacgaagaggtgaccaggctctggtcaccccccagagcagagaaactgggggtgtaggggtgggaactgaaggggaggggcatggcaggggctgagaatgcggctgttctggcctgggggcctgagccaggctgcctacagaggagccagtatgcccagacattagagctttgtgagttgaagagcttggtgtggggatggttgttttgttgagctgacattgtttcaggttgactgaatgtcagtgtcttagtgtccaggagccagctctttagaaccagccagggtcttggggagaatgtggctggggcatcctagtctggatcaaggaggggagggggctgtccgtgccccgtgagtgctgagcagttccctgtggagaaaactgcagaggaggagtgagtcctagcgtggataccaagagagacgagaggagcaggcgcccttgcaccttggggccagagcagaagggcctggccagagtggaggatggacagaggcaggacagggacctctggaggctggtgccttcctgccagggcactgggagccctgaggacagagcgatcaaaccttcatccacaaaggaagagtcaggagaaccatggggaccaggagggccccgagaggccttgggggctggccaggcgggtggggtgggccagactcacagctgtccagatgtgggtaagagataactctgtttactgggcacccagtgggagcggggtggggggtgtgggaaggggctcccagggccagtggggcgggcagattaggaggcgggggcatgagtcaggggtttgcgagctgcccctggggcgctggtgctgtcagaacgagtgggaacgtagctggtcgcagagggcaccagcggctgcaggacttcaccaagggaccctgaggctcgtgagcaggtgggcagggcagggaggggctggggatggtccttcggtgcctgccctgagggcttctacaggtgcccagcctgaatctatgcccaggtgggccaggctcctgacctccaagggggtgc

SEQ ID NO: 18230 - DNA, 2300 bp, Homo sapien
actgtggccagcaacatagatgaactttaaggactttaggctaagcaaaataagccagtcacataaaaaataagcactatatgattccacttatatgaagtacttagagtagtcaaaatcatagaaccagaaagtagactagtagttgccaggggtgaggggagtggggaatggggaattattgtttaatggatagtttcagtttttcaagatgaagagttaagaagttggacggtggtgatgactgcaaaaaactatgaatgtacttagtactactccattgtacacttaagaatggttaagataggccgggcgtggtggctcacgcctgtaatcccagcactttgggaggccaaggcaggtggatcacctgaggtcgggagtttgagaccagcctgactgacatggtgaaaccctgtctttagtaaaaatacaaaaattaaccaggcgtggtggtgcatgcctgtaatcccagctacttgggaggctgaggcaggagaatcacttgaacccgacaggtggaggttgtagtgagccgagatcactctggcctggacgacagagtgagactctgtctcaaaaacaacaacaacaacaacaacaacaacaaaataaaccccaaaagaacatcatgtgccctcatttggagaaagagcaaaaaaacccatcatgactgcccctggcaaactggaggcaggagaatggtaagagggacttctacacgtgaggcaagagcaagatgatggaggagggactgaaaagaccaaggttatactaacatcggaatgtgttaatatgctaaaaaattggaaagatacagagaagattagcatggccactgtgcaaggatgacacacaaaaaataattgaaaaaaaaaagtaaaaaataaaaagaccaaggttgaggtcccagaagccaagaattgaggctgaggctgcgtaaatgtaagatcccatgctaggagtcaggatctctcaccagtctccagggtgtcagacaaggctctttcatctcctcttcctccacctgtggtgacagagggtccctgcctgctgaccattttcagatgtgggtgcaaatctgaatcaatgtagagacatcagcaatccactggcagagcatcaggtgaattgagcaggtaggcagagttggagaataggtgtgagtgagtcctgggagggatgttcctaagggcagatggagaaattgggtagaggccctttaataaacacagaaaggctttatgtaggagttgcggattccagcaggtgaaggggaaccctccccccaccccgccccgaaaatcctggaacaggttgaatagaggaacggagcaggtgggagcagggacgtgagaggaataggaggccaagggcggtgggaaaccagactatgccttcatttccccccacccccggggagaagctgcaaccagttttacaggacactcctggccttgcccgagatcaatgaccccattcagagagggttgatggcacaacgcggcaatgccggcagccaaggggttaaccttaggccagctggctctggggtggtgcgagggggtgggccgccaccccctccggttgccttggcaccattgtaggcgcctgctctgctgctgggaacctccgcagagcccaaggcccttcgttgccagtctgctccccactctctgtcccaagtggttccaggcgctgagcccttaggcttcgtctggattcccatcctccaccccaggagaggttggctcggcctggctggtgcaggcgggtccagcccaggcacagacatgcagatgcgcagtctctagggctgctccttagcctcctgggttagcagccgggagccatctgcgctttctcgccgagaaagccgaggctgaacggatagggggcagggaggggacgggggtggggggtgggggtcccggaggtgaagacctcctttcccctggcggcagggggagatcagagacaccacggagcacaggtcagaaacaagggagtagagaggtcggagccagagactcgaggcgaggcgaggcgaggaggagcgaggagtctcgggcccagagtgtgggggtggagggcaggccccctgctcctccttccaatctctgcttctcccgggtaccccctccgccctccgtggggcccgggctctgcccctcccctcagaccctgcaccctctgcggattggtcctcggcctgctggggggcggggcccgagggccctgacgtcactggccgaggggggcgggcggctggaggagggggtgacggggccccggctcag

SEQ ID NO: 18231 - DNA, 2300 bp, Homo sapien
tggccctgtcctcccgatcttctccccttgaacctggaacccaggctcttggtccttcccacgtcttgggtggtgcccctcacccttccctggaaggattcatgggctctgaccccatgcccaattgaccctgcccatccctgctccagaatctgagcattggagaaccccaccccagagaggtcagtttgacatgggtgtcaatgagggtatgcttggagggcattcatccccccacggggtcccctctgtccatcctgccccattcccagcaagggagccagccatccccacccccttccccctcacacagtgtcacttcctggttctcacaggaagctacagtaccaattaaacacccctcaccccccaggcccaggcccgggcataggcttggcttggcctagaagggtagggaccagactgcagcctccctctgggttctgggcctgggagggacagtggacgcattattctcgacccttttctcccctcccttttctccgcggcagcgctcagtccgggtttccgcagtccaccccaacccctctccctcaccaccccagcccccgcccactagcggtgcccacctgcacacggtgatcaggttcttacgctccacagccacgttgcgagaggacgctttcttggaggacagccccagagccatggtggtctggacaaagctcgcttccatccagatgtgcggccactgctgccgccgcccgctgcccccccacccctcccggagccccaaacccgtcgctggatcacggctgggccctctgtccgacggggcccctcaacccttccatggccatccccctgcctttgcgcccggtgcccggccccctcgctccctcccccggcggcgatgccagagcaaaacaaggccggggagggagctctccgaggtgctgagccggggccccgtcaccccctcctccagccgcccgcccccctcggccagtgacgtcagggccctcgggccccgccccccagcaggccgaggaccaatccgcagagggtgcagggtctgaggggaggggcagagcccgggccccacggagggcggagggggtacccgggagaagcagagattggaaggaggagcagggggcctgccctccacccccacactctgggcccgagactcctcgctcctcctcgcctcgcctcgcctcgagtctctggctccgacctctctactcccttgtttctgacctgtgctccgtggtgtctctgatctccccctgccgccaggggaaaggaggtcttcacctccgggacccccaccccccacccccgtcccctccctgccccctatccgttcagcctcggctttctcggcgagaaagcgcagatggctcccggctgctaacccaggaggctaaggagcagccctagagactgcgcatctgcatgtctgtgcctgggctggacccgcctgcaccagccaggccgagccaacctctcctggggtggaggatgggaatccagacgaagcctaagggctcagcgcctggaaccacttgggacagagagtggggagcagactggcaacgaagggccttgggctctgcggaggttcccagcagcagagcaggcgcctacaatggtgccaaggcaaccggagggggtggcggcccaccccctcgcaccaccccagagccagctggcctaaggttaaccccttggctgccggcattgccgcgttgtgccatcaaccctctctgaatggggtcattgatctcgggcaaggccaggagtgtcctgtaaaactggttgcagcttctccccgggggtggggggaaatgaaggcatagtctggtttcccaccgcccttggcctcctattcctctcacgtccctgctcccacctgctccgttcctctattcaacctgttccaggattttcggggcggggtggggggagggttccccttcacctgctggaatccgcaactcctacataaagcctttctgtgtttattaaagggcctctacccaatttctccatctgcccttaggaacatccctcccaggactcactcacacctattctccaactctgcctacctgctcaattcacctgatgctctgccagtggattgctgatgtctctacattgattcagatttgcacccacatctgaaaatggtcagcaggcagggaccctctgtcaccacaggtggaggaagaggagatgaaagagccttgtctgacaccctggagactggtgagagatcctgactcctagcatgggatcttacatttacgcagcctcagcctcaattcttg

SEQ ID NO: 18232 - DNA, 2300 bp, Homo sapien
agcccttcaacttctccttctctggcctatgtcaaggagagttccctcattccccccatgtactcaagaggctcagctaccttggcaggcaagagaaaaagaggaacctagcaggtagacagcagagagggacaggaagagcgtcattaggacagggctctttctgtgtgccagacactgagctaggctcctacatggatggtgccattttcattctttggtgtggctgtgacatctaaaatggggatgatggggcacccaaggcccagagtggttaagagacctccccaaggtggcgcagctaaagctgatggagtaagagcttgaacctaggaccttctggccccaaggacagaaatctttgttttataacacactggcaggggttgggggaaatgagggtaaaggcagtgccctgcactgtgggctgggccattgctacactctctccttccttaaagttccaggcatttctgcagaggtctgatgtgcacagcactgtgctgggcactagtgctgggagacagatgcagtgtggtggagtgcgtgcccaggaaccgggaaggagctatgggagccaggagccagggcatcaggtgggcactagtgggcctcagggcatcaggtgggcttcagcagagctgaggcctatgtggcaggcaggtggggctggcgagggaagagtgagccctgcccccaggagcaccctgcactgagggggcaacacctgataggcatgggggccaggggaggttgcagctgacaggggatcccagcaccagaggagagtgcaggtgtgggctgcagggggagtggctgagcagctggccatgccctggttttgggacagggcagggcagggagggtgagtcactgcaggttgaagtgaacaggatcacttcctgggccccgcaatcacggagaatcttcccaaccctgcaaccgttccaccctcagagaccagtggccctgtcctcccgatcttctccccttgaacctggaacccaggctcttggtccttcccacgtcttgggtggtgcccctcacccttccctggaaggattcatgggctctgaccccatgcccaattgaccctgcccatccctgctccagaatctgagcattggagaaccccaccccagagaggtcagtttgacatgggtgtcaatgagggtatgcttggagggcattcatccccccacggggtcccctctgtccatcctgccccattcccagcaagggagccagccatccccacccccttccccctcacacagtgtcacttcctggttctcacaggaagctacagtaccaattaaacacccctcaccccccaggcccaggcccgggcataggcttggcttggcctagaagggtagggaccagactgcagcctccctctgggttctgggcctgggagggacagtggacgcattattctcgacccttttctcccctcccttttctccgcggcagcgctcagtccgggtttccgcagtccaccccaacccctctccctcaccaccccagcccccgcccactagcggtgcccacctgcacacggtgatcaggttcttacgctccacagccacgttgcgagaggacgctttcttggaggacagccccagagccatggtggtctggacaaagctcgcttccatccagatgtgcggccactgctgccgccgcccgctgcccccccacccctcccggagccccaaacccgtcgctggatcacggctgggccctctgtccgacggggcccctcaacccttccatggccatccccctgcctttgcgcccggtgcccggccccctcgctccctcccccggcggcgatgccagagcaaaacaaggccggggagggagctctccgaggtgctgagccggggccccgtcaccccctcctccagccgcccgcccccctcggccagtgacgtcagggccctcgggccccgccccccagcaggccgaggaccaatccgcagagggtgcagggtctgaggggaggggcagagcccgggccccacggagggcggagggggtacccgggagaagcagagattggaaggaggagcagggggcctgccctccacccccacactctgggcccgagactcctcgctcctcctcgcctcgcctcgcctcgagtctctggctccgacctctctactcccttgtttctgacctgtgctccgtggtgtctctgatctccccctgccgccaggggaaaggaggtcttcacctccgggacccccaccccccacccccgtcccctccctgccccctatccgttcagc

SEQ ID NO: 18233 - DNA, 2300 bp, Homo sapien
ccggctcagcacctcggagagctccctccccggccttgttttgctctggcatcgccgccgggggagggagcgagggggccgggcaccgggcgcaaaggcagggggatggccatggaagggttgaggggccccgtcggacagagggcccagccgtgatccagcgacgggtttggggctccgggaggggtgggggggcagcgggcggcggcagcagtggccgcacatctggatggaagcgagctttgtccagaccaccatggctctggggctgtcctccaagaaagcgtcctctcgcaacgtggctgtggagcgtaagaacctgatcaccgtgtgcaggtgggcaccgctagtgggcgggggctggggtggtgagggagaggggttggggtggactgcggaaacccggactgagcgctgccgcggagaaaagggaggggagaaaagggtcgagaataatgcgtccactgtccctcccaggcccagaacccagagggaggctgcagtctggtccctacccttctaggccaagccaagcctatgcccgggcctgggcctggggggtgaggggtgtttaattggtactgtagcttcctgtgagaaccaggaagtgacactgtgtgagggggaagggggtggggatggctggctcccttgctgggaatggggcaggatggacagaggggaccccgtggggggatgaatgccctccaagcataccctcattgacacccatgtcaaactgacctctctggggtggggttctccaatgctcagattctggagcagggatgggcagggtcaattgggcatggggtcagagcccatgaatccttccagggaagggtgaggggcaccacccaagacgtgggaaggaccaagagcctgggttccaggttcaaggggagaagatcgggaggacagggccactggtctctgagggtggaacggttgcagggttgggaagattctccgtgattgcggggcccaggaagtgatcctgttcacttcaacctgcagtgactcaccctccctgccctgccctgtcccaaaaccagggcatggccagctgctcagccactccccctgcagcccacacctgcactctcctctggtgctgggatcccctgtcagctgcaacctcccctggcccccatgcctatcaggtgttgccccctcagtgcagggtgctcctgggggcagggctcactcttccctcgccagccccacctgcctgccacataggcctcagctctgctgaagcccacctgatgccctgaggcccactagtgcccacctgatgccctggctcctggctcccatagctccttcccggttcctgggcacgcactccaccacactgcatctgtctcccagcactagtgcccagcacagtgctgtgcacatcagacctctgcagaaatgcctggaactttaaggaaggagagagtgtagcaatggcccagcccacagtgcagggcactgcctttaccctcatttcccccaacccctgccagtgtgttataaaacaaagatttctgtccttggggccagaaggtcctaggttcaagctcttactccatcagctttagctgcgccaccttggggaggtctcttaaccactctgggccttgggtgccccatcatccccattttagatgtcacagccacaccaaagaatgaaaatggcaccatccatgtaggagcctagctcagtgtctggcacacagaaagagccctgtcctaatgacgctcttcctgtccctctctgctgtctacctgctaggttcctctttttctcttgcctgccaaggtagctgagcctcttgagtacatggggggaatgagggaactctccttgacataggccagagaaggagaagttgaagggctgaaggtggtttagagctgggagggaaggatagagttttggggggtcagggacataacaaaggctcagtaacccccaggcccctactgcctcatcactgtcacatggtttgcctccagctcccagaacagctccctttagcaggccatgggctcccctgggccctggcctccctgtctccatggtaacctgcagcagccactgcatctcctatcagggagcacaccacagggctcccgggggcaatgaccacctctgcggcacccctgaggacagataccatatggctgccatgctgaacccagtccaggccccatcatggtctgacccagatgaccaggggaaatcaagctggcaggagggtgcgcatagtgaagctggaataatgccccaaacacaggctggctctcag

SEQ ID NO: 18234 - DNA, 2300 bp, Homo sapien
agggccgggcatggatccgggtggcactgatggagaagcgcatgtcagaatacatcaccacggctctgcgtgacacccggaccaccaggtcagacttcccaggcaactcagaccacaggtctcagagtgcacctgcattgcccaaacacagctgatccttaagttcctgcagcatccttcagttcctggactacaagtcccagcaccagcacacatggctgatttccctcttccagcctggcctgcagtcccaggacgaactcttttttttttttttttttttgagaaggagtttcgctcttgttgcccaggctggagtgcgatggcgcgatctcggctcactgcaacctccgcctcctgggttcaagcgattctcctgcctcagcctcctgagtagctgggattacaggcatacgccaccatgcccagctaattttgtatttttagtttctccatgttggtcaggctggtctcaaactcccaacctcaggtgatcctcccgccttggcctcccaaagtgctgggattacaggcatgagccaccgctcctggccccaggacaaacttttaccaccaccaccaccaccacttgcaagtcaaatctaatgcccattatttgccatcaatgcccagcacgctccacccttgcacacctctggatgagcctcagccatgcaccatctcaagtgttggcttgctccatgatctacaacacagcccttctgtctctccaaacaacgaaagcagttctgtacttgctattcacggacacagagtccttatatggggagttcaatccctgcactgtgggttcacagggaggttgggtgcctgaggcaaggggttacaaggaggagtgtgcctgtgtgggcaggtgcatctgaagctgtctgggtgtggcggggggcatatacctccccatcccaattggccatacccagcctgatgtttttactgaattccattcctcagtctacacgtttcaagttaacacgttttttgcgcacctactgtataccaagcactaatgattaagacttgcttcctgatatgaaggatctgggtaacccagtacttgatgaggaaggggtagctcagagggaggagtcggctcagggaacacccattctaggtgatggggccacaggtgcgagccccaggctgaagggggagagaggctccaggcctgcgtgcagatcaggaaggagaattggccttccttcaggatggggtggcagtaagccaacaatagcagctctggggggggggggggcgctccaggggcctgctgcatcctctggccctctgcctccccacagacggttctatgactctggagccatcatgctgcgggatgaagccaccatcctcaccggaatgctgatcggactgagcgccatcgacttcaggtggggtctgcctgacggcagtggtggagggggctgtttcccccataaatgtcctaccccaacccctcacacccacctccaaccctgtggctcctctgcctcagcttctgtctaaagggggaagtcctggacgggaagacccccgtggtcatcgattacacgccctacctaaagttcacgcagaggtgagcggctccatgactgcggcggggcgggggacggggcctcgggacatcctggggacgtcctggtcccaccgccctcagcggccagcgcagacgcgcggggggaggggcgggaccggccgtgcccactgctccctctcccaagctacgactacctgacggacgaggaggagcggcacagcgccgagagcagcacgagcgaggacaactcgcccgagcacccgtacctcccgctcgtcaccgatgaggacagctggtacagcaagtggcacaagatggagcagaagttccgcatcgtctacgcgcagaaggtgcgcgacgccggcgggcccggggggcgggcgggccgggcgggggatccgggcatcccggggcggggcggggatgggggccgcggccgggacgtcctcccagccgcccgggctgagccggcgccccgcagggctacctggaggagctggtgcgtctgcgcgagtcgcagctgaaggacctggaggcggagaaccggcggcttcagctgcagctggaggaggcggcggcgcagaaccagcgcgagaaacgggagctggaaggcgtgatcctggagctgcaggagcagctgtgagcgcacggcctgccctaacccctgacccccgccgccccgaccacatcaccgggtgaaccccatcttcacttccatcgactctaacatcacccgacacgagca

SEQ ID NO: 18235 - DNA, 2300 bp, Homo sapien
aaggcagagacgtcaaagtcgaggcctacccttcttaaaggcgcaggctaggagtacccatctccccgcccgcccccccccgcctccacccgcccgcccgcccccctccgccaccgcccgcgcgtgctggtttctctgttaggacaaataagcaagatagcacagaagttctaaacgcgaagtgggtggtggggcctggggtacggggctgccccgggaaataaagtgtctccctgacaagcgggatcggagagggcagcgctggacttaagccttcctgtctcccggggaggcagtgtggagccctgggaaaagcacccggccggttcgaatctccggctcttcacgtcgagcctcagtttcactttctgtaaaacggggtaatctatttctttttcagacggagtttcgctcttgttgcccaggctggagtgcaatggcgcagtctcggctcaccgcaacctccgccttccgggtttaagcgattctcctgcctcagcctctcgagtggctgggattactggcatgcgccaccacgcccggctaattttttgtatttttagtagagacgaggtttcaccatgttggtcaggctgctctcgaactcctgacctctggtgatccgcccgcctcggcctccaaaaaggctgggattacaggcgtaagccactgcgcccggcctttttttttgagacggagtgttactctgttgcccaggctggaatgcagtggtgcgatctcggctcactgcaacctccgccggccgggttcaagcgattctcctgcctcagcctcccgagtagctgggattacaggcgccagccatcatgcccggctacttttgtatttttagtagagacggggtttcaccatgttggccaggctggtctcgaactcctgacttcaagtgatccgcccgcctcggcctcctaaagtgctggattacaggcgtgagccaccgcgcccggcctgtggtaatctatttcaacaataacctactgcaaagagttttgagactcagaagaaatcacgatacgagagcaaccaacaccaaaacgtcgatgccctcccgcactcagtgctcttcctctccgcgcagagtcattccgggccttaggcgaggttgtgatttgcccaaggtcacgcgaaggtgggatctggctccccatggctctcccgtctcccccggcttgctcacgtcccagcccgcccggcccgggctgcagctcagctaacccagtggcgcacacccgcgcggggccctgtggtttacaaagcgttttgcagttgcaggcctgtcctgtaacctgaaaaatgggggcgatgctaaggccggcgagagaagtcgccgcgaagttttcaagtctcggcgggtagcccggcaagtaacttcgtcgttattgtgtggtctcccggcgatctcgaagaactcattctcactgccgccgccacgcacctgaggacaccgaggaagagggccagtgcgtcaccctcgccgtccagaaggcgctggggtttccagtgccgcgcgcggccggggcggggctggtgaaaatgcgctgttaaggccggcgcggcggctcacgcctggaatcccagcactttcgaagaccgaggtgggcggatcgcttgagcccaggagttccagactagcctgggcaaaatagggagacaaaaataaaagtaacaaaccagccgggcgtggcggcgcgcgcctgtggtcccagctactccggaggctgaggcaggaggatcgcttgaacccgggaggtcaaggctgcagtgagcctagatcgcgccactgccctccagcctcggcgacagagcgaggctgaaaaagatgctgtctaaaaaaagatgctggaagtgcgtgctgctgccacgttaagcgcgacgtggagaccgcgaagttggccggcagctctcagcgctggacaggcatggaactcgcccgcgcggccccgtcaagggggcgggaccgtcgcaggtccgggcggagacgcgagtgggcggagccggggacactccgggcttgcggctggtcggcccgcggcgggcggggcctcgtggcgcggtgtaggggcggggcccccttggctgctttcggcgtcggcctaggtgcgctgcgagcgcgcgcggaccgcgcacaggcggcggagccggtatgggcccgcctgaccctgggcgccgcgccgcacgagcaccagcctagagccaggtaggcggcactgggccggggctgggggcggagacggaagcgggggtctccgggcggccgtgcgagccagggcaggtgctgg

SEQ ID NO: 18236 - DNA, 2300 bp, Homo sapien
acccttctgatgttaaaaaaaaaaaaaaaaagagcgagagagagagagagaaacatttgtgaagtaggttgttgagtctcagcactattgaccttttgggcaggatacttctttgttgtgggggattgttctgtgtgtcgtgtgatgtttagtgggattgctggcccttacctaccagatgccagtgtccctccaccctgagttgtgacaacccagattgtctccagacactcctaaatgtccctggccggcaaaattgccgctgctcaagaatcacggctttgacgattagactttgtgatatttgtttcagtctgtttaggttttttttcttctacctgtatttttttctggttctgggtggttgtaattagtaggttattgatcgattcacctaacatttcatgaaagtttcatgtgtgtgtgtgtttcaatagaagcataaactatactccctagtctcaagatacacaggaaggaaaataagcacaaatgtgtcaccagggcacagactagtactaggtcctcagcaggccaggtgtcttatccgctgtctgggtctgctctagctccaggcttagaacccctgccacacgactccacagctcggttggcaccctttccctcctccgacttctgctgcctcgagcttggttagccatccccctgcccctgcctcatcctcagctccagttccttgctcaggctgcagcagtctccatcccctgtgcagacactgccgttcctccacggcccagtatcaggctttccctgggcctctcctctctcctggcccatctcccatcatccatctctgcctggcccaggccctttggcaccaagcaggctgactcttgtcactggctaatctgttctgtggtacattttctctcctcaccctcccatatcaattcctcgaaggcagggccgatctggagactaggaagccacttctctttcgacagcccccaccacagcccagcccgtgccaggcacccagcagctcctgaagcccactggcattgaacatggcattcaatccctgccaagcctgcccttcccatctggtttcccagggctcttcccaacacctcctcctccacctgccagttaaaatcttcccagactcagctcaaggagatgctcctaaggtggaatgaaatctcttcttccccacctggagacaatctacttcctctccctacacctggcaactggcgcacaaccttgtatcttaaattagattcagcctgagactgtctcccaccaatccctgctccctgtcctgctgagcaccttgaggaaagggctttggggctgtttatctttgtcctggaaaccatccttcaactcactctggggcctgcctagcatgtcaaccgagtttggagaatagggcagaatagggcaggacaggacaggacaagacagggcaggataggataggagcgagccagctcagtagctcacatttgtaatcccagcgccttggggggctgcggtaggagaatcgctttgggagcaggagttgcaggccgcagtgagctatgatcagcttgggcgactgagcgagaccctgtctctaaaacaaacacacaagtccgggcgcggtggctcatgcctgtaatcttagcactttgggaggccgaggtgggcggatcacgaggtcaagaaatcgagaccatcctggccaacatggtgaaaccccgtctctactaaaaatacaaaaattagctgggcgtggtggtgcgcgcctgtagtcccagctactcgggaggctgaggcaggagaatcgcttgaacccgggaggcagaggttgcagtgagccgagatcgtgccactgcactccagcctggcgacagagtgagactccgtctcagaacaaacaaacaaaaggatagaaaggcgagcacaaatattcccaattcataacactccctcgcactgtcaatgccccagacacgcgctatcatctctagcaaactcccccaggcgcctgcaggatgggttaaggaaggcgacgagcaccagctgccctgctgaggctgtcccgacgtcacatgattctccaatcacatgatccctagaaatggggtgtggggcgagaggaagcagggaggagagtgatttgagtagaaaagaaacacagcattccaggctggccccacctctatattgataagtagccaatgggagcgggtagccctgatccctggccaatggaaactgaggtaggcgggtcatcgcgctggggtctgtagtctgagcgctacccggttgctgctgcccaaggaccgcgg

SEQ ID NO: 18237 - DNA, 2300 bp, Homo sapien
cgcagtaagctgagatcgcgccactgtactacagcctgggtgacagagcaggactccatctcaaaaaaaaaagagaaaaagaaaaagaaatgccatgtaaatagttgtgatcctgaattgtttagggaataataagaaagaactatctgtagatgttcagtatagatgcacccatcgtaagcctaactacattgtataactcagcaacgatgtaacattttcaggggtttttttgttttgttttttgagacagaatctcagtctcactctgtcacccaggctggagtatgttggcgtgatctctgctcactgcaacctccacctcctgggctcaagcgattctcctgcctcagcctcttgagtagctgggattgcaggtgtgcgctaccacgcatggctaatttttgtatttttaatagagatggggttttaccacgttggtcaggctggtcttgaactcctgaccttgggatccgcccacctgggcctcccaaagtgctgggattacaggcgttagccaccgcgcccaatatattttgatccctggttggatatggagggctgactgtacttaacatctctaagcttcagtttcctcctttaaaataaaggtgtggctgggtgtggtggttcaagcctgtaatcccagcacttagggaggctgaggtgggtggatcagctgaggtcaggagttcaagaccagcctgaccaatatggtgaaaccccctctctgctaaaaatacaaaaattagccaggcgtggtggcgagcgcctgtagtcccagctacttgcttgaacttgggaggcagaggttgcagtgagctgagatcgtgccactgaactcgagcatgggcaacagagcaagactgtctcaaaaaaaaaaaaaaaaagggggtgagcagacgtggtggcacgctcccacagtcccagctacttagtaggaggccaaggttggaggattgcttgatcccaggagtctgagtccagcctgggcaacatggcaatacctcatctctaaaaataaaataaaagtaaaggtattaattactactttggatggttgttgcaaagaaatatatataaaataatggagagtcttgtaactggctcccaagaggctcaacagacattactgtttttgcttcttcattatgagttacctctctggccaccccactgaactagctgggctagctgagcctgggagaagagttgtttaggaagtgagaggctgctctccacagagactcaaggctcagttcctcctggtgactcagatgggcagcccagtgggcacacgtggtctctctccacatgtggctgagtttcacttccagaatagatggagaggcaagggcagggtttagcatgcttgaggaatctcagagggccctggtggtgtgggggaccctcagaacacaggtgtctcaagggctgacccagcttctgtgtccttttctctgggtgaggaggggacattcatgggcagatggtgacctctggggaaggcagcccagactccactggccaccatatttcctttttcacaactttctcacccctgtggtttcccatgtcatcatgtggccgcttcccgcaaggccttagcggggtgcaggtatgaacatagtgtcaggcaaggaggcatctggaggggaaccctggcttttcctggggggactccctccctgcaccctagccctgtcctctcccatggctactgatgccttcccctcaccccagaggtggcccacatctgcacagatcagacccacaaaaatcacgtcttcctgactctcataagcctgcccagtgaggcccaggcattaggccatgtgctggggactcagacccacacatatacgcatgtcagcattcatgcttacaggtccgcacatgctggggcaagtgtcacacacggggcgctgtaggaagctgactctcagcccctgcagatttctgcctgcctggacagggaggtgttgagaaggctcaggcagtcctgggccaggaccttggcctggggctagggtactgagtgaccctagaatcaagggtggcgtgggcttaagcagttgccagacgttccttggtactttgcaggcagaccatgtggaccctggtgagctgggtggccttaacagcagggctggtggctggaacgcggtgcccagatggtcagttctgccctgtggcctgctgcctggaccccggaggagccagctacagctgctgccgtccccttctggtgagtgcccctcagcctaggcaagagctggcagcctgggttttcccaaagg

SEQ ID NO: 18238 - DNA, 2300 bp, Homo sapien
tggtgaaaccccatctctactaaaaatacaaaaattagccgggcatggtgacaggcatctgtaattccagctactcaggaggctgaggcacaagaatctcttgaactcaagaggcagaggttgcagtgagccgagattgcatcattgcactccagcctgggcaacagcaaaagactctgtcttaatgatcggtagctgcaacactagaaaaatggcgagcaagagcaaagaaaaatccctttggttctagaaaatctcctgaaaaaaaggcttaccaagccctcaaagccacccaggcaaagcaggcacttttgtcaaagaaagagcagaggaaaggaaaagggctcaggtttaagcaactggaatcattcctacatgattcctgatggcagaaatgtgacaaagtgcatctcagacaactagaagtgaaacatcatgccttggaattgccagataaacattccttggcctttgttgtacacatcgaaagaattgatggcgtgagtttactggtgcagagaaccattgtaagactttgcctaaagaaaatttttagtggtgtctttgtaaaagtcaccccccagaacctaaaaatgctgcgtatggtggaaccttatgtgacctggggatttccaaatctgaagtctgtccaggaactcattttgaaacatggacaagccaaggtcaggaataaggaataagaccattcctctgacagacaacacagtgattgagaagcacctggggaagtttggtgtcgtttgcttggaagacctcagtcatgaaattgccgtcccagggaagcatttccaggaggtctcatggttgttacgccctttctacctctcagtggcccgtcatgctaccaaaaatacagtgggcttcctcaaggagatgggcacacctggctatcagggtgaacgcatcagtcagctcatccgccagctgaactagacccaggtgccaaactgcagtaaatttttattaatgaagtggaagcatgggtagtagaagcatgtgtttttgtttttttgggaatttttatcaagtatcttcagagaagattatttccagctttatcttcaaaaactggaaaggaagggtcaaagaaaagacagaagctcacgcctgtaatcccagcactttgggaggccgaggcgggtagatcacttgagatcaggagttcgagaccagcctggccaacatagtgaaacgctgtctctactaaaaatacaaaaattagccgggcatggtggcgtgcacctgtagtcccagctacttgggaggctgaggcaggagaatcacttgaacccgggaggcagaggttgcagtgagccaagatcacgccactgcactccagcctgggcaacagagcaagactctctctcaaaaaaaaaaaaaaaaaaaaaaagaaggagaagaaacagtagcttatgttcatggcaagcacctctaatcacagtccagtttccaaggaaaaattccagcgttttagtttaatgtcggtaagtgagtaactctagcatttgtacaaggctccctaagactcctgcaccagtcggccaagcccagggacataattgaatttggagattcttggggccttgttttgaaaaagacttgaaataggaagaaaggcccaaaaataaatgttcacttgtctctgaaaaaaaaaaatctgtctcaaaaaaaaaaaaaagagagacttaggggggtctagggggccttccctgctatcaccccagcactgcctaggtgttctaccgggagaagggggccatcgagcagggagttcttacagttttctgagactttcatgaccgtaccccttgagagtgttgtaggcaatatccactccccacctacacacacacaaattttgcaccaaattttggggactctcgaaacccaagaacccgggtgatgggaccctaatcccgacactcctttgcagcgcagagtctgggagcgcagagcgcgggggctgcggggtgggctgaaggtgggcagtaccggggggcggcgggcggagcggggccgggagggggcggtgccggagggccagcggtgtggcgcgccgcctgcagggggcgcttgcggcggctccggtcggagacaatcgcgctgagcgggcgccgcagcgggagcgggagccggagctgcgaggcgcggcgcagagctggggctgcgcggggccgggcgagcgggaccaggcgggagccatggaccgctagggcccggcctagccccgcgatgccgccggcgagtggccccagcgtcctcgcgcggctgttgccgct

SEQ ID NO: 18239 - DNA, 2300 bp, Homo sapien
aaaaccctttcattctctgacaaaaggcaacttgaacatgagttcaagtgcaacccatgtttgaatcttagttttgccatctgttggctgcgtaaacatgggcaatttacctaaaactcttgtgccacagttttgtgtttataaaatgggcataatagtacttatttcctagggttgttatgagtaacaatgatatacgactttgataatctgtgtatttttcaaggcatgcttgactgtctctctgctgcagttatgtgtgttcatgtcttaactctttctgggctgtttgttaagtctccttgatggctatctttggagtttttaaaatattttattttttataattttaaaatagagacgaggtctcactgtattgcctaggctggtcttaaatgcctgagctcaagccatcctcctgcctcagcctcccaaagtgctgggattacaggcatgagccactatacctggcctaatggttatctttgtatcctttatcaacacagtgccttgaacagagtaaatacttattgaaaacttgagtgaaatgtaagttcatatttggcctcacagaatacaccagtaatacagcaatcactcacctgaggacagtgggaggatagaaggtaagtagaggactgggttaagtattcgttcaagcaaatacattaattacacgcctcccatgtacttgacactgggaactcagcaatgaagaaggcccagaccaaagttcaggcttttagcttcctgtcctataaaggataagattcttaactctaggctgaggtagtaaattacgaggggacttcaaaatggtacagggtggttgagcaggatacggcaatggttaagtttgatcagaaaatagaaatcaaaaggaaaatgtggctatggttacccctagcggacctcttaaatcttcctgagaacctgcttttttgggaaggcatgagtgccagtaagacttggcactcctcctcttccgcttaccgagagaaaatgactttgcctttctgctcaaaactcatcccttcactttgtcaccctatgtttgcatcttccatccttagtgtgtgtttccatccagtctttcagcaatacacgtactacacattggactcttgggtagtctctagggctgtagcaaggagccttgctcccaagggactcatttacacaatcctgtgaacggaccaagagtaaacagtgtgctcaatgctgtgcctacgtgtgttagcccacgcggccagcctgaggagtcagggaaggctcccctaggcaaagcccccaaccagaatcaagtcttaatggttaaagagctccatcacccaaaaaggattgagggcctaccttcaactgaacagctaatgcataatctcagaaactgtgagtcaaaattccctggaataactccactttatccccaatctccttgccacctagaccaaggtccattcaccaccctgtccccagcactgactgcactgctgtggccacactaaagcttggctcaagacggaggaggagtgaggaagctgctgcaccaatatggctggttgaggccgcccaaggtcctagaaggaggaagtgggtaaatgccatatccaaaaagatacagaagcctcaggttttatcgggggcagcagcttccttctccttccccgacctgtggccaagtcacaaagcaccacagctgtacagccagatgggggaagggaggagattagaactgtaggctagagtagacaagtatggaccagttcacaatcacgctatcccaagcagaaagtgatggtggcttggactagcacggtggtagtagagatggggtaaagattcaagagacatcattgataggcagaaccaataggacatggtaataaactattctcaggaaaggggaggagtcatggctttcagccatgagcatccaccctctgggtggcctcacccacttcctggcaattctagccaccatgagtccaggggctatagccctttgctctgcccgttgctcagcaagttacttggggttccagtttgataagaaaagacttcctgtggaggaatctgaagggaaggaggaggagctggcccattcctgcctgggaggttgtggaagaaggaagatggccagagctttgtgtccactgcaagccctctggcttctggagtgggtgctgctgctcttgggaccttgtgctgcccctccagcctgggccttgaacctggacccagtgcagctcaccttctatgcaggccccaatggcagccagtttggattttcactggacttc

SEQ ID NO: 18240 - DNA, 2300 bp, Homo sapien
aaagttgcccaacacaccatcagaaaggacccttaccccatatgttcttcccatgtaaaatactagccagcttttctttttacattaatgtccctcttattgggcacatttaccctattattagcacctttttgcatgcatatatgtagaagtatctcttgctcatcatctgtttaaatgtctctaggaagggaagaatatattattggaatatttttggtttgtctctctgttctgtctgtcaggataatattggacaccgcttactccagaaacatgggtggaagctgggccagggattgggaaaatctcttcagggtaagtgtttacatttaccagagaaaaaggaagaaaaccatttctgatgcagatcttgtacctgaatgtatttgttgtgtttttaaaaaagtacttgggtttctccctactacctttttccccttagagtagtctgtttgtcctataactgtattttaagtcactgttaagcctctatatttgccagtaatttgcaagagtaagctgctgtgtcatcgaaactttcaagtcaaacatactgtgtgtggctcagcctgttttaaattttttttttggtggaggtgatgggtgagtggagtaaaaggaatgcaaaatatcagagtatgctttctttgtgctatttagtaatgtattctggcttcagtattataaagagaatcattcagtagcagaatttaatttttattcttttaaattctccctgaagctggtgattgccctggctcttttgctctgcaataagaaatttatgtagtggtagagaagaaaaattaacctccatgaaacataaaatgaaagcagaggtttttgagggctctctgagcagagaggttatttctcaggttcctatcaaggtctggaaaatgtatggcttaaagtttccattgcatttgttactctgtttataccagtcatttgtattaaaaacaaaatactaatatttcagcttctgagttctccctagttggaaaccaaccaactgcgttctctttttagctttctcagattcaagagctactgtttgttctttgcagatgtgatatgaatgctacctcagaaattatgggaattggccgggcgcggtggctcacgcctgtaatcccagcactttgggaggccgaggcaggtggatcatgaggtcaggaattcaagaccagcctggccaactggtgaaaccccatctctactaaaaatacataaattagccaggcgtggtggcacatgcctgtagtcccagcttgggagcctgaggcagagaattgtttgaacctggaaggcggaggttgcagtgagccaagatcgtgcacctgtactccagcctgggcaacagagtgagactccgtctcaaaagaaaagaaaaaaattacgggaatcgttgtgcctctacatctggtcatgcgggagcttattgtataataggcatctttggggagaagtgtgctactgttgactaattctttgaattcaggaaatggattttcagtttgaatgccaaagtctgatcaattcaagtgtgttgagaggaacacaaggacaggtgcagtggctcatgtctgtaatcccagcagtttgggaggttgaggcaggaggactgtttgaggccacgtgttcaaaaccagcctgggtgagatagcaagaccctgtcttgatcttttaaaaaagaaaaaattaattaattaattaaaaagagagaaaccaggaggacagggcttgaaataggatgtttcagttatttatttatttatttatttatttatttatttatattttgaagtggagtctcgctctgtcgcccaggctagagtgcagcggcgcgatctcggctcattgccagctccacctcccgggttcacgccattctcctgcctcagcctcccaagtagctgggactacaggcgcctgccaccacgcccagctaattatttgtatttttatagagacggggtttcaccgtgttagccaggatggtctcgatctcctgatctcgtgatccgcccgcctcggcctccaaaagtgctgggattataggtgtgagccaccgcgcctggccaggatgtttcagttattaaaacctttaattttaaaattctacttctacaaattctattgactggtgacacatgggagatgctcaataaatatgttttaatgaaatattcattactaagcattaacctattcttctggggaaatagaagatttaattacctttaaacttgttttccagtggcacaagaactctttacaaacaatacaaagaa

SEQ ID NO: 18241 - DNA, 2300 bp, Homo sapien
agagggaaaacctctagtttgctacctgggtgggaaaagagacatcgaatcatcagtggcaccaggggcttctacttcctgagcctttctggtgcactttagcattgatcaacttctttcctgtcttctcctactctatgacttctttttctccactctactaaagtcatttccatttatctgtgctctctggcctccaaaatgttgacatctgttgtctgccattgtctcttctccaggtctctttgtccatgtgaatttatgcacttcttattcctctgctgtcatttcagtgggcttttgagaggaagaagaggtcagtgtgatgtgtatcctcgtgattcaatctttcacgctacccttaagtctctttacaatgtttgagccaggctcggtggctcacgcctgtaatctcagcactttgggaggctgaggcgggcggatcacaaggtcaggagttccagaccagccttgccaacatggtgaaccccgcctccactaaaaatacaaaaaaaaaaaaaaaaaaaaaagtccgggcgaggtggctcacgcctgtaattccagcattttgggaggccgaggcaggcggatcacgaggtcaggagatcgagaccagcctggctaacacggtgaaaccccgtctctactaaaaatacaaaaaattagccgggcttggtggcgggcgcctgtagtcccagctactcgggaggctgaggcaggagaatggcgtgaacccggaaggcggagcttgcagtgagccgagatcgcgccactgcactccagcctgggcgacagagtgagactccttttcaaaaaaaaaaaaaaacaaatgagctgggcttagtggtgggcgcctgtaatcccagctactagggtggctgaggcaggagaatctcttgaacctgggaggcggaggttgcagtgagccgagattgcgccactgtactccggcgacagtgcgagactccgtctcaaaaaaaaaaaaaaaaaaagaatacaatgtttgaattctgtgtgccctgcctccccttagatggaagcgtaggctgaagcatgggtggggcaaagggtaacagctagaaaatacacacccttcctcaaaaaattacattccatttgactctttcagggcagggtaagacccatttttccattgtgtgatttctgtcaactactcttttcaaaaggagagaagtcctgccacccttctatgtgttttatgtattttggctaagagtcctggagcactgggtgaggtcctcagaagggatggaaaaatccgattcttgactctcatagtcagcgctaggcaggagcatcagagattactgaatccaatttccctattgtataaaaaggaaactgaagcccagagagctttagtcgatctggatcaacttcggtcccttgtgaaatacttctctcaaaggatggctcgaagtcaagctccttgcagtctttgggcctttgggtctaacgttccctatgccccaatgctgtaggctcctcgctgtgcctcggtcaaaggtcctttcagagactgtccctctcagcactgtggccagttttacttttttgtggcacttgttgatatttaaaaatatttattttacgagttatgtgagttcttccactggaatgaaatccccataagaggagatcattcctgtctcgttcaccgttgaatcctcagggtgagctgagattcgaagctaagcagtctggctctaaggtcgcgctttcggcccaacattatgctgctatttagtgaagacgatggacttctgcgcacacggggaagcaacagtgagaaaagacacccggaagtgagcaacagcaaaacatccagatttgtccgcacggtgccccctctgacctttccctccggaagctctcgcggctctcgggcgggagtgcgcacgcgcggccaccggggtcgctccgggtcgcgcgcggagcaggggctagagggaagggtcagcctccagggctggcaggcgcctgcgccgcggggctcccgtcaggacgcgcattctcgctccctccctcggctgcgcgcgcccggtgggcgtgggaggaggcggggaaccggggaggggtgggtgtcgcaggagggaaggagcgaaccggagagcgtcgtcctgagaggagtgaaggcggcaaaatggcggaccgcttctcccgcttcaacgaagaccgagactttcaggtaaacacgggcgtcgccgaggatgcggggaaggcgctggtctagcccagaacctccttcatctccggctcccagccctctttccttccag

SEQ ID NO: 18242 - DNA, 2300 bp, Homo sapien
tgcgagcttcctgaatggggtataggagcctgtcattcatttttgtttccactgctcagcttccatgtttggtaccggctctcaagatgctttgagatggactaggcaggagatctgaggatcaaaagctcaggctcaaatggagcagagagagcacaacattcccatccttagactgctctgagagaaaatgggcttgctggtggaatagagatgggtgggctggaaatgggatgcacaaaaaaaggcatatccccctcgacacccactcatgccccaattttgaaggaaaattttcatcctggtgtagggaaaaggcaaattccccaggatgtaataaggaacattttcaagttgtaagaaaccggaacatctttatatcattcattcgatcaggaaaaaaaaatttttttttgaatcctgtcaaacctggatccctttgtatccatctacttagaatattttttccttctccctactcctttcctctttttgttatttttcttcttctgctgttgttgtttaaaacaattcttttctatattggagcaagaaacatttcaccagactgtgaggatttggcccatactgtgaagcaaaggggctttctaaactcaattttctttcttctttttaagtcccccctttcccctgtccctcgggagagacaacagaaaataattgatccatcatccagtatcaggcccaggagatttacatgcaaattcctcctcgacccctttccaaatttaaaatcctagaagggaaaagaaaaattctaaaagtagcaggaaccctgctggccacaccccaccccttaccaggtgagagatgtggaggggataattcaccacaaccccccagtttcctcccgcgtcacacacgccacccctctctggtgtggaaccacttaagatttgggtaaaactcccctctcgccctggagacgggatctggaagcttttagggggcggaggtagaggtggggaggcagaaggaaaattccctcaaacgttcgtcaggcctaagagagtcgtcccttcactcaaaattgcccgtcaccccccgccccccaccattaactttcgattaagacctcctccttagggcaactaaactttactttgcacaattaagatttgccgcagaagaagcgggagggagaagccgcagctccgggccattctcctttccctcgctccctccaagccccccgccccaaccctccagctccgggcctccgagttcctgagttttctcactttgaggtgccaccgaacacaaagaaccataatgggctcctttgtgttggctacggggcaattacgcctcggagtcctggtccctttaagagtctcttaaagagacaggatcccatttttcagagggttttttaagggtgtgtggagggggagggcgagggatctacgtgtaaagtgaagtgaaactttcgcctgggctccagaaagagcggacagaaaaggtctttgtaaattgttagtttttttaaagtctgttttaatttttaaatttgagatttttcactcgatttgaaaaattggactaggaataggtggggttcgaggatcgggggcgggggcaagggtttaaagagtccccacccggcagagcacctcggcccgggaagaggagtgagccagggtcgagtagtgtcccccgatctcgccgcggcaactccggagaaatcccgggctgggcaaacagcccttaatataataatagcttgtctctttaaaaagcaaaagggggggaaagttttgttggcatctggtttctgatctcattatgttgtggtcgaccaatccagccctcgggcctggtcctcgggtttaaatctgattggccgagagcacattttgggttggtgcttagagctcgacggggcggtttcaaggatcccttttttggggggctgaggagagggcggggccgccagcgggggcccccttgaaaccgactaattgggatcggagaggccgaggtgagggctggaggaggcacaaagaagtcgctgggtgcagaagggaggggagagggggagctgagaggcgagaggaggaggaagaggagagagggcagcagcgcgcggtgtctccggctgctcagtccgaccgcggcaagcaagcgggcaggcgcaccgccccctcccccgcccggcctccccaactctgcggccgcgagtaaagtttgcaaagaggcgcgggaggcggcagccgcagcgaggaggcggcggggaagaagcgcagtctccgggttgggggcgggggcggggggggcgc

SEQ ID NO: 18243 - DNA, 2300 bp, Homo sapien
tggtctcgaactcctgagctcaggcaatccgcctgcctcggcctcccaaagtgctaggattacaggcgtgagccactgcacccagcctattttttctttttaaaatttctctctctatagatatacatatagatagatataaatagatatagagagatctatctctgtatatctatctatatatatctatctctatatatagacagggagatatatctatagatctatatatatctatatatccctgtatagatctatatatagtaatctatggtaatctgaaattactatatatatgtattactgtatgtgtgtgtatatatatatatatgtatacacacacacacagagattgagagagagagatgggatcttgctctgctgcccagcgtagactggtagaccacagtggcatgatcatagcttactgaatactcaaactcctggcttcaagtgatcctccccactcagcctcccaaagtgctgggattacaggcaccacacccagtctctttttctttctttaaaaaaaaaaaaaaatatatatatatgtatatatatacatacatatatatatatatatatatatatttttttttttttttttgtaaaaacagggtctttctgtgttgcccaggctggtcttgaacttctggcctcaagcaatcctcccaaagtgctggaattacaggtgtgagacattgcactcagcctttttgttttgttttctttcttcttcttctttttcttcttcttttttttttttaaaaagccagttggatacagtggcatgctcctgtagtcccagctagtccggagcctgtagtgggaggatcccttaagcccaggagtttgaggctgcagtgcgctgtgatcatgacactgcactccatgctggcgtgcatgagagatgagagaccccatctctcaaaaaaaatttttttttaaaaaagatggctatcctagaggatgtgaattggtatctcattgtggttttgacttacatttccctagtgactaatgatgttgaccatcttttcatgtgcttattggtatatcttctttggagaaatacctatttaagttcttggctcattttttgaagtcatactgtcttgtcgtgtattaatatggtttgtcgtagaaataaaaattactggcaaatttaacactctattgaattcgagtgaatacattaacaaagaaaacattttggttatgaacagagtaagtatataatatgtagttagttctttcagttctttcattctcttttggaagatctcattttcaacgtgtgtgttgagggttgggtggggttagtttcccagtcttactcagacatatatacaaacctcagattaaagtgagaaagagttaggaatactcaaataattgttttatgtcttctctgccttgatctgaacttaaaattttgtggagggagagactattgaccctctttctccatttattgtttctatacagggacaatgacgaaagacatgtttatacaataagattaattacatttcagtaactttgatccaattcagaatgatgctgccctcaagtaaaaaaaactttttctttttcttttcttttctttttttttttttggagtctcactctgttgcccaggctggagtgcaatggtacgatctcagctcactgcaacttccgtctcccagattcaagcaattctcgtgcctcaggcttctgagtagctgggattacaggcacacaccaccaggcccagctaatttttctatttttagtagagacggggtttcaccatgttggccaggctggtcttgaactcctgaccttgtgatccgcctgcctcggcttcccaagtaaaaaacttttttttccacttactattttggggatatttaagtgaatctgaaattactattggattttttttttctcttgaaacagagttttgctcttgttgcccaggctggagtgcaatggtgcaatctcggctcgcagcaacctccacctcccaggttcaagtgattctcctacctcagcctcccaagtagctgggattacaggcacccgccaccacgcccagctaatttttgtatttttacggagacagggtttcaccatgttggccatgctgttttcaccatgttggccgggctgttttcgaactcctgacctcagatgatccatctgcctcccaaaatgctgggattacagacgtgagccacctcacccggccctactattggatttttaaagacagatatttaagaacattctttgctagaactgaggacaattta

SEQ ID NO: 18244 - DNA, 2300 bp, Homo sapien
agttcttctttctaaagatgacttatatgaatgagttaaaacttttagatgtttttgtcatccagttctaaattttccatttttttccttcacaactctacaacaaacagggttttatcaaacataagatattttaaattatttttctgttcaattccacaaataataagggccccctgtacatcagatgcttttctatgggggataccagaatttaaacatggcaaatattatccttgcctttataatcttgatgatgatgatgatgatgatgatgatgatgatgatgacgataactaggatattatgggagcctattgcaaagaggagccctaagggagtgacatctatctttaattatatatgggagctatttatagaggctgatgcctcattagtctaaccaggaaatagttatttgtatttattagaaaagtgttaaaaaattaaaattcttggcaaattctctaaaataattttattagaaagtctacgtaatacataattctacaaaaaacaaaaatatttttaaagttgatacatgctattgaaaaaattcaagcctattctcgcttttggctaagatcaagtgaaaaaattcaaacttttcagaaatatatatcaagaaaagtgaaagtctgtcttaaccttctccccccgccacccaataacagctgctagcagtttggtatatattacattgaattttttttagatatatactaatacataattacacaaaaaagcttttatattgaacttttatgagataacacatgtagtagaaaaggtattggacttacagggagactatttagcaagtatgtagtagtttggcaagtcatatacccttgcaaaatacaagtttcttaatatctcaaatgatcattcatttattcaacagataataacgaatgattactaatgcttacctttccaatgttatgaagatcaattaaatatgagtgttatgcaaatataaggtattttatttcaaaaatatcccaacactatgaaatgttgaaatatgaaaaaaccggaagttacaatttattataaaacaatgtacagggccgggattggtggctcacgcctgtaatcccagcactttgggaagctgaggtgggcagatcacaaggtcaggagttcgagaccagcctgaccaacatggtcaggctgaaaatacaaaaaaaaattagccaggcgtggtggcacgcgcctgtagtcccagctacttgggaggctgaggcaggagaaccgcttgaacctgggaggcgaaggttgcagtgagcagagatcgcgccattgcactgcagcctggggaacagagcgagactccatctcaaaaataaataaataaataaataaacaaacaaaccaacaaatagatgtacaggttgagcatcccaatctgaaaatccgaaatccagactgatccaaaatccaaaactttttgagtgctgacatgatgctcaaaacaaatgctcattggagcatttcagattttggattagggacgttcaaccaaatatacaagtatacattatatatttggagtataatgtatatttccagaatccaagaaaaaaacctgaaatccaaaacacctctgatcccaagcattttggataaggaatactcaacctgtattacttcaaggaagaaattacccaaaaactgtaacaggtaaaaggtaccaatcttccacgtgcttgtggtttttacattttgtatttagtcagtatcagtcactaggtggatttctgggataaaaggaactccatccagtcatgctttgcaagcattagggatggctcccaaatctgttacatttaagcgacaactgcaaaattgctgtggtgtctaggatgaccatatcgcatttcacttttttatccaatattaatatagagtcacaaaaatagaatagagcatcaggttcatatggttttcaaattgcaaatgaggaagctgagcaggtgttgatggaataatgtataataagacaagacttgctttcaggagcagctatgataccaagcatgtctgtgacatcatagatgacagatttatatcttggtcacctaaaatgaaaaccatgtgttgtggagaaataagaggtaagcatgcactgtaagttagatataggatttgaaatgaaggagaaatatttatgtggaaaagacatttccacataaaaatatttatgtagaaaagaaaatattcttgagttctagtctcttctttatttgaaatgatggtgtagattcagtccacatattttatagataaagatggta

SEQ ID NO: 18245 - DNA, 2300 bp, Homo sapien
ttatttttacttaatagtggatcatctgacagtaggtatcttaattcaaatattgtttcaaggagacttgattttgctgaagtatttgctatataattggaagttcagtctaaggttttgtataaggactttcattgaaaaattattcttgcataattcagagctatttcccttgagttcatgaactaaagattggcttaaataatataaattcaaaggaacttttatacatagatcccaaagaataaaactcattactactatgcagaaatacatatggattttattcatgtgttagaaaattttgtaatgtttcaattgttttattgaagtgtggaagctatattacccaaatatactatttcataaatagggaagtatgtagcacacatataaccaattaaaatattttaatttcacaaagtttaagcaaaacacatttttttcattaaaaaaaactgtggtcaacaatgcttttatgtaataacctaagcaaaggaaaaacttattttctgcttactatagataaataattcatctaagaccatgaagtcacatattaggccttagttattgtctcttgggaaagtacagcgaagacattaaaatgcatatttatgtaacatacagcacatttcatgtgacagataattatctggagctaatggtagcttataaagcagagttgaaagggattagagaatggtgacatggggcaagataaatgtttttgaagaccttttctcccttttccactgaagaaataaagtctttaaaacctaagttgtaattaaatatatttatttgttctaggacctgctcctccaatttaaagtcagtttggccaatgaacacaagcagatttgcagatcaccatgacctcttaacagaaaccaaaaggccaatagatacagtcatctctcagcaagctttttatagtgatgaatctgtgtcagcaatggaaaagcaatacctgcgtaacagtaatctcacaccacaacaaaaaatagatgaacttcatcatggatttactggtttagatcttgaagaacaatggatgtacccctcacgaagtgatcattctaactgtcacaatattcagacaaatgatacagctaagacaacattccaagaatatccacttatcaaaaactgttttacaccccaaactggtctgtctgatatcatgaaagaatcaggagttgatatctaccattatggaagagacagaatatgtactaaaggtcttgaagcaccactacagcaaaaaagggcagagatgtttctttctcaatttaatagatacaatgaaaatgtagattattgtagatacccagagtatgttcatcctaataaggctaagcttaataaatgttcaaattttagtgtccaagatagcaaaaaattagccaatggcacacctgaaacaccaactgtagaagcagacacctacacaaagttatttcaggttaagccagcgaatcagaaaaaaatggaggagacaatccctgatcagcagaatttcacatttccaaaaactacgccacatctgacagagaaacagtttgcaaaggaagcagtattcactgctgattttggcttaacatcagaatatggactaaaacctcacacagcttgtcccgctaatgattttgctaacgtcacagaaaagcaacagtttgctaaacctgatcccccacattctgagtattttaaatcagtgaatttattatcaaactcagcaacatcttcaggaggtatcaatttaaacagaccaacttggatgaatgttcaaacaaaaaataacactcctattccttatcgaaatcaaggtaacttgatgaaattaaatagtcatttaagtgcagcttcaaaaggttctaaccattcttcagatttcccccaactatcatccacaaacttaaccccaaatagcaatttatttcagaaatattgccaagaaaacccttcagcattttctagttttgattttagttacagtggtgcagaaagaatccaatctgtcaatcacatagaaggactaacaaagcctggagaagaaaatctcttcaaattggttacggataaaaaaataaagcagccaaatggattttgtgataactattcagctcagaagtatgggataattgaaaatgtaaacaaacataattttcaagccaagccccagagtggacattatgatcctgaggaaggtccaaagcatttagatggcttatcacaaaatacataccaagatctactggagtcacagggtcattctaatagccacagaacgagag

SEQ ID NO: 18246 - DNA, 2300 bp, Homo sapien
ttaggccttagttattgtctcttgggaaagtacagcgaagacattaaaatgcatatttatgtaacatacagcacatttcatgtgacagataattatctggagctaatggtagcttataaagcagagttgaaagggattagagaatggtgacatggggcaagataaatgtttttgaagaccttttctcccttttccactgaagaaataaagtctttaaaacctaagttgtaattaaatatatttatttgttctaggacctgctcctccaatttaaagtcagtttggccaatgaacacaagcagatttgcagatcaccatgacctcttaacagaaaccaaaaggccaatagatacagtcatctctcagcaagctttttatagtgatgaatctgtgtcagcaatggaaaagcaatacctgcgtaacagtaatctcacaccacaacaaaaaatagatgaacttcatcatggatttactggtttagatcttgaagaacaatggatgtacccctcacgaagtgatcattctaactgtcacaatattcagacaaatgatacagctaagacaacattccaagaatatccacttatcaaaaactgttttacaccccaaactggtctgtctgatatcatgaaagaatcaggagttgatatctaccattatggaagagacagaatatgtactaaaggtcttgaagcaccactacagcaaaaaagggcagagatgtttctttctcaatttaatagatacaatgaaaatgtagattattgtagatacccagagtatgttcatcctaataaggctaagcttaataaatgttcaaattttagtgtccaagatagcaaaaaattagccaatggcacacctgaaacaccaactgtagaagcagacacctacacaaagttatttcaggttaagccagcgaatcagaaaaaaatggaggagacaatccctgatcagcagaatttcacatttccaaaaactacgccacatctgacagagaaacagtttgcaaaggaagcagtattcactgctgattttggcttaacatcagaatatggactaaaacctcacacagcttgtcccgctaatgattttgctaacgtcacagaaaagcaacagtttgctaaacctgatcccccacattctgagtattttaaatcagtgaatttattatcaaactcagcaacatcttcaggaggtatcaatttaaacagaccaacttggatgaatgttcaaacaaaaaataacactcctattccttatcgaaatcaaggtaacttgatgaaattaaatagtcatttaagtgcagcttcaaaaggttctaaccattcttcagatttcccccaactatcatccacaaacttaaccccaaatagcaatttatttcagaaatattgccaagaaaacccttcagcattttctagttttgattttagttacagtggtgcagaaagaatccaatctgtcaatcacatagaaggactaacaaagcctggagaagaaaatctcttcaaattggttacggataaaaaaataaagcagccaaatggattttgtgataactattcagctcagaagtatgggataattgaaaatgtaaacaaacataattttcaagccaagccccagagtggacattatgatcctgaggaaggtccaaagcatttagatggcttatcacaaaatacataccaagatctactggagtcacagggtcattctaatagccacagaacgagaggtggagacaatagccgtgtgaatcgcacacaagtgtcatgcttttctaataattatatgatgggagatttaaggcataatcagtgttttcaacaacttggttcaaatgggtttcccctaagatccacccacccatttggccattcagttgttccactgttggattcctatgacttactttcttatgatgacttaagccatttgtacccttattttaatatgatgtatggtgataattctttttctggtctcatgccaacttttggatttcaaagaccaattaaaacccgtagtggaccagccagtgaacttcatattcgtctagaagagtgctgtgaacaatggagagcattagaaaaagagagaaaaaaggtaacacaaagttaaccacttaggaataacagtatgttccttttgcctgtcttcattctgtttaccttagtgtagtgtaagagtacttgccttatttctttttgctttatttgttgttgttttaaagagacagagtctcgctctgttgcccaggctggagtacagtggcagaatcatagtttactgta

SEQ ID NO: 18247 - DNA, 2300 bp, Homo sapien
acatttgtatctgtgccattcatttagtgtccattcatttacataatcccaatgccactaagggtagacctctgcaataagaggacctctgcaaggtatacaaactcctttccttctttttttgttgttatcccctgaatatcttctatttgaatcctgtagctcaagccatacatgactctctggaggccccctagcaagcctttgaattcacagttcccctgcatctggatctaccccctttttccctccagtccctttatgtaaagaactcctaccattcttcaagaaagttcaagcatcatctccactgggaagccttcctggatttcctatgaacctctccccacctgcttccaactccactccaacaggtaaagttaactcaatcttctaggcatcctactgcaatctccgctagataaagctccattaaaacatttatatcactatattgtcatcatttgtttaaacatgtctgttcctaatggattaaaaacccctgaggacatatattttgtgacattcatttttgtgttttcagtgccagcaacaatgccatactgaaggtactcagtacatatttgaggaaggagttagccaggaccttgccagcttcctctgcacttcagctaaagccaaccaaattcttgggtaattcattccagcccagagccaggtgttttgacgtcagctgaagctctcataactctgccaaagaagagttcttgccactggttaggcgccctctagttgtgtgactctctccatatctgtctccttatctttagtgattttgtttgttcgtttgtttgtttgtttttgagatggagtctcactgtcgctcaggctggagtgcagcggcgcgatcttggctcactgcaacctccgccttccgggttccagcgattctgagtagctgggattacaggcccgcgccaccacacctggcttttgttgttgttgttgtttgttttgagacggaatttcgctcttgttgcccaggctggagtgcaatggcacgatctctgctcaccgcaacctccgcctcctgggttcaagcgattctcctgcctcagcctcccacgtagctgggattacaggcatgtcccaccacgcccggctaattttgtatttttagtagagacgggggttctccattttggtcaggctagtctcgaactccagacctcaggtgagctgcccactttggccttccaaagtgctgggattacgggagtgagccaccgtgcccggccttatttttgtatttttactagagacggggtttcaccatgtcggccaggctggtctcgaactcctgacctcaggtgatccacccgcctcggcttcccaaactgttgggattacaggcgtgagacatggcgcccggcctgtctccttatctttaaaatgtggacaataaaagcatctccccacagggctgtagggaggattacaagagataatgcatgaaaagcttttggcacagtgcctagcagagggtggggtacgcttctcaaagaatagtcccgtgcacgcgttgaatcaatgagtggaagaaataacttgaggttgcctgtttatttactgagtgcctaccatggaatcagggaaggttttctgcaacctttactttgacagggaagggcttgtacaggtgaaggtggtagccgtcggtagcgacgacgagggtattccaggctgtcaggaggttcttgccagacagctgtgtgggagtgggcggccagcatcccccgaaagcgcggggaaggcagctcggtcgggtggaggaagcgatggcatccacgctgagctccagtcctgggtagttattagccgcgtgactttggccaaattactgcacctctctcaacttcccgaactgtagaatgagtctgttaagaatactcacatgccaagcatcttgtgagatcacgcgaccgcacgtatgcgaagacgcgcttcatctagaaagcacaaaactctcaagccggccgacacggctgcgctctttgcacttacgggcctgggcttcctcttcaggcatgcgcggtggacctgcggcgcggcccgtcaggcactgcggtaggcgccctaggggcttgcaggaccctgaccccaagatggcggcgcccagcgaagtggccgcgatagcccctggcgaaggcgatggcggaggcggcggctttggctcctggctggacggacggttggaggcactgggagtggaccgagccgtttatggagcctacatcttgggtatcctgcaggaggaggaggaagaagagaagctggac

SEQ ID NO: 18248 - DNA, 2300 bp, Homo sapien
gggtctaggagccttttggtggagtcctcatggttttctagctatagaatcatatcatcagtaagcagagataatttgattttctctttacctatttggatgccttttgtttctttttcttgctgattgctctggctaggattccctaaatacatttatattttaaagtattttcattttttggagttgcatagtgttgcacagtatgactacaccataatttatttaacctactgcccgttgttaatcaatattttcgttgcttttgatcttttggtattgcaaacaatgctgaggcagatacctttattatacaaattctgtcacacatgtgaaaaaagaacatgctgaaccatcttgcctcttaaagtttctgcttggaagtgatgtcacttttttcttttttcatgagccaaagcaagtcatatggccaaggcttcgttcgttcatcagggctgagatgtataagcttcctcagggaggagtcccactggaagagataccaagtttatgtactgtatatacctctaccagtgtttaaaaaatatcaccctgggccaggcgcggtggctcacacctgtaatctcagcactttgggaggccgaggcggatgaatcacctgaggtcaggagttcgagaccagcctggccaacctggtgaaaccccgactctactaaaatacaaaaattagccgggcatggtggcaggcacctgtaatcccagctactcgggaggctgaggcaggagaatggcctgaacccgggaggcaaaggttgcagtgagccaagattgcgccactgcactccagcctgggcgacagagcgagactccctctcaataaaaaaataaataaatataaaaactatcactctggttgctgaatggagaatggattatactggggagagataggaagctactcgggagtagaagtgaagaattgaccgcagtactttaggcaagaaatgatagcagcttgaactagggtggtggtggtctgattccagatgtactttggaggcagagttagtaggatttttttcttggagtggggatgggcacaagggaaagtactgaaagacaacttctaggtttttggtttgagcaactgggtgaatgattgtgacatttgagtaaacagtaacattttactgagaggggaagacctggggggagaacaggtggttttttgacaggggcagcgaaacaaatgttctgttttgaatgtgttcagcctgaggtgcctattagacatccaaattgaaatagccagtaggcacttgaatatgtgagtctggagatcagacaggtcagagctacagaaaatctgaaggtgtggcagagctgaattgtaaagctgtggagctggatgagatctcctagggagataagggagagggataagggctaaagcgttggcatactccaaaatatataggtgaacagtggctttggatccagcaaaggggactgaggaggaaccattgagatagggaaaaaaacggtagagtgctgagtcatggaagcaaaaagaagaaagtatttcaaagaaggaatagtccatctataagttggatatgataaggatagtatttcagactgtggaaatcacagttgacctggataagtacagtttttgtggggaggtccccagctctccactgaatgatctcttattagatcaaatttgatctctaattagcagtctaattagatgggttgaagaaaagatgggaagtgagggataaagatacgtcttttgagaagttttgttgggcaggtaataattgaagaacgggagggggacaaaaatgtgaagatgaaatgatgtgtaagtgaaatctttatgtaaactgcaaatgctctgcaagtgttaggcttattttgttatttagtattcaaacttctaggaatttcaatgcagctcagtgtgaagaatcactaaaaagcgaccactagtcctcaacttgagggccattaaggggcaaagccgtctagccagtgaagagccaagaaatgaagagacggtttgagaagacgtaggcggtgggggaacggaaagaggaatcgcgaaactaatattgtccttccaaggacaccgtagggcggatctcgcagctacggcgttcttttaggggtggagccggcaggaaatttaaactgaagccgcggccgaaaacgccaagagattgatgctgtagctgccctgagataaccaggactgtggaatcgggaagagctcatggagctcgcgaatgtaatacggaggcctctgaggaaggagtacggaggccgagaag

SEQ ID NO: 18249 - DNA, 2300 bp, Homo sapien
ttttgatcttttggtattgcaaacaatgctgaggcagatacctttattatacaaattctgtcacacatgtgaaaaaagaacatgctgaaccatcttgcctcttaaagtttctgcttggaagtgatgtcacttttttcttttttcatgagccaaagcaagtcatatggccaaggcttcgttcgttcatcagggctgagatgtataagcttcctcagggaggagtcccactggaagagataccaagtttatgtactgtatatacctctaccagtgtttaaaaaatatcaccctgggccaggcgcggtggctcacacctgtaatctcagcactttgggaggccgaggcggatgaatcacctgaggtcaggagttcgagaccagcctggccaacctggtgaaaccccgactctactaaaatacaaaaattagccgggcatggtggcaggcacctgtaatcccagctactcgggaggctgaggcaggagaatggcctgaacccgggaggcaaaggttgcagtgagccaagattgcgccactgcactccagcctgggcgacagagcgagactccctctcaataaaaaaataaataaatataaaaactatcactctggttgctgaatggagaatggattatactggggagagataggaagctactcgggagtagaagtgaagaattgaccgcagtactttaggcaagaaatgatagcagcttgaactagggtggtggtggtctgattccagatgtactttggaggcagagttagtaggatttttttcttggagtggggatgggcacaagggaaagtactgaaagacaacttctaggtttttggtttgagcaactgggtgaatgattgtgacatttgagtaaacagtaacattttactgagaggggaagacctggggggagaacaggtggttttttgacaggggcagcgaaacaaatgttctgttttgaatgtgttcagcctgaggtgcctattagacatccaaattgaaatagccagtaggcacttgaatatgtgagtctggagatcagacaggtcagagctacagaaaatctgaaggtgtggcagagctgaattgtaaagctgtggagctggatgagatctcctagggagataagggagagggataagggctaaagcgttggcatactccaaaatatataggtgaacagtggctttggatccagcaaaggggactgaggaggaaccattgagatagggaaaaaaacggtagagtgctgagtcatggaagcaaaaagaagaaagtatttcaaagaaggaatagtccatctataagttggatatgataaggatagtatttcagactgtggaaatcacagttgacctggataagtacagtttttgtggggaggtccccagctctccactgaatgatctcttattagatcaaatttgatctctaattagcagtctaattagatgggttgaagaaaagatgggaagtgagggataaagatacgtcttttgagaagttttgttgggcaggtaataattgaagaacgggagggggacaaaaatgtgaagatgaaatgatgtgtaagtgaaatctttatgtaaactgcaaatgctctgcaagtgttaggcttattttgttatttagtattcaaacttctaggaatttcaatgcagctcagtgtgaagaatcactaaaaagcgaccactagtcctcaacttgagggccattaaggggcaaagccgtctagccagtgaagagccaagaaatgaagagacggtttgagaagacgtaggcggtgggggaacggaaagaggaatcgcgaaactaatattgtccttccaaggacaccgtagggcggatctcgcagctacggcgttcttttaggggtggagccggcaggaaatttaaactgaagccgcggccgaaaacgccaagagattgatgctgtagctgccctgagataaccaggactgtggaatcgggaagagctcatggagctcgcgaatgtaatacggaggcctctgaggaaggagtacggaggccgagaaggagccggcatttgatgagcgaaccgggaaagggtacggatgccgggaaggggagaaagaaaggcggaaggggtcgttaatagctgaggcgaggtgcggagtcgtggagggggcttaggaagtgaccagcgggtaggtgccgaagctgaggagggtataggggccgggaaggagccacaggagttgaggggaccgaggaatgaaggtggcagaggaacgtaggggacaacagcctggagggatgtatggagattgagatggaca

SEQ ID NO: 18250 - DNA, 2300 bp, Homo sapien
ccaaaaaggcattttcagactaaataaattttttaaaggaaataagtccatgtgtatccagcagagactactgaggacagaattgtctgtgtgcctcagacagggaagggcagggcagctgagaccagccctaggagcctggcatgcctgcccatcctccagacaagcccagggtcacttctcagcacctgcagacagtgctgcgctggctttggtggcccaaaggcaagtggagagaacaatgggatggtacagaggtgctgtcttccagttccagtgggatggattgcgtgttcatccccagccccttcacacctatttaaatgtaggtaatcatgacacatatgcaacggctgaaaggcactgttacagcctcagtatctgcactgcacatggcaggcacaggtatatcactgtcaccagagaggggtacacatattcctggcattataggccagagaggagatccaactggagctgagatttcttgtgaaatttttttttttttgagacggagtctcactccatcacctaggctggagtgcggtggcacaatctcggctcactgcaacccctgcctcccagattcaagcgattcttctgcctcccgagtagctgggactaaaggtgttcaccaccacgcccagctaatttttgtattttttgtagagacggggtttggccatgttggcctggctgatcacaaactggcctcaggtgatccacctgccttggcctcccaaagtgctggaattacaggtgggagccacagtgcccagcctcttgtgattttttttttatgtgctgttttgaagcaggtgcattcaaagcctattaggcctattagcctgcccatcctcaagtttcaagccccctaagcagaaacaatatcattgaagaagaaagaaacatgccagggttgtgaggggtacccccttctccttaagggtccaagaagacttatttgttaattcactgctgagctacagtactcttaccctgctccctgagaacccctggcttgcactgtttcccccagaacatggaccattgcaaccaaacatggtgcacccggcagttacctcacttggcagggtttgcgaagtatacacagatcacttctgtctctgcaaatctcttaaatgtttgcaacttgaggcacactgccagaaccactcagtccaggtctgactatccagaaccttcactgtgcctgtcttctcctttcagaacccagccctcagatagttctaaggaccagcaagaacacttcacagaacagggaaataactgttctggtttaaacattcttccatttagaatctgccaggctagagtcctcaaagattgttgtagggtcaagaaacaaatgggaaggtggggaaaagtagatcaggagtctggagatgtggcttctgatctgaccttggctgcttaactatttgtgagcccttgagcaagtcacagaacctcttgggcttcatttccttagatataaaataggataagcccagagggtgcttataggattccagggaggcagtggtatgagtttgaaaagtagacagggaggggccgggcgtggtggctcacgcctgtaatcccagcactttgggaggctgaggtgggcagatcacaaggtcaggagatcgagaccatcctggctaacacagtgaaaccccgtctctactaaaaatacaaaaaattagccggccatggtggcggacgcctgtagtcccagctactcgggaggctgaggcaggagaatggtgtgaacctgggaggcggagcttgcagtgagccgagatcgcgccactgcactccagcctgggcgacagcgagactctgtctcaaaaaaaaaaaagaaaagtagacagggagaacatatgtattaatttaacctagaaaggctgatgagttttgttatagaatttaaaagatgtggaggtgagagtccactttatcagggctggaattctagggcattgggcgaggccccctcctcagcctttaccttccccattgtagtcaaagtggaagttttctctgttgcaggaagtttcgtcctttccatcatcagtttaaatcctttcctgaaatttcttttcttggacccaaagatgcaagtccctttgaggccccgacgaccctgggcagcatgcaccataccaggtgggtctttctggttcctgagtaccaagggctggttacaggccaaagtcctccccatcgggggcctgctggtcagatttgggaatggccatgtgtttgctccttaggcaaagtctattctgggaacg

SEQ ID NO: 18251 - DNA, 2300 bp, Homo sapien
ccccaacaggaagtctagggtcccagggccaccgatgtggtaggaacatgcctctggtgaagaggcctggaccacagattgggcttgctctgtggtcttgaacatgttggaggacccagactctcccagccccgggctcgcactgtgaaatgacaaacctcacccagcctactggggggcactcctgatcgggacttgctgatgtggccctgggacatgggcaggctggagcaggacagccaccttcgtgtctggggtgtgtggtgagggtgcatgggaccagatataccagtcccctctggtcccaaatggagggcagagatggaagtaggactaggggtggctaagaggagtggggccatggagtatgggatgtgcctttcaccagctgtgtgactttgagaagctcacataacctctcagagcctcagtttccccatctgtaaaatggggagcacaatctctccctctgggctcatgatgagtttccaggaataccacctagtaggccctcattcccaggagcctcctcatgcctacatcttggaggaggttctcaagatgtctccagagcgaaggaagaattggctcagccttactgagcatctgggcctggcatggcaggtggttgggggtggggggagtcacttggttccctacattgatgtcagcgcctcctgggaaatcgccttctcacctctcctgggcctaaaatagagcggggggtgggggtgtcacaagctagaggcagttccctcatccccagcagaggccctgggtccttgcggaagcagaggacccaggaaggggtttcctgcctccaatcttgttcttcagcaacctgtggtcccctagcatgggtaccaaaaaggtcagggtggggactcagcggcccacccaccatgccctaccacaccccacaccatctcaggtatctggccttcagcacccctagcagaagtctgaggtcccagccctggtattgggacccaacatccccaggagctgggtggagggcacagctgggaatgtaggttgggaggtcaagtattttgcagacagggcagcctagtctgaccagagagggaatgctggggggctccagaggtgtcttctgctcctaaggattgggactagcaagggagggggagccatggggcatgctagcagcatataagtgacctggctagtttatattttatctaggaggaaggacaggacgcctgtgagagactcaggaacccagacggacatgccagcccttcctgatggttggagtgacagcgatccctgaagccctcctggaggccggggcatctttggcggggagaaggagccgatgggaaggggtctgtaccgcgggcgtgagaggactccgcagtgacacgacccgtagcgaaggtgcaagaaatcccagaggcgtagagcccggcgttcgccaagagcctttgcccaccccaaccccagcttccacagcctggggtcaagcggggcgctccaagctggggctggggcagcctctctggggtaccacgacagaggggcgaacgtgggcgccgcagccacgcccctgcccccgggccccagacaggcagtcgccgggtcgaccccgggggtaccccgtcccctgcttccctcccctacaaatctacgagtcctcggagatgctcaggcagaggtggccgaggagaggccgcgggataagtacgcggagcgccaccgccccgcacctgccgaggagacttcgaggtgcgaggagggaccccggggcggcgcctcttttgtcctgccgcggcggcggcccgggccctgcggggctgggggggccggggggcggcgggagagcggagggcgggccctgggctcacgtgctcgctgctcagctcttaacccggccccgccgccccgccgggatggccgcggccggagcgcgctgagccccggcgccgtccctgccgcccccacctctccgcgacccccgcccggccccgcgcccccgccccggctccgcagctggcgcctccccacccccgtccctgctcccgccctccccgcgccgctggcagccgcagcccccggaccgggaggaatgagcgagccatgaggctgctgcggcgctgggcgttcgcggctctgctgctgtcgctgctccccacgcccggtgagtgacccccgcccggccccggcgccccctccctgcccccgccccgggatgtgcggcgcttgctgctgcagccaccttttcctgcagtgctcggggtgacagccggtccggagcgcgggagggtaggggagcggga

SEQ ID NO: 18252 - DNA, 2300 bp, Homo sapien
ggtggctcgcagacctcctgagtgagggagattctgttggtgccagggcagactctgctggaatctccaggcccaggatggtaccaatacgtagccaacctcctggcctcgcatctgggctcatctgaccattttcagtgggaaaatctgaggcacagagaggttgctgggtcatccctggggctgcacggtcagagagcagcattggggcaaggggtctggcaggctgctcctctaggcagctgtggagggggctggcataggggcttgttggtgggaggcagatagaacaagcaggaacagtcccaggggcaggggaaggccaggatggttcaggccatgggccgggaagaggatgtggcgactccttgtccttgactttctatttcgggctgatcaatgctctaggggctcaggatggaattgggagccttggtcagcctggaatagggtgagtcggtgtccttggggcgcaaaggtcagcccacccaggccctggccgttggtgccccccttgctcctctcccaggacctctcatggacactgggccctcttccattttactccacctttggggtgagacagccctagaagcagactccctagcttcaccactttttagctgtgtgaccttgggcaagttagtcagccccactgtgcctgtctcctttcagatgggaatggcagtaatctatcccatagggttgctgcgaagatcaaacagggcaatactcttagtgtttagaccagggcccggcacacaagaagtgctcggtaaagattagcagtgatgaggtggttgaggaggaagccgacaaggcacaggctatggatttcatgaccacaaccttggggctctcttccttcctgcaacctgccgtccccaccacaaaggccaggcagcgaacaaaagcctcccatttgcagggcagagtgggtgaccctcatgttggggtctggagtcagtcttctggaatgaacaaggggtgtggagaaggccccagccctgagtcctctcagcccttcctgggccctgcggttgctgtgatccaggcgtcctcaagcgcccaggcctggggggccgccatcttgctctggcgtggtgtgttgctgtggcaacctggagcctccagccccactgcactctgaaaaatttatcaggaaaacttccatgtttaaaaattaaccatgggattgaaatattaaagatgagctgctttgggtgaggcagagggcaatggatttgggggtagaggagccaagtccttactcccaacaggatggcacctgcccgtcgcccagtttccaggggcctagccatccattcccacccattcgcccctgtccgaggcctcctatgtagatggaggctggggccggggtagggggacaggcagcgagggtcctgcctcccatttcctgtttgtccctttcccatgatactcctggggccctcccgttactctgcctgatggtggggtgcccctcaccagccaggagggcataatgaggcagagggctggccgggctgcccctctccatcccagctgcacctgcagcccagccccagagaggatgcacaggtgcccgggcccagagggcagaaagggggctgtgcccagggctgagcactcctgcctctgcccactagtaaaggagcagggtcgtggaggaagaggagcttggacaaagcatcttgcccccaaatcaatggtcccctcagctgctagggctggccaccccttccccagggctactgttgctcccgggatccccccgactcccaccttcaggcctccctgggttgactccccctctgccctccccccacccagcctgtccatctggcccaggtgagtttcgtcatcccagccttcaactcaaacttcaccctggacctggagctgaaccagtgagtgtggccttgagcccaagaggaagggcagtggtggggcgggggagacatggctagggcctggctgctgggggtctgggggttgggcctgggcagaggggacctgggtcctgacctgaggcgagcctcaagcccgacctcacctcgcccgtgaccccccttcctgctgccccctctgtctcagccacctcctctcctcgcaatacgtggagcgccacttcagccgggaggggacaacccagcacagcaccgtgagtgccactgcaggggaccggggccggggatggaagggaggtgctgtttctgtggttctgtggtcacaggtgtagggacaggtggccactggagatggggtcctgggcctggcccctcagcaccttccct

SEQ ID NO: 18253 - DNA, 2300 bp, Homo sapien
agttcaggcctacagtcaccaaaacaaccctcatggtccccgggagaagaaggccaaagtggggtccaaagctgggtccaacaaaagcactgccagtagcaaatcaggggatgggaagacctccgtctggatttaatcctggcgggcttaaaacctgtgcttttcatagtttatggtaagcagcagctcactgaataatgacttccattgagtaaacatttggctctggttatcttcagggatgctgttggctcatgatccaagctcaggggactctggaggcggggctgggctgagggagagaaagggaaacacagtgttcccaggcacatgttcttagcaataatacagttgcagaactttacatttgtgtcttccagatctggagaagaacagacatatttaaatcattcttgttgaacagtttttgtatgtacagtattatggtacttttttttttttagtatgagaactttttttgtatttgtacattgaactgctgtagttatacttttatattaaaggggaaaaagtccttataaataatgcctattaggctagtgctattactttgttcagcaaattctaccctggctttagagtttttaatagatgctacacctaataaaagtgcctctcatattgcaggaacgatttcagatgtgtaaggagactgaagaggagataccagtttttagtcttggaaagcaagttcacagtagaaggaggttgagatctttcttttatgtgagaaatctttgaatctcattcatgcgatcagagttgtagccaatttttgaaaaccttattttcaaaggaaataaatgattcactgtaggattcctttaaatatcaagcatcaccagtatatgctttgatggtatatgtatataacttaaagttctttcaaaagcctgatacagaaacgtgtccccagtttggtagcaatgtggaaaacctggctagagatgatatggagctgtccctcagaaagcaaagccatgcctggaatccctaataggctgcttagttgtgaacctgtttgatttgccttaagcctctatccagaaacctgcccgcttccgtctggttaagaagccagtggtggatattttctttgttaacattagaaatgcaaacattcccttgtcaaccaagaatactcaaagctacttgtattggaaatggcagaaggcctaaatccaaatttcttattttttataatttaccatagaagttttgtgattaaattcttacttctgccagtggaggtttatgcctgaaaggtcatggggtcctgtctgtaaatagacctaaagagaagtgcagtatttattctttgtaggcataatgtgtttgtcactgacaagcattcatgttcatcccactagtcttttattgcagtcttttattgtcattttcagccttatgttggagagctttgctttctcatcatgttcacattgtcttaagttttgtgagcttctgagaaagagcttggtaaaggtttaaaggggactttgttccaccagggagcattttatttgggcgtctcacccttttctaatgaaagctgttgtaagccacctctgacttggaaattctgaaagtatgaatattttttatatcttaattgtaaaatgccagttctccattatttagatgaatagtagaacactgcaccctttgtgcagtgtttttgtttctctactgcattcctacccccaccaaaaaaaagaaacttaaggaaatttttttttgagacagggtctccctctttcacccaggctggagtgcagcagcatgatctcagctcactgcagcctctgcctcccaggctcaagcaatcattccacctcagcctcttgattagctgggactacaggcatgtgccaccatactcggctaattctgttttaaaaattttttttgtagagatgaggtctcactatgttacccaggctggtctcgaacttttgggttcaagtgatcctcccgcctcagcctctcaaagtgttagtattataggtgtgagccaccatgcccagcctagaaaatttaaccttatcttttagccattcatttacttttatttgcttttttaaaaaaaaatctttaaattttagcctagagaagcacctcaggaactctaaacatcttaggcaaaaattaaactcaggtgagactgaaggagaaatttcagaaatacacatgtacctcatgggtaattaatagacatgcacagtttccttcaaatcaaatgtttaataaggaaattcatataattccaagaaaacagg

SEQ ID NO: 18254 - DNA, 2300 bp, Homo sapien
cgggaggctgaggcaggagaatggtgtgaacctgggaggcggagcttgcagtgagccgagatcatgccactgcactccagcttggccaaaaaagcgagactgtctggaaaaaaaaaaaggctgggcgtggtggctcacgcctgtaatcccagcacttcgggaggccgaggcaggcggatcacctgaggtcaggagttcaagaccagcctcaacatggagaaaccccgtctctactaaaaatacaaaattacccaggcgtggtggtgcatacctgtaatcccagctactcgggaggctgaggcaggagaattgcttgaacctgggaggtggaggttgtggcgagccaagatcgcgccattgcactccagcctggacaacaagagtgaaactccgtctcaaaaaaaaaaaaaaaagatacacatttatctttgtggatggagatataacagatgagttagttctaactaattgtattttcataattttggcttattggaacaaatagaaatttcaggctttggggaaaatctgagcctgcagagaatttgtggatgagaatcatggagttctatgttggaaacctggcttacatcaccatttaaagattttatattatttacttcttgttttgaggttttataacttgtatattcaatgagaaaagaggtggtgagctcagttggaaaacagggctagaaatgggagctgtactggaaattttattgtgttagagtctccctctctcgcccaggcaggagtgcagtggtatgatcatagctcattgcagtctcaagctcccaagttcaagtgatcctcctccttcagccttccaaagtgctgagattacaggtgtgagccaccatgcccagctggattcttttgtttgtttgttttgttttgttttgagatggagttttgctcttgttgcccaggctagagtgcaatggcacaatctcagctcaccgcaacctccacctccccctcccaggttcaagcaattctcctgcctcagcctcccaaatagctgggattacaggcatgcaccaccacacctggctaattttgtatttttagttagttggtcagtccatgttggtctggctggtctcaaactcccgactgctggtgatccacccacctcggcttcccaaagtgctggaattacaggcatgagccaccgtgcttggccgggattcttcatatgtaaatctttttgcttctttattttttgaggtttcgctgtcacctaggctggagtgcagtggcacgatcacaactcactgcaacctctacctcccgggctcaagtgattctttcacctgagcctcccaagtagctgggaccacaggtgtgcgtcaccatgctaattttgggggtgtgtgttgttgttgttgtttggtgaagactaggtttcacatgttgcccaggctggtctcaaactcctgaactcatgtgatccccccaccttggcctcccgaagtgctgggattacaggcgtgagccagagccactgtgctgggccgtgtgtgtgtgtgtgtgtgtgtgtgtgtgtgtgtaagagacagggtgttgttctatctaccaggttggactgcagtggccaccactgccaccacacctggctaatttttttaaaatttggaaagatagggtctcactatattgcccaggcttatgtgcaaatctttatgcggcttcatgccttcactttttttttttccattgttcctttggaaattgttccagttttttttttcctgtatctttaaacaacaacacaaagcacccttttaattaagttactataaacacataacattcaggaattgttttaaatttatttgctaaatgtgggcgccttatggatgacatttggccagagctatgcagagttgccagagcttaataatgagcaataattcatcttggaaacttttctgttttgctgtttaatccagtacagatgcaggtgttttctttctgtgactttttgtgagtagttgtatctgtaaatcacctcccatggagacgggtgttcctgtgactgagagccagctgttgggtgttttagctaaacagcttgctcctagttagctgctcaaatccccctgagaggtgtatcggctgcttcagggaatagagcagatggggtgaaggtttttgcaaggcctttagtgacctgctttcaatttgctgcaattcttctgctttggctttttcctataggtgccagagttcatctgcttcatatttttactactgacgcatcttcctgtcgtatattcttagactgtggtgac

SEQ ID NO: 18255 - DNA, 2300 bp, Homo sapien
acagagtgagactctgttgcaaaaacaacaacaaagtgatttaggccaggcacggtggctcatgcctgtaatcccagcactttgggaggccgaggcaggcggatcacaaggtcaggagatcgagaccatcctggccaacatggtgaaaccctgtctctactaaaaatacaaaaattagttgggcgtggttgcgtgcgcctgtagtcccagctactcgggaggctgaggcaggagaattgcttgaaccggggaggtggagcttgcagtgagcctagatggcgcccactgcactccagcctggcgacagagtgagactctccctcaaaacaaaacaaaacaaaaaagttatttgtactagtttacagttgcaggctgtgagaattttaatattttattcaacaggtacaatgatgttgtttcctgtgttattttagttacatgctatttattatttccaggtattttcagagttttcaccctggtcattttatttttttcacttatttttttgagacagggtctcactctgtcgctcaggctggagtgcagtggcgctatctcagcttactgcagccttgacctcccgggctcaagcgatcctcccacctcatgcttggagtagctaggatcacaggtgcgcgtcaccacacccggctaatttttgtattttttgtagagatgggggttttgccatattgtccaggctggtctggaaccccagggctcaagcaatccgcctgcctaggcctcccaaagtgctggaattacaggcgtgagccaccgcgcccatcccacacttgtcattttaaatacatctgtagagaggcaatgtgataaggcgtggggacagactacagcaatcacagggagaagtacttaaatgctccgaggccaagcaggtcatgaaatgatttaagcagctgagtggggacattgcctacccggacaaggtgactcaagaggagctgccatgtgaaaagagaagctcaaagtaagcagcttttgactttttagggaggccagaaatctggattttaatattttggtaactaattcatatttttggaaaacatactggccacacaaaactggtcagtgcattagatgcctagccttcaagatttccactctggggctaccccttagggcttggctttgggtgggggagtttgacttgcagcaagtaacctcacttgttagcgcttaatttcccctctggtcaaaagggcaaaataataaaagcctgtccatcggcattctgatgctcagatgagatcattccagaggtcgcccatctctttactgagccttcctttattacccaaagtcttactctacttaaagcatttggagaattttcggtttcctactgggcattttaaaactggggattcctatgcatgaaaatttttcccaagtcctctgaatgggatcctgctgggatgcaaagagttaagaggaaatagcctattagggtcttgctaatccgagaagttcaggacctgaaaagtatctagagcactgctaagagccccgactctagctagatccacgcagggcccgccagatcctcgaggaattgtagagcagaacctgggaggagacattagcatcccgtgctacaatggaccaaggcctcggcggagcgcgcagaagacaactctgggcccgctaaaccaacccaggatacccaggtaaggcgagaacccacggcgccgttagcggcccgctcaaactgaggcgcggctggcgggggactctcgcccgaaaatcagcttggaagaatgaactgtccggagcgaagtctgcgcccacccggggtccagactccacgcgggtgactcccacgcgcgccgcgcctccgccgcgtcccggactatccgagagagcggcgaggactcgaccgcggaaagttggcgctcgcgtcgcttcccgcgcgttctggggcgcccccctcccactcgagcgccacgtgccgcgcgccccccgctcccgggccgcggcgggacgcccccgcccccaccgcagcgcgcagtgcgcaggcgccttcccgcgggtcgcggcggcgggagcgggaggcggcggcggcggcggcagcggcgggagcggcttctgcctcggctggagactgaggcgaaggcggcagcggcggaggaggtggaggagaggcgagggtgaaggcgatggcgacgcggggcacatgaggccgcgaccggcgggacgggccgaggcccggcggaggaggcggctccgggggaacccgccgccgggtgaggggcggccgcagggccggctgagga

SEQ ID NO: 18256 - DNA, 2300 bp, Homo sapien
ttttatttctatgactcgcttcaggggagaaaggggcgggagacaggagggcaggagaaggtcagagagagactttgcttctgaggccttccaatctcctttagttcaaagcactcagcacgccaaagctccatactttgggatattgttttctttctttcttttttaaagagatggggtctcgctctgtcttccaggctggagtgtagtggcataatcatagcccactgcagtttcctgagtagctgggactacagccaccacgccctgggaaatcattttctgagcctcaacagtagatattgccagttttgcaaagtccgctgggcacggtggctcatgtctgtaatcccagctctttgggaggccaaggcgggcagatcacttgaggtcaggatttgagaccagcctggccaacatggtgaaaccccctttctactaaaaatacaaaaattagccaggcatgatggcgggcacctgtattcccagctactccggaggctgaggtagtagaatcttttgaacctgggaggcggacatcgcagtgagccgagatcaccccactgcactccagcgtgggcgacagagtgagactctgttgcaaaaacaacaacaaagtgatttaggccaggcacggtggctcatgcctgtaatcccagcactttgggaggccgaggcaggcggatcacaaggtcaggagatcgagaccatcctggccaacatggtgaaaccctgtctctactaaaaatacaaaaattagttgggcgtggttgcgtgcgcctgtagtcccagctactcgggaggctgaggcaggagaattgcttgaaccggggaggtggagcttgcagtgagcctagatggcgcccactgcactccagcctggcgacagagtgagactctccctcaaaacaaaacaaaacaaaaaagttatttgtactagtttacagttgcaggctgtgagaattttaatattttattcaacaggtacaatgatgttgtttcctgtgttattttagttacatgctatttattatttccaggtattttcagagttttcaccctggtcattttatttttttcacttatttttttgagacagggtctcactctgtcgctcaggctggagtgcagtggcgctatctcagcttactgcagccttgacctcccgggctcaagcgatcctcccacctcatgcttggagtagctaggatcacaggtgcgcgtcaccacacccggctaatttttgtattttttgtagagatgggggttttgccatattgtccaggctggtctggaaccccagggctcaagcaatccgcctgcctaggcctcccaaagtgctggaattacaggcgtgagccaccgcgcccatcccacacttgtcattttaaatacatctgtagagaggcaatgtgataaggcgtggggacagactacagcaatcacagggagaagtacttaaatgctccgaggccaagcaggtcatgaaatgatttaagcagctgagtggggacattgcctacccggacaaggtgactcaagaggagctgccatgtgaaaagagaagctcaaagtaagcagcttttgactttttagggaggccagaaatctggattttaatattttggtaactaattcatatttttggaaaacatactggccacacaaaactggtcagtgcattagatgcctagccttcaagatttccactctggggctaccccttagggcttggctttgggtgggggagtttgacttgcagcaagtaacctcacttgttagcgcttaatttcccctctggtcaaaagggcaaaataataaaagcctgtccatcggcattctgatgctcagatgagatcattccagaggtcgcccatctctttactgagccttcctttattacccaaagtcttactctacttaaagcatttggagaattttcggtttcctactgggcattttaaaactggggattcctatgcatgaaaatttttcccaagtcctctgaatgggatcctgctgggatgcaaagagttaagaggaaatagcctattagggtcttgctaatccgagaagttcaggacctgaaaagtatctagagcactgctaagagccccgactctagctagatccacgcagggcccgccagatcctcgaggaattgtagagcagaacctgggaggagacattagcatcccgtgctacaatggaccaaggcctcggcggagcgcgcagaagacaactctgggcccgctaaaccaacccaggatacccaggtaaggcgagaacccacggcgccg

SEQ ID NO: 18257 - DNA, 2300 bp, Homo sapien
aatcccagctactcgggaggctgaggcaggagaatcacttgaacctgggagcggaggttacagtgagccgagatcgtgccactgcactccagcctaggtgacagagcaagactccatctcggaaaaaaaaaaaaatcccaaaccaaaagacagcctagagagtctgtctctcacaactagggtattttatttacatcccacattgttcataagagtatccgagggagtgtaacttgggggacccaggctttctactcatccttgttcctgtatctccatctccgttctcctcatcaagcctgtctctgatccagccacttaattccatgggaattaaaagactgaatctagttaggggctcccctccatttggtctttccttactttccagtgcctggagctttggcttgggactcagcagactgggggttaagaccgatcccctgtcctttcccctcccctctccatccctgacttcaaagttttcataaagcccaagtcactgcttccctgaccccatagtggcagctccatctcagcttttggtcggttcaaaacagcagacgctgagccctggcctggccgcccgttctcctcgttctagccatctcttagggtaagcaccagcatgccaacgacctggggggccaccagtccttgctcctccaggagaggagggctaactaggatagaagctgactcaagggcaggcacagtggttcatgcctgtaatcccagaactttgggaggctgaggtgggcagatcgcctgagaccaggagttcaagattggctgggcgacatggcaaaactgtctctacaaaaaatacaaaaattagctgagcgtggtagcatgcacctgtagtcccagctacttgagaggctgaggtggaaggactgcttgagtctggagggtcaagcttgcagggattgacactgcactccagcctgagtgacaaagtgagaccctgcctaaaaaaaaaaaaaaagaagaaaaagaaaagagagtttgccgtatggttaggcttagaaggtatcccattggacagggcacggtggctcatacctgtaatccctgcactttgggaagccgaggtgggcggatcaagaggtcaggagttcaagaccagcctggctatcagggtaagaccccgtctctactaaaaaaatacaaaaaattagctgggcatggtacacacctgtaatcccagctacttgggaggctgaggcagaattgcttcaaccaggacctgggaggcggaggttgcagtgagccgagatggcaccactgcactccagcctgggctacagagcgaaactccgtctcaaaaaaacaaaaaagggccgggcgcggtggctcacgcctgtaatcccagcactttgggaggccgaggcaggtggatcatgaggtcaggagatcgagaccatcctggctaacaaggtgaaaccccgtctctactaaaaatacaaaaaattagccgggcgcggtggcgggcgcctgtagtcccagctactcgggaggctgaggcaggagaatggcgtgaacccgggaagcggagcttgcagtgagccgagattgcgccactgcagtccgcagtccggcctgggcgacagagcgagactccgtctcaaaaagaaggcatcccattggcagaacccttgtttccagcccagggatgaaggtagccagttggtaattgtgaagaacctgcctggaaagagatggacctggaaaaacaggagcagctcaggaaccagaatgtgttccttagtactcatgtgcaaaatatatgctaaattacatgcaaatcaatgtccaatcattataatctctggcaatttggtaactaatgctgttacactatctggtctaggacatttctggctccctggggccagatcctgctctgtagctcccacaggagaaaccatcacagaccaaaggccagcgggggccccagcactcaaggactgtttctcccaccaccatctgtggacttttccagctgtttttcttggcccaaggatcacacccatagggatgcagatgggggaaggggaagctgagaaagcagtgaagacagaatgagctggggaagaggcagatggtaggaaatggagacggagaaatggcactaatggcccagccacctgagatgggatacctgggagggacatcttttcaagtagaggctgtgttggggcatggtgagagagggtcttagcaggtaaccttcctttcctctccagactgaggaatcagagttctgattgtggagtgcctctctctaggacggggct

SEQ ID NO: 18258 - DNA, 2300 bp, Homo sapien
aagcacagtggacacacacatacacaaaatgtgtgtggccattccggtggacaaaacagcaaaacctagcaacaagataaaatagcaattaaaatttattagtgctgaaaaatacttagtatcttatgtcagactggaatggattaataaaaaaaatttatagagcctgcctcagtagagaccttgagtctactgagggtgatttagcttggccctgccctgacaggatccacagcaaggtgaccttttttggttccttccagtgcacaatgatcctctaaatctgagaagtctgtaaatagacttctgtttaataggtgagggagtttctgagtgggaggagatgctgcttttcagacaccagggggcagcactgggagtaatcaatctgagtgcttggtttattggctgggatggggatgtaaccaagttggctttgcctgtggtttgaagggtaggtagcagagatgccgctgaaaccaaacttttgtccttgccaagagctttgtctccatagaagagagccttgtgaaggagttcttcagatatttctttggacttcccttgtctccctctagcaccatgctcaggctctcactacagctgacatggtgtcttacaccctcacaggttgtaggtgacgtggacaccagcctcccacggaccctagacgagcttggcatccacctgacgaaggaggagctgaagctgaacatccgccccttgctcaggctggtctgcaaaaagttctttggcgagttcacaggtaataatgtgctcgtggccccttaactctgtcatcctcgtgccctgccacaggtatcacagcaattttttctcacccagcgatggaggtcagaaatctgaggatcttttcaacaaaccacagattcagatgcagaacactggtgtttttcctagctgctttccttagtggatgatggcacacattctatcttgggaaccaaaaggaattacattttcctgccaggaggagtgttcaagtaaatgagatggggaggcaggctctgtggttctggtatattttccagggggcagccgggaaggtggatgcttgggtagtgtgaaatagtgcaaaaagcactaggctaggacttgggagacttggttagttacacagaaggcacgtgatacagcagaaagacactggactggttgaaaaaaccacctgagtctgtctcgatcctgccctggccattccatgagatgaccctgggccagccacctaattcttcatgactctgatttgttatctgtaaaatcagggaagtggaaagggtgatggctgagggtcttctcagcagtctctgattctaagtccggtgggaattaggtgtctgggcccccaaggtgcgtagttttaatagcttattttggtctgcccatcaatctgacacaccagataccattgaaggcacacaggcctatcccagtgtgctcatgggggttccctcttatgtggtttattaatgtgttcagaaaacggggtaacttattgaatagagatgcatgcagtgtttctcaaggggagtcaggttgggaattgttttaagtagatgttagatggggtgcttattttgttccacgtaaatgcgtatagccaataaaagttcatagatcgatgtactttaaactttttgtcagctgagttccaaggaaccatgtaccactgatacctgctgcttgctcttttctggcatcagggtgactccaaatcttctagcagcacattcccaggaagcaggctatcactatctatagtgccagagcttttagagctaacaatcagtccccgcactttgagctttttgaccattgtgaatggctcagtaactcctgctcgtgctccctgggaaggcatgtattaatggctttctcttctccatccacaggctttgtggacatgtgtgtgcagcatatcccttctccaaaggtgggcgccaagcccaagattgagcacacctacaccggtggtgtggactccgacctcggcgaggctatgagtgactgtgaccctgatgtaagggcatgtggctccccggttctctggtctttttttccccttcctgtgtggggatactgatttctggtcacaggagtaatgcccactttcccacccttgcctccccatccccatgagcacagtcaggcctgaatgcaaagcctgatgttgccaccgctagtgctatgaccttgggaacattactcacatttcctgagcctcaaggccttggtctataacacgagcataataaaatgtgagcggttgttatgagatt

SEQ ID NO: 18259 - DNA, 2300 bp, Homo sapien
tgaaccaccacccccggccaattttttttaattttaatttttattttttatttatttatattttttttgtagagatggagtcttgctatgttgcccaggctggtcttaaactggcctcaagcaattcttccaccttggccttccaaagtgctagcattacagatttgagccgctgcacccagcctgggctctagaatcagcctcctcttcaccacataccaaccatgtaaagttgggcagattacttaagttcagtttctgcttcagtaaaaaaggaataatatttgcctaacagcaatagtagcaaatattattaggcatttatagtataagttaacataacttacaagggatgttataagaaattaaatagatatttgatggaacacagcacagtgcttgcaatgtagcagctgatgtgctgaataatgttagctgctattatcttataattaacacagtctaaataaattaagaactgtttgctgtgtttctgtggatatacctgcttctcaacaagatggatttagggcttgcattgatacatatgagtgatggttatgataccttagaatataatatcaaagggcctttgaaacagaggttaaatatatcttaaagacagtcttactacaggctgaaagatgtgctagatgacttcctgcagcccctcaaatgggcctgtgaggaggccgtcctactgaaagaatgcctctccaactgaaagaatgcctctccatttaaggattggggatggaacctgtgtggctagagacagataccttcaggagccttcccagtgtgtagcactacttttcaaaaggaatatcttcaccccatctctgcaaggactgagaatgactagagcccagtgtgacatcatgagtccaaaggatgaaatgacaaatatattttaataagaaggccaagcgtgatagcttatgcctgtaatcccagcactttgagaggtcaaggcaggaggatcccttggggctaggagttcaaggccagcctgggcaacatagctagactctgtgtctacaaaaaataattttgaaattagcttggcgtgctggcatgtgtttgtagtcttagctactcgggaggcagaggcaagaggatcacttgagccaaggagttcagggttatagtgagctatgattgtgctgttgtactccaatgtgggtgacagagtgagatcctgtctcttaaaaaaaaaaaaaaaaaaaaaagaggccgggcacggtggctcacgcctgtaatctcagcactttgggaggccgaggcgggcggatcatgaggtcaggagatcgagaccatcctggctaacacggtgaaaccccatctctactaaaaaatacaaaaaaaattagccgggcttggtggcgggcgcctgtaatcccagctactgaggaggctgaggcaggagaatggcgtgaacccgggagacggagcttgcagtgagctgagattgcaccacggcactccagcctgggcaacagagcaagactccatctcaaaaaaaaaaaaaaaaagtaggaagtgggatagagctgaacttaacctgatttactaaaataggaagtcaagaggtcatgtttcaaacctctaaacaagaggccaggcacagtggcttatacctagaatcccagcactttgggaggccaagcaggatattgcttgagcccaagagttcaaggttcaagcctgggcaacatggcttttgtatctcatctctacaaaaattagccaggcttggtggttcatgcctgcagtcccagctacttgggatgctgaggagggaggattgcgtgagcttgagagatcgaggctacagtgaatggtgattgtaccactgtgctccagcctgggcaacaaggcaagaccctgtctcaaaagcaaaagaacctctaagcaagaaaaagtaacataaacatattacttagaaacctgaaggtaaatactctaaaagcagctttaaaagtgttgaaagcagttgcctctagggagcataacttgggggtagagtgcaatggggtagagggctgttctttataagccatacctttatttctatattgggacattccataagataatgtgccagtaaggctagggttgtggatttgatccccttgtacaactcgttttcttataaatgttagtgaactcagatgctcgtggtttctgcatggcttttaagattgaaagttttaacactgtaaaagccaaacacaaaagaataaagagtatggcagtgagggtaaagagcagagttgcttttcttcatttcctttctt

SEQ ID NO: 18260 - DNA, 2300 bp, Homo sapien
cctgcctcaacctcccaagtagctgggattacaggcacccgccatcacacttggctaatttttgtatttttagtagagacggggtttcaaccatgttggccaggcagtctcgaactcttgacctcaggtgattagcccacctcggcctcccaaagtgctgagattacaggtgtgagccaccgcacccggccacattttacatttttaaataattgagaaaaaagtaccaatgctaacacagccaatagccaagacagcaccttgcataagtaggaactggataaatgttaactgaatgggatgtttaattttaagatgctgatatttcttggattagactgatacctccaactccctcaatgccacctgctgggtgctgaatgtagagagagaattggagctccaaggaccaataattaaatgtaaattattatggaaactttcacatgcatattctttttacttctaaaaagctactatcgcatttatgcttatctcattctcccaagaccccagtcaagggattgaagaaattatttatttattttatatatattttttgagacagagttttgctcttgttgcccaggctggagtacaacggcacgatctcagttcactgcaacctccgcctcctggtttcaagcgattctcctgcctcagcctcccgagtagttgggactacaggagtgcaccactacgcctggctaatttttttgtattcttagtagagatgggttttcaccatgttggccaggctggtctcgaactcctgacctcaggtgatccgcccgcgtctttctcccaaagtgctgggattacaggcgtgagccaccgcgcccggccgattgaagaaactgttatagaaagctgttcatggaacaagccaagctcatttctgcctcagggccactgcacttgcctttctctttgtccaaaacgctctcccctttgatatttttcaccttgttcctttatttcaatcaagtctccactaaaatgtcatcttctctgtcactctaaaaagtcccccatacatactctccaacttcccactttcactgttttattgctattcacaaatgttatacatttatcactagctgacttgtatctagttgtttactgttcatttccccaactacaattgaagcaaagactttgttcacttagtactgtgcctagcatagactaagccctcaataagtatttactgaactaatgaatgactctaacaaggtacacagaatatagctgatttgcccacagttacacaaaactagcgactcatggtaacaaacctcactgccgcttcccgctacaatgcaggagctcagaggacttcggagggaacttggcaaagaacggctgaaagcggcacggatagaagaggaagtgagcgaggggactggacagttagagcaccactcctacctagcgatacgattttacggactgaggctatagaggcagccccgaaatcgaggtgtgtgcgtgtgtgcgcgcttcggaagccttgggaaggcacgaggacgacagggtcttccattctttttcccgctccaggcctcaatttaccgatccgtaaagcgaaaggggccaatagcatataaggccccttccagatctgacgctttttaatttcctatcccacctggagcaacccttccgtgccgctgacccgcttcaacttacctctcgcctgctcagctaagagttcccaggccgctgccggagatcgtgcttccgccccacgccgaggaaacgcctgcgcccgccgccaggaaggaccccgcagacgccgctgtcgcctttctgcccgggaggacaaccctctgcctgaggaccagttccgaggtatgcccgccgcggactggcaaggcggagtagcgggtccccaagacgagtagcccaagacgtgggctgctccaaagagggtgagagctgaggatgaacgaatctgatcaggcgcctcgggaccaccctgaaaatggggggaggggccttcgggcagatcacgtggtcaggctgttagcgcagttgctaggcaaccacagctgcgggcgtggtctgcgcggggttgccctcctgttctggtttatcaggggatccccaaagaaagcaaggggaccaaggccgggactgctggggtgaaggtccgggaggctgagtaaggggacggaagggttagttctatgtattaaatgcctggggagggctgagaactggacacctgatttcggttactggccaccccagccccttcttggcgttcagattccctacgttggggtagggtg

SEQ ID NO: 18261 - DNA, 2300 bp, Homo sapien
ttccgctccagtggcttcagatgtgatgcaaggacaatacccctgtaggcaaaggacagaaattaggcaatggacttaatgctgtgtctgtgggtgtgaggcagctagactttgcatggtataggataaacctgttacggaccaatatgaccataataataacaacagcgatagctgactgctttcaagcacctcacatgtgtcagacacttgctcagtcttatgtgcaagaactcatttaattataacagttactgttctacagataaataattgagactcagagaagttaaggaaattgcataagatcaaacagtagacggtggggccaggactgaagcccagaatggtttgatttcagagttaactactataatccaccataacaggagggcctgagaaaaatggcagtgagccaacctgaactcctcataggaagccaccctctgttccactgcccgtaacttggcagcattctcccgtttgtacttctcatcagcagtgagtgcagcctgcagctctttctccaaagccttgaagttgatgatgtcattcctttccatggcctgtgcctgggaaggcaaagggaatacatgtcagtggacagtcaatatcaggggaaagagggtacctctgaattattcaccagaacacaaaatgaccccaaagcactctggacatcatgtcactcagattgggaggtgttacaaaaatctggttttctattttacaaagacaagttgaatttcacagtgaggacttacacaagacttgtccctgaaaatagaatacagagtcctgactttcaatttggagttctgtcttaattttgctctttgcctctaaaaatatttttaattttggtgcttcagtcgaggaggcattgggatctcagaattcagtttcttcactcttcccccataggattgttctacagcaagtcgtttcgacaggggacctcacacaaaggcagaactcttgttagttacccttgagctcggggataaagtttcattcttcattgaatgtctttaatgaggaaggagactttcacccaaaccagatgcaatgactgagcaggaaatcaagtagaaggggcaaaggaaggagctcaatgaccccatccccaaatccctctgtccagcccagggctggaacagaggtccctaggtacctgggcaatgcctttagttctatcactgtacttctgtagtttctgcatatctgaggctgactgatcatttctacagagatattcttttctttttttttttttctggctctgttgcccaggctggagtgcagtggcgcgatcttggctcattgcaacctctgcctccggggttcaagcaattttcgatcctgacctcaagtaatccgcgcgcctcggcctcccaaagtgctgggattacaggcgtgagccactgcagagagattctctacgtgggttctagtcgtggctctggcatttacttgtgggacctctctgaactgcaaactcctagtgagttgagctagattttgtggcggggtcatcaccaacagccctagcgcaaggaagcaggaagtccccaaccaatcccatagccaccctaccccaacgtagggaatctgaacgccaagaaggggctggggtggccagtaaccgaaatcaggtgtccagttctcagccctccccaggcatttaatacatagaactaacccttccgtccccttactcagcctcccggaccttcaccccagcagtcccggccttggtccccttgctttctttggggatcccctgataaaccagaacaggagggcaaccccgcgcagaccacgcccgcagctgtggttgcctagcaactgcgctaacagcctgaccacgtgatctgcccgaaggcccctccccccattttcagggtggtcccgaggcgcctgatcagattcgttcatcctcagctctcaccctctttggagcagcccacgtcttgggctactcgtcttggggacccgctactccgccttgccagtccgcggcgggcatacctcggaactggtcctcaggcagagggttgtcctcccgggcagaaaggcgacagcggcgtctgcggggtccttcctggcggcgggcgcaggcgtttcctcggcgtggggcggaagcacgatctccggcagcggcctgggaactcttagctgagcaggcgagaggtaagttgaagcgggtcagcggcacggaagggttgctccaggtgggataggaaattaaaaagcgtcagatctggaaggggccttatatgctattggcccctttcgct

SEQ ID NO: 18262 - DNA, 2300 bp, Homo sapien
catcacatgtccaaatgcagagcataccctgggctgggcgcagtggcgcacaactgtaattccagcactttgggaggctgatgtggaaggatcacttgagcccagaagttctagaccagcctgggcaacatggcaagaccctatctctacaaaaaaagttaaaaaatcagccacgtgtggtgacacacacctgtagtcccagctattcaggaggctgaggtgaggggatcacttaaggctgggaggttgaggctgcagtgagtcgtggttgcgccactgcactccagcctgggcaacagtgagaccctgtctcaaaagacaaaaaaaaaaaaaaaaaaaaaaagaacatatcctggtgtggagtaggggacgctgctctgacagaggctcgggggcctgagctggctctgtgagctggggaggaggcagacagccaggccttgtctgcaagcagacctggcagcattgggctggccgccccccagggcctcctcttcatgcccagtgaatgactcaccttggcacagacacaatgttcggggtgggcacagtgcctgcttcccgccgcaccccagcccccctcaaatgccttccgagaagcccattgagcagggggcttgcattgcaccccagcctgacagcctggcatcttgggataaaagcagcacagccccctaggggctgcccttgctgtgtggcgccaccggcggtggagaacaaggctctattcagcctgtgcccaggaaaggggatcaggggatgcccaggcatggacagtgggtggcagggggggagaggagggctgtctgcttcccagaagtccaaggacacaaatgggtgaggggactgggcagggttctgaccctgtgggaccagagtggagggcgtagatggacctgaagtctccagggacaacagggcccaggtctcaggctcctagttgggcccagtggctccagcgtttccaaacccatccatccccagaggttcttcccatctctccaggctgatgtgtgggaactcgaggaaataaatctccagtgggagacggaggggtggccagggaaacggggcgctgcaggaataaagacgagccagcacagccagctcatgtgtaacggctttgtggagctgtcaaggcctggtctctgggagagaggcacagggaggccagacaaggaaggggtgacctggagggacagatccaggggctaaagtcctgataaggcaagagagtgccggccccctcttgccctatcaggacctccactgccacatagaggccatgattgacccttagacaaagggctggtgtccaatcccagcccccagccccagaactccagggaatgaatgggcagagagcaggaatgtgggacatctgtgttcaagggaaggactccaggagtctgctgggaatgaggcctagtaggaaatgaggtggcccttgagggtacagaacaggttcattcttcgccaaattcccagcaccttgcaggcacttacagctgagtgagataatgcctgggttatgaaatcaaaaagttggaaagcaggtcagaggtcatctggtacagcccttccttcccttttttttttttttttttgtgagacaaggtctctctctgttgcccaggctggagtggcgcaaacacagctcactgcagcctcaacctactgggctcaagcaatcctccagcctcagcctcccaaagtgctgggattacaagcatgagccaccccactcagccctttccttcctttttaattgatgcataataattgtaagtattcatcatggtccaaccaaccctttcttgacccaccttcctagagagagggtcctcttgcttcagcggtcagggccccagacccatggtctggctccaggtaccacctgcctcatgcaggagttggcgtgcccaggaagctctgcctctgggcacagtgacctcagtggggtgaggggagctctccccatagctgggctgcggcccaaccccaccccctcaggctatgccagggggtgttgccaggggcacccgggcatcgccagtctagcccactccttcataaagccctcgcatcccaggagcgagcagagccagagcaggatggagaggagacgcatcacctccgctgctcgccgctcctacgtctcctcaggggagatgatggtggggggcctggctcctggccgccgtctgggtcctggcacccgcctctccctggctcgaatgccccctccactcccgacccgggtggatttctccctggctggggcactcaatgctggcttc

SEQ ID NO: 18263 - DNA, 2300 bp, Homo sapien
aaacagagttactctgtctgatgggtttttgaaacctaatttgaaaactccagatttagaccagctccccatttgtcagatggggcactgaagcctttgtccaggctcacatagcaagagggacggggccagagcctggatatttcccccaaacgcccatgcttcgcaattgtctaatcttccttgtaatgtgtggcccgtgcagatatagaatgagtttcctctgtgtccattttaatttatatcctgccttttttcaaaaaggccttgaggctgctttataaaatgagtttgtgttccctcagcacaccctgactgagggcagtggagggggcttcagagatgtccaggccagtagaactacctgaggataaaccattttccatggataattcccactgagataattgtgtttattcttttatcataggtgtgccttacagaaagaaaatatgctttattagaatctaaatttacaacatcaataatctcattaccttcatcatttccttcaagtagccccccagtgcctgtgaaatacgccttgattcacacatactttttcaggatcccagtcattaaatagaaagcatagacggaatgcgtttttgagggccttcttagaaccacaatgaacatagcctatcttacataatctcctcttatcctaaccagcaagatggtattatttccattttacaggaaacaatagttagctagacctacagtgcttattacatgtcaggtattctttaaacattttgtctgtaaagtaactcattcagtctttccaataaccctatgaggtgggggcatttgttatccccattctaaggttgtggagactgaggttaaccagtgcatccaagatcacacagctgggaggtattggagccaggatgtgagtgggaaactggcagtctgacttgagctgggctcttaactgcccctttgcactgcccttagggtagatgaactcatgattgcagctctagtaggtggcagagccaagagaagactcagaccttctgagtccagggccacctagtgccatttccctacttctcagatcactgtctttgtcatggggcgtgtttagtgggtgacacctcccaccattacccgtggccatcctggtcggccttggccttcagcaatagcagagcaggagctgtggctgagagggtggtgagtctggctagcctgtctggggtgaggcaggagggagccaggggaccagttcagactcctcaaccacagctggagtgatgaggacaggtgcatggcatagaggctcctggtcaggctgagtctgagcagggctgggaatcccctttcttctgttccaggttggccctaaaggtgctgtgcgttgcccagcggcagtactccctgctccaagcagccaacctcctgacgcccgacatgatcacagagtttgagaccctacagcagctggtgcaagaggaaaaaattgagcctggggcagaggccttgaggacttcaggcctggccaggggggcacctctggctcaggagctgtgttcagagtcaagtgagtctcatcctgctctcccctgcctgtcttcaaggtgctgtcttcaaggccccactggggccaaggggtgtccaggggcctcagttgctgggttttgctgctgtaggaggctgggcccctgggatcctagacttctgcacacagagaggccccaggagacctgaggggttatgggctccttcatgtctccagtgtctggctccccaagttctacaaactctccttccttctgtgcagtccctgtgccgtctcctctctgcccagagcctccaggatacactggccctgtgacccggactatggcgaggcgactgagtggccccctgcacaccctgggaatcccgcctggacccaactgcaccccagcccaggggtcccgatggcccatggagaagaagaggaggagaccaagcgccttggaggcagacagtcccatggccccaaagcggggcaccaagcgccagcgccagtccttcctgccctgcctaaggagagggtctctgcctgacacccaaccttcacaggggcccagcacccccaaaggagaaagggcctcctccccctgccattcccctcgcgtttgcccagccacagtcatcaaaagccgggtgcccctgggcccttccgccatgcagaactgctccaccccgctggctctgcccactcgagacctcaatgccacctttgatctctctgaggagcctccctcaaagcccagtttccatgaatgcattggctggga

SEQ ID NO: 18264 - DNA, 2300 bp, Homo sapien
ttgttggggagtgtctgttcccgactcagcaaaaatgctgcagtctgaataatcggcagctcattatctgtctcctgcttatcaggtcctgcccagggccctggagaggcaaggatgctctggtgcgacatccccctgatctcccagggaacaaccatgagctcctaccgatgacccagggcccctctgctaggggtcccctgttataaggagagaggacaccagggtccttatttctgccctggctttgtggtctccaacaaattgcttcaaccttggccttgactggggatcatagcccccggtctccctacttcttggggatgaagtactaataaaatgtgacaaatctccatgtttggaaacgtcctaacagccagatcgttgaaaataatttccctttgattttagaatttagaatcttggaccactaggtactgagtagatcttagattttccagttcagtggtttttcagatttttttttattgtttttagctacaaaatactttcttcaaatgaaatcttatgctgaagtctaatgcatagaacagtcaaaacagagttactctgtctgatgggtttttgaaacctaatttgaaaactccagatttagaccagctccccatttgtcagatggggcactgaagcctttgtccaggctcacatagcaagagggacggggccagagcctggatatttcccccaaacgcccatgcttcgcaattgtctaatcttccttgtaatgtgtggcccgtgcagatatagaatgagtttcctctgtgtccattttaatttatatcctgccttttttcaaaaaggccttgaggctgctttataaaatgagtttgtgttccctcagcacaccctgactgagggcagtggagggggcttcagagatgtccaggccagtagaactacctgaggataaaccattttccatggataattcccactgagataattgtgtttattcttttatcataggtgtgccttacagaaagaaaatatgctttattagaatctaaatttacaacatcaataatctcattaccttcatcatttccttcaagtagccccccagtgcctgtgaaatacgccttgattcacacatactttttcaggatcccagtcattaaatagaaagcatagacggaatgcgtttttgagggccttcttagaaccacaatgaacatagcctatcttacataatctcctcttatcctaaccagcaagatggtattatttccattttacaggaaacaatagttagctagacctacagtgcttattacatgtcaggtattctttaaacattttgtctgtaaagtaactcattcagtctttccaataaccctatgaggtgggggcatttgttatccccattctaaggttgtggagactgaggttaaccagtgcatccaagatcacacagctgggaggtattggagccaggatgtgagtgggaaactggcagtctgacttgagctgggctcttaactgcccctttgcactgcccttagggtagatgaactcatgattgcagctctagtaggtggcagagccaagagaagactcagaccttctgagtccagggccacctagtgccatttccctacttctcagatcactgtctttgtcatggggcgtgtttagtgggtgacacctcccaccattacccgtggccatcctggtcggccttggccttcagcaatagcagagcaggagctgtggctgagagggtggtgagtctggctagcctgtctggggtgaggcaggagggagccaggggaccagttcagactcctcaaccacagctggagtgatgaggacaggtgcatggcatagaggctcctggtcaggctgagtctgagcagggctgggaatcccctttcttctgttccaggttggccctaaaggtgctgtgcgttgcccagcggcagtactccctgctccaagcagccaacctcctgacgcccgacatgatcacagagtttgagaccctacagcagctggtgcaagaggaaaaaattgagcctggggcagaggccttgaggacttcaggcctggccaggggggcacctctggctcaggagctgtgttcagagtcaagtgagtctcatcctgctctcccctgcctgtcttcaaggtgctgtcttcaaggccccactggggccaaggggtgtccaggggcctcagttgctgggttttgctgctgtaggaggctgggcccctgggatcctagacttctgcacacagagaggccccaggagacctgaggggttatgggctccttcatg

SEQ ID NO: 18265 - DNA, 2300 bp, Homo sapien
gcggctgcgggagggggccaacatcaaccgctctctgctggcgctcatcaacgtcctcaatgccttggccgatgcaaaggtaaagcagcacaggccagtattctccccaggatagcaactgagcacctgaacccagggccaaaggccacagggccccatcctgggtcagtgccatcagtcgcctcaccccacacctgcttactgccccccagggccgcaagacccatgtgccctaccgggacagcaaactgacccgcctgctcaaagactccctcgggggcaactgccgcacagtgatgatcgctgccatcagcccctccagcctgacctacgaggacacgtacaacaccctcaaatatgccgaccgggccaaggagatcaggctctcggtgcgtgccagccagggccggcttgggcgtggggcagctccagccggggagcaggaaagggtgggacccaggcagctccaatagatccctgggccaagtgtccccaaggcagaggaaggaagttcctctggcctggacatggtggctcatgcctgtaatcccagcactttgggagaccaaggtgggcagatcaccagaggtcaggagttcgagaccagcctgggcagcatgatgaaaccccatctctactaaaaatacaaaaatctgctgggcatggtggtgggcacctgtaatcccagctactctggaggctgaggcagaagaatcgcttgaacccaggagatgaaggttgcagtgagctgagataatgccactgcactccagcctgggcgacagagctagactctgtctcaaaaaaaaaaaaaagaagttcctctgtcttcagagagtctttgtgatagaagcgacacagtccccatccctgggtgggaagccaccagctgagaggggcaagatgttctccaaaaccaagggagacggcaggagggtggcctctcattggccagtggtctagttcagacttgtttttagcagtgggagcatattttcagcaaaacataaacaccaatatatgctttctgccacatctgcttgacccctctcttcctccctccccccagggagccctggctctcctgggaccactgcaagaacaccctaaccctggcaagaaggtcttagtcgtggagtcaggggtcttctgcccctcgctgtggtctcaggcatgatactgaccttctctgctgtgtctccccacttgcgagggtgggtcatggggacgtgggagagacctagtgcagtgcctggccatcggcggtggctgataaaagctgctttgaatgaacaaataaatctctctcctgttccccatctcagctgaagagcaatgtgaccagcctggactgtcacatcagccagtatgctaccatctgccaacagctccaggctgaggtgaggagcccgccttgggggcaggctggagggccgacagccagaggcaggagcttgagggtgtggcgggggctctgtctgcccctcccctcctgtgcttagctggggctctcaggggctgggctgcttctgttccaggtagccgctctgaggaagaagctccaagtgtatgaggggggaggccagcccccaccacaggacctcccaggatctcccaagtcgggaccaccaccagaacagtgagttccactgcccattcccgcccccaccctgcagctcagccaggatggggagccaggccctcttctccagtttctggaggactaggactccttgcttctgctccaatccctagggttaagggtttgcacccagtgcctgcccagcaactgactgtcacctagagtgctgtgtccaatgagtaaatggcaccccagcccgtaagagcagggcctactattcgagagaaggtgaacttaggggtgtgtgtcattgtctctcaaaccagaaaatccctgactcctcctaccctcagctactgcccatttgtcacctaagcatctgtcccttatggactctatacgacctgggtgccacagagatcccacccgctccctgctctcccacctggcccacatcctgcctctcaaaccctcctttcccgcttagccttcccagctcccccttgccaccccaccctcccagccagccctgcaccccagagctccctgcagggcctagagcccttcaagaggagagtctggggatggaggcccaggtggagagggccatggaagggaactcttcagaccaggagcagtccccagaggatgaggatgaaggcccagctgaggaggtaggacttgggggtgtgaggcctgggtatcgggagggcttgga

SEQ ID NO: 18266 - DNA, 2300 bp, Homo sapien
gggtggcgggcgagccccagcggcgtagcagaggaggggcccccgagcgagcgtactagggagaagggggtccgtgcaaatcccaggctgacgaccgcgcacgcgcccctcgggtcaccagccctgtcgctcttggtggggcacaccgaggagaccgccgtggggaaccggggaccggattgcctgacagccgagcgctgaagactactcttcctgagcctagggaggtctggctgccctgagccccctacccctgggctttgggcagtaaacggtacctagagactctatcgcgctgaggttggaagagcctggagccaggctacgagtttgagtcccggctctcccacttattagttgtgtgactttaagcaaatctcttaacttcccagagcctcagttctccatctgtaaaattaaaataatcttggattttacttctttggactgatgtgaagatcaagggtgatcatgtatgtaaaacattcaacacagggcctagcacagagtaaaccctgaataaatgctacttattgaaaattttttagctccctccttggtggtggtggggtcactccaacctggcctcagccattagtgcttggagggtcctctttcacagccccctcgttggatgtccctgtgtccttctactcccagccctggatgaggtgagcgacctcaaccttgggtagggaaggccagggaatcattttgcccatggtgaagggtcaacagggagagtgtgagccggcggggggtagctctcgggagaggagaggctgggatgtcattctttagcagccggccagtcgcctccgaatggctgaatcctccccggtgggccggataaaggagggcgaaggaggagcggtggagcagcccgacctgggcctcagataatgtgacaaatattttgatggaagcagacacgtttcggtttatgcaacctaaacactttgctgcacttgaggaagaggagagcctcccacagcctgatggggagaagagttagggggcggcggaggaggctggggagtgagggaggaggagctgaggggctggatgagatccacccctcatcctggaggctggaaaagggggttacccctcagggacgtatttgcatctgtcagcatggagaaataacgtgggggtgcccacctttttaggatccccttttctccctggtctagaggcagaagtaaagggattgagcagagggagatggaagaaaagggcccaggaaaaagcagcctggccacagttcggtgaggaaggggcagaggcgaggaggggttggaagctcctgccccacctcgggggagacgggtcccggaacagtcagatccagaaaggaggaggcggctgccgtctggctccgctgggcccccggacaggcattcatccgatatctggatctcccagacgggtggtctgcgaggcctgagtgccaaatggtcccctccgtatcctcttcttcgcttcataaccccctttctcatcctaccttccagctccccgctccgtcctcccctcaatcgctctttgtcccctgcagacctgggcgctatcccctcgcttccgccccctgcgggtcttggcccgtcgcgaccccagtccctctgttttcctggtgaccgaccctcgaagcctctcctctcccgatcccctcggagctctctagctctccctgtggccctctctccctttcgcattttggtccctactctccccttcccttggagcgcctctcgggtctctcggaccccggcccccaccccatttccgaatctcggtctccgcgtactcagtctcttctttcctctccctgctcccgcccggggtctccgcggccccgcccccttatgccccgcccacctcgaggcgcccgcggcccaattaggcgccggccccgcccgcagccccacccctagagagcccagagccgcgcggagctggcggggcggggcccggccgagggggcggtggcccggctcaaggaggcgggaggagtcaggcgggaggctgcaggcgggaggcgggaggcgggaggcggcggccgcggcgctcagtccggcagcgcagcaggagggaggcgcgaggcaggagccggcggctgggctccgcagcgcagccagcgcagcgcggcgccccgggcccggccccatgcccgcagccccgccggaccgtccttgagcgcgggcgcctagcccgcgccccctgcccgccggcaccattgccccgacggcgcggccgggcggcccggcgctccccaggctccgcgcgggccgaaagac

SEQ ID NO: 18267 - DNA, 2300 bp, Homo sapien
ctcctgcctcaacctcccaaagcactgggattacaggcgtgaacaccgtgcgtggcctagaaatgattgttaaatagttgattaatgtagctaggtctctccatttggatgatgactccgtggtggatagtttcctctctccacctctggctttccggggtgagaatgagcagtggcagatttcaatttctaggttggtcccctgctgccccaagccaggcaccaactcagccacatccaagcagctgcctcccctgtcatttggtgtgtcctcacgggaggcaaactcatttcagtgtaagctcaagcaaagtgtaattaggacagtaaatctgctgcttaacggcaacaaaaaaagtcctatggcagattttacagtcctggagaagtgatttgaggctgaaggaagggtgggagagacctggcctttgatttaattgcttccagcctgggaacaaagtccaagacatggtaacctcatttactccagaaaatgcaccatgactccttaaaagtttatggtgtgatagtctgaggttggaggaatagggacatgatttcatgaaagtctttttttttttcctttctatgccttgcagtggaactgtaactcctacttttcaccctgtatcactatcctcacttccatttttgggatatttaccatttatcaagcaacataccatggactgcagatgcattttctttttctttttttttttctctgagacggagtctcgctctgtcacccaggctggggtgcaggggcgcaatctccgctcactgcaacctccgcctcctgggttcaagcgattctcctgcctcagcctcccgagtagctgggactgcaggcgcccgccaccaggcctggctaattttttgtatttttagtagagacggggttttaccatgttagccaggatggtctcgatctcctcacctcatgatctgcctgcctcggcctcccaaagtgctgggattacaggcgtgagccactacgcccagccaaggcagtcttatgatcctaaacctcattttatggatgagaaaactgaggttcagggaggcaagcggcttgcccggggttgcagcacatgtgagtggaggagctgggtgtgaagaagccatgccccaacctttgtgccgtgctgccgctgcttggtctgaggacgccacaaaccacgacgccagctcaaagtcacaccaccagcatcgcccagcctcctggcctttccctcacattccttcttggcaagagtggtacttttctaaacctcggccttagtggctgccgagccactgcttgcggctcagttccccatctgggccaagaggattgtgcgtctccatctatatcagctacccaggcagtcctagtgctggcgttcaaggggaagtgatccatgggaccttctgtggggaggaggccttggggcaaaagagggcccaggcacctggactctatttgtggtctcttttgcatcttccgtggatggctgcaggcaggccatttctttcctttgagcctcagtctcctagactagaaagtaaaggccagggggaccagtgggcatctgaagagtgctgtgggtctaccacagagagacaggtgtctccttcctctaggaagttggcctccaaggggatcctgcctcgtccaggaagcatgctgcctaacagcacctgaccttgccctgcctgttcagcttttgattgctgaatttatagtgttcgtttgcttttttttttttttttttttttagaaggaatctggttctgtcacccacggctgcagtgcagtggtgggatctcagcttaccgcaacctccacctcccaggttcaagcgatcctcctgccacagccttctgagtaactggaattctaggtgcacgccaccacgcccagctaatttttgtatttttagtagagatggggttccaccatgttggccaggctggtctcaaactcctgacctcaggtgatccacccaccttggcctcccaaagtgctgggattacaggtgtgagccaccactcctggccacatttgccttctttgcgagtgtttttaaaatactggaggcctttcctggagggtttctcctctccagatggccccagagcaccccaagctcaggacatgtccctccccagccaagctgtctccctttacttcctttgcctcctctctcccaattattttggcccaaactgatcagtcccgctggcctctcccaagcaggtccttctggcactcctctggtggaccgcccccatcggccacacttgccctgctctcc

SEQ ID NO: 18268 - DNA, 2300 bp, Homo sapien
ccaaaccccatctctactagaaatacaaaaattagccagatgtgctgggcatggtggctgacgcctgtaatcctagcactttgggaggccgaggtgggtggatcacctaggtcaggatttccagaccagcccggccaacgtggtgaaaccccatctctactaaaaatacaaaattagccgagtgtggtggtacatgcctgtaatcctagctacttgggaggctgaggcaggagaatcgcttgaacccgggaggtagaggttgcagtgagccgagatcatgccactgcactccagcctgggcaacaagagcaaaactccatctcaaaagcaaaacaaattagctggatgtggtggcgcacacctctagtcccagctactcgggaagctgtggcaggagaatcgcttgaacctgggaggcagaggctgcagtgagccaagatcctgccactgcaccccagcctgggcaatagagcgaaactctgtctcaacaaacaaacaaacaaaccaaacaaaaaaaaaacaaaaacaacttcctgctatatgtgaggcataactagataactagtttttttttttttttttttttttttttaactggagacagagtcttgctgtagtctcccaggctggagtgcagtgaccggatcttgggctcactgcaacctccacctcccgggttcaagcaatcctcctgcctcagcctcccgtgtagctgggattacaggcattcaccaccacgcccggctaattttgtatttttagtagagacgggattttgccatgttggccaggctggtctcaaactcctgacctcaggtgatccacccgccttggcctcccaaagtgctgggattacaggcgtgagccacagcgcccggcctagatgctttattttttttgaggcaaggtctcgttttgttgcccaggctggagtgcagtggtaccatcatggctctctgcagccttgacctcctgggctcaagccatcctcctgcctcagcctcccgagtaaatgagaccacactgtcaccatgcctggctagtttgttttttgttttttttttttgtagagatcgggggttagtctcactcttgtttaggctggtctcgaactcctgggctcaagtgatcctcccaaagtgctgagattacaggtgtgagccaccgtgcccggcttttatgtattctttcaacaacgctgcacggctgcgattatccccactttgagaggagacaggatgagaggctgagtggcttgctaggcttgtatggacaggatgcgggctctgcaatcacatgactttgtatgagagggcaaatggattaaccgctaaacatagtttcctgttgtgtaaaatggggatgatgatagtatccaccctgcggactgtgcgggctgagataatcccacaaagtgctcttaggacctggcaggtggaaagtgctcatgatcacctctgccaaggctgcacaagtagcgagtggccgagctttatatccgaagttaggaccctgcagttttgcccctctcctctctctccctctccttcccggctccggggaaaggaaaatttatggctccgggtcgggggttgcgggggacctctgtgccgtgctccggggccgagctctccccgccggcctctcccgcgtccgtccggccgccctcccgcccaacctctcccgcccaacctctcccgcgtccgcccgcccgcccaacctctcccgcgtccgcccgcccgcccaacctctcccgcgtccgcccgcccgcccaacctctcccgcgtccgcccgcccgcccaacctctcccgcgtccgcccgcccgcccaacctctcccgcgtccgcccgcccgcccaacctctcccgcgtccgcccgcccgcccaacctctcccggccccgcccgcccgcccgcccaacctctcccggccccgcccgcccgcccgcccaacctctcccggccccgcccgcccgcccgcccaacctctcccggccccgcccgcccgcccgcccaacctctcccggccccgcccgcccacccaacctctcccggccccgcccgtccaacctctcccggccccgcctgctggccggacgtccggtctgcaggcgcgcgctcccgaggtcccgcctcgcccgctgagccggcctgtaagcgctgcggagattgggctagaggcggaggcctgggccacggcggaggcgctgggtacgtagcgcgccacgcgggccggtgagagccagccgggcgccggggagggggcgggccctggccgcggctgctacgcggggctgccacc

SEQ ID NO: 18269 - DNA, 2300 bp, Homo sapien
atccagcctgggcgacagagcaagagagcgagactccgtctcagaaaaaaaaaagaaagaaagagttgactatatttagttctgtgttttatttgtgttttctttccctgagtcagatgggaactgtttcttcccgccctgccattcttcccatgttgagatctttcccaaaggcaaagatcatttccctttttggccatggagcactctgatggtaagaattagtcctctcatcacccaccacactcaacccgaataggaaatttccaagaatgggaaccatgtctttgggcacttaggcgagattactcaatcaaaagagtgagactcagggactgaaacattcaatcaaggttaaaaacagattaaaatgtggcagttaccttttttcccctgatatagaatacgcactggagtcacagttaccttttagtaactgatttccttgagtgaatagtgtatcagaaaatgggacttttatggtggcaaagaattcagagggcctggggcacacagatctggatttgtataccgatttgccacttaaccagctatgtgactgtgcaatttaccaacctctcagggccacattttttcatctgtcaaaaaggtcaatatggccaggtacggtggctcacacctctaatcccagcactttgggaggccgaaatgggcagatcacgaggtcaggagttcgagaccagcctgaccaacatggtgaaaccccgtctctactaaaaatacaaaaattagccaggtgtggtggcgtgcgcctttaatcccagctactcaggaggccgaggcaagagaatcgcttgaacccaggaggcgaaggttgcagtgagccgagatcgcaccactgcactccagcctgggagtcagagagagactccgtctcaaaacaaaacaaaacaaaacaaaggttgaataataataataggacctatattgtagacttgttgagaggattaaatgagataatgtacgaaatgccttactacagagtctggcacttattaaagaaagagttgatgtgggctgggtgccgtggctcacgtctgtaatcccagcactttgcggggttggggtaggaagatccttagaggccaggagttcgagaccagcctgggcaacaaggcgagaccctcgtctctacaaaaaatatataaattatccgggtgtggtggctcatgcctatagtcctaggtacttgggaggctgaggtgggaggataccttgattgcagtgagctgtgatcttgagccattgcgctccagcctgggcgacagaaggcggccgtatttaaaaaagaaaaaagaaagaaagaaagaaaagaaaagaaaaaaagggtcgttgtggaaaattcttgtggggaattaaagggaccacgtgtgcgcgaaagagcttggcgaagataagtacctggaggccaagatgaggcggcgagccctgcctccctagcagtgtggtctcctggcttagggtcagtgcttcgcacaaaaaaatccactgcctctcatgagaccttgaactgccaatgaccgcaggttgcccagactcccgagtgaggaaggcggccaggagtcaactaggcttcttgcggaaaagcccactctaagaaggcctggggcattccggctccaggcaggtagcacccgcgggcctcaggccctttcacttacccgggaaacgtaacggtccttaacggcagccaataacggctcccagcggcccaggcactggcaagggcaggctgaaatcaaacctcggattttggaacctccacgcctgaaaccctaaaccagcatcgaactacaactcccatcatgccaggcggccgcccggttcccaagggtcggtcccaccaaccttgcgccccttctttcctcaaagcgtggccgaatgcctaggcttccgggtatcagtggccccgcctcttaatccgaccggagccgtccctcgtgattcctgggtattgtagtcagtttcctgggaaagagtcgctcctagtggcagctcgcttcgccagaaaaactacaaaacccagaatgcagcgcaaattccccttgtccaataggaaccccccatgtagtggggcgcggagccctgctctcgcaactcaagatggcggacgagagtgagacagcagtgaagccgccggcacctccgctgccgcagatgatggaagggaacgggaacggccatgagcactgcagcgattgcgagaatgaggaggacaacagctacaaccgggggtaacgaaatcctcggagtccaattcccgtccagcctcccacaac

SEQ ID NO: 18270 - DNA, 2300 bp, Homo sapien
attctcctgccttagcctcccgagtagttgggactacaggcgcccgccaccacgcccggctaaattttttgtatttttagtagagatgggatttcacagtgttagccaggatggtctcgatctcctgacctcgtgatctgcctcccaaagtactgggattacaggcatgagccaccatgcccggcccttcctgtgatttttaatgccggctgaagaacataaaagctagatcttttaacctaagatttaccacaagcagattataaaccacttaaatacagtcatgcttcactgaacgtcaggcatatgtgctgggaaatgcatggttaggtgatttttgccttgccaacattatagggtgtacttacacaaatctagatggtatagcctactaaatgcctaggctatatggtgtacattacagtaacatgctatacaggtttgtagcctaggagcaataggctgctgcatgttactgagtactgcaggcaactataatacaatggtaagtatttgtgtatctaagcatacctaaacatagaaaggatacaataaaaatatgtactataatcttgtgggaccatctcttctacgcagtccttggtctttatacctttatatctgcactgccaccaatactgcgaataacaagctggctacgaaaatcagactacctcagactcagcaagttatacacccaaaaatctctcacgactttcagtttaaaaatatatctacaaatatagacaggaagatggggagagacagcgtgagtgccagtgccaggcactaaccatgtgaagaaagatgaataagctgtggcttacagaagtaaaaactaatttgggaaaagaattcaacattcaaatgcctggtgtgtttcttcatccctaggaacaaatagtaactaatggcaagaccctaaagtacaggataggcagtatggagcccgaggattccaaatactctccaagaaacaacatcgctcatttcttgaagcctggggctgctctgcaaaggtaacaaggcaaagatgttcgaagacttaattatattaatatatcgttcaggatacttatggattatttggagcaatggaaactatgtaaatcaaagcattaccataccgttaattacataggtttataaggtgagtttatattttgggattctctggtagtgatattttacaatataattatacatacagtttgtatagtctgatgagtttcctcactgagggtgaactgctgcgaaatgttttatgattcgtttattgctagtcacgttgttcaaacaacacgtctataagtaacgttccctttgaactgtactgttactagactgtcctgtgttgtaccatcgaaaaccatcgtccaacatgctcttttcccaggaatggcctgaagcacacgagtggaacactgcatagaacttttatataataaaagtactgaacgtctccggcccttaatatccagagcacccacccttggtaaatgacaaaggcaataaccaatcgccaggcagaatcctagtgacttagccaataagaacatgagggtggggctagactaagctcccggtgacttccccgcaccccagagacccaggttgtgggaggctggacgggaattggactccgaggatttcgttacccccggttgtagctgttgtcctcctcattctcgcaatcgctgcagtgctcatggccgttcccgttcccttccatcatctgcggcagcggaggtgccggcggcttcactgctgtctcactctcgtccgccatcttgagttgcgagagcagggctccgcgccccactacatggggggttcctattggacaaggggaatttgcgctgcattctgggttttgtagtttttctggcgaagcgagctgccactaggagcgactctttcccaggaaactgactacaatacccaggaatcacgagggacggctccggtcggattaagaggcggggccactgatacccggaagcctaggcattcggccacgctttgaggaaagaaggggcgcaaggttggtgggaccgacccttgggaaccgggcggccgcctggcatgatgggagttgtagttcgatgctggtttagggtttcaggcgtggaggttccaaaatccgaggtttgatttcagcctgcccttgccagtgcctgggccgctgggagccgttattggctgccgttaaggaccgttacgtttcccgggtaagtgaaagggcctgaggcccgcgggtgctacctgcctggagccggaatgccccaggccttcttaga

SEQ ID NO: 18271 - DNA, 2300 bp, Homo sapien
tttttaatttaataaaacattaatgaggctaagaaactttttgcttcattcatggggtgtgtcatgtaggggaaagcagcacaaggaagtccccttgatcacgtgcacacatgcacacgtgcatacacacagacatgtttcttttatttatttatttatttttattttttgagacggagtctcgctctgtcgcccaggctggagtgcagtggcgcaatctcggctcactgcaagctccgcctcccaggttcacgccattctcctacctcagcctcccaagtagctgggactataggcgcctgccaccacgcctggctaattttttgtatttttagtagagacggtgttttaccatttagccagaatggtctcaatctcctgacctagtgatccgcccgcctcggcctcccaaaatactgggattacaggcgtgagccactgcgcccggccacatgtttcttgtaatctctccatggcaggagtaactgggtgctattgttgttttagtttcccaagattcctaatgctgggttttgccagtggtgatccctcagtctgagcttgccgacagttgtcctcaatcctgcagatctggtttaggcatttcttttttttttcccttttttttttgagacggagtttcgctcttgtttcccaggctggagtgccgtggcgcgatcttggctcacaacaacctctgcctcctgggttcaagcgattctcctgccttagcctcccgagtagctgggattacaggcatgcgccaccatgcccggcttattttgtatttttagtagagacaggctttctccatgttggtcaggctggtctcgaactctgcacctcaggtgatccgcctgccttggcctcccaaagtgctgagattacaggtgtgagccaccacacccagccttttcctttttttttttttttttttttgagacagagtctcgctttgtcacccaggctgaaatgcagtggcatgatctcggctcactgcaagctctacctcccaggttcacaccattctcctgcctcagcctcccgagtagctgggactacaggcgcccgccaccgtgcccggctaatttttttgtatttttagtagagatggggtttcaacatgttagccaggatggtcttgatctcctgacctcatgatctgcccgcctcggcctcccaaagtgctgagattacaggtgtgagccaccgcgcattgctgccttttcctttttttgagacgaggtctgtctctgtcatacaggctggagtgcaatgacgtgatctcaactcactgcaacctccacctcccgggttcaagcagttctcctgcctcgtcctcctgagtagctgggactacaggcatgtgccaccaggccccagctaatgtttatatttttagtagaaacagggttttgccatgttggccagtctggccttaaactcctgacctcaagtgatccacctgcctcggcctcccaaagtgttgggattacaggtgtgagctaccacgcctggctgatttgggcatttctcatgactgaccattttggacacagattgtggcaatgttaatgtgcctttttcctcatccctcactcccttttcatactgtcttgtgctccagatccagctggggaaaatcatgaaacctaatacatttgggaggtggaggaaggaagggcaaagcattccagaaagcccatcactgccttttggctgtcatccttttacattcagagttcaaggaagtattgtggtatgaatgccttgttaacaattatcattcgtctttggtgccattaccctggcaatataaagaaaataagcaacataaaagcaagaacggaaaaggccctttcacacaaataggacatcccttgcccagcactccctccctgaaagccgagggggcgcgagtcaggaggagtgctggtgtcctccaaatgccctttctggacctgggttcttcagcctgcttctgaagccaacaggcttgattaaggaaggtctggctccacagaaagctctttgtcaggggtagcacaaaacagattttttttaaaccctgcattagtatttactttttgttacagtggtttgagtccagccaatgacactggagccaaaaagaagaaaaagaaacaaaaaaagaagaaagaaaaaggcagtgagacagattcagcccaggatcagcctgtgaaggtaacaaggaggttctgttttttgtgactcagtcactttttcacatgagagagttttgaggtgaatgtataggatcaacttggattgacgttctc

SEQ ID NO: 18272 - DNA, 2300 bp, Homo sapien
ttggcccacacaggggttattgatttttattttttttcaatttgatttcgttgtcaacattagaatatctggaggcttcacacacagatctatattcggttctctggaaactctgggccctcattcactccgggctgtgccccacctccaaaggccatggactctccgtttacccagttcccacctcctctattgtcctctgactcaaaaatctttggttgtgactctcgttgaggcattgtagagcagggtgtggcactgtttgggctgggcatcacgtgttccagggggccagagccaggagagggccgaaactctccggggcacagtgtcggtcacgctgtagaaacctctgaattttggattttgcagcaggtatgattgtggtctccattttatggatggagaacatgaggcttagtgacaggttagtgccactggggccatgtattaaataactgggaagtgacagtgttgagacttactccccagacttcggaatttagaagcactagaagagccgtgcagtgcagggccaaaggtcagaggcgctggaccccgacctccagagcccaaagtggcttctaccagtatggaattctgacaacttacttaagcttccctgagcctcagtttccttgtctattagtacatgagcagggcctgcacacaggagatgcttttatttatttattttttagagacagagtctcactctgttgcccaagctggagtgcagtggcgcaatcttggctcactgcaacctccgcctcccggattcaagtgattctcatgcctcagcctcccatgcctggagatcagctgggcagggctgatcctggagtccttggcctgtgaccctggagccagggtggcctctgctgtcctccttgtctttgggaaagcagaggcaaggtgcttgggttacagcaagagagatctaggttagatggtgagaccttcctgatggctacggtttcacatcaagggaaaaaggctgttggtggcaaattctggacttgaaggctggaagccatgtggtgggggatagtggcagaaaaggcaatttttttttttttttgttaagacgcagtctcactctgtcgcttaggctgcagtgcagtggcacaatcttggctcatggcaacctcagcctcctaagtagctgggattacaggcatgtgccaccacacccagctaattttgtatttttagtagaggtggggttgcaccatgttggccaggctggtctcgaactcccgacctcaagtgatccacccacctcggcctcccaagtgctgagattataggcgtgagccaccgcgccctgccagaaagggcaacctttagtgaggcctgagtcccaggcattgtccgagggcagttccacactgagggactgcagaggccgctgcttggaaggaaggagggagatggggtacgggttggggggcgtttagggctccaaagcctaaagccaaacccagtgcaggaggcttcttacaatcggggaggaggggagtcctgtgagggggagggaagcttactgtgggatgaaggcctgggtttggagaggctggaggatggggcagcaggtcctagcgggggagggcaggggagcctctgggcaggtacggcctgacgccccgggtcctcccgccccgccaggcctgacggaggacgaggacgtgcgcgccatgctgcggggctcccggctccgcaagatccgctcgcgcacgtggcacaaggagcggctgtaccggctgcaggaggacggcctgagcgtgtggttccagcggcgcatcccgcgtgcgccatcgcagcacatctgtgagaggccggggagcgccgggcggacagggaggtggggacaggcccggtcctccgccctgacccggccctcctctcagtcttcgtgcagcacatcgaggcggtccgcgagggccaccagtccgagggcctgcggcgcttcgggggtgccttcgcgccagcgcgctgcctcaccatcgccttcaagggccgccgcaagaacctggacctggcggcgcccacggctgaggaagcgcagcgctgggtgcgcggtctgaccaagctccgcgcgcgcctggacgccatgagccagcgcgagcggctagaccaatatcctgccggggctgggagggagggccccatccttggagagccctaaccttggagagccccatccttggagagcccccacgcccagggaaggcagggccctgtcctgagggcgcacggtctgggtcggagcccttggtcttcgaaactgagggtgggga

SEQ ID NO: 18273 - DNA, 2300 bp, Homo sapien
atccccaaaccacaccatttcttagcccagagaatgacacctgtcgatcacagagtccagcccagtctatctcctgggagttctggggtccatcctgggtgtcccccaagtctggtccccaccccttgcccaactaactcctcagcctccctccttgggtctccctgtttcgcccctgccttcatccaacctgccccccactctccacactcactcctgcccaagccctttctggggctcctgatgccctccagataaagtccatgactctccagggagggcctggaggagctcctcccacccccagcctctcccctttgccactcccgtcttcctcagctggggccagccagggcctgctggctccccagcccctcatgtgctgccccctgttcccccacccccaaggtcctgttcctttgtttcactgtctgatctccctgctggaacctcagctctctaatgcaagagccccagggtggagcataccataggcactccacaagtgcttgtaccatagtaccataccatgggcaccgcataagtgcttgtccaatgcatgcacagttgaatggatggcagggtagagatggtgtcctatgtctcagtaaccagagtgccaggcacagcgcccagacatagtcagcgctcaggtggaatgagtcgaggtaacaagaaggcaaaactggcaatcaggacccctgaattctgccccaagttctacacggggtccctggcagccttgtccttctgttccggagttccacacctagcctctccatcactgactattctaccaatggcaggtccaacgcagcacttcagtggcgcggtcctttccacgtcagacaacattctcgcacacaccctctcattcaagccctccactgccctgcgggtcccacttttcccagactctgagagggtaccagggcccatgtggtggggcaccaccggggtgccagtcacactttgccctttgttggctgtgtggtcataggcaaattccttgccgtctctgagtcagtttcctcacttgtgaaatgaggattcacctcccacctaggaagtcgaggaagattgcaagacaccacctgtgtaacccacccagtgccagctgcctctgtgatgttccaatgagccacagttacattccttctccacgactgacttccccaaatctgaggtgagagccttggctgtcggacgtaggctgttagaccagtcctgccagagcagtgtggctgtggccgcctctgtggggccgcggcttggagggctgctgtggaggccagcctcttctgcggaggccgaccgcaaactcgcatccttcctaagggctgccaagaccccgagacaccctggcagaacctagatactgctggggagccggacgagggacaccccaagcctccctctcccgctccattctccttggagaccccaccagcgccccgtgcccgaattcgcgcttcagacgccccgcgagcgccccctggtgggaagcaaagaacaccctgggcgcccggctcgccccgggaccctcggatgaccccaggtgcgacccccagctggagggagctggccctccgcccctagccatagcctcccagccccgtgcagcctggggaatccacgaactgctccctggagcgccccagactgggcctctgggaacggtccgcgcccaccccaccgccccttgcccgtcactgacccatcttcttcagcgcccgcagcccgggcctcttggtgccgccatcggagggagtcggcggggacgggagagcgaccggcgccgcgacttgggctgcgacctgggcggccaccgggggctcctcgggcgggcggcggcaacgcctccagcggccgcacagcatggcttggcggggggccggggccgggcccggggtctgcacgcggggacagggcagcggggcgccgctctggcccggccccggctctgagcgaggcggcgagcgaagaaacttagcggcgcgggagggagtcggaggaggcagcaggaggtggggcggggcggggcgggaagggaagggggcggggccggggcggtgcgagggcggggccaggcggtggcctggaagcccggagcctcagcgctcgcccctgctcgtgagtccgtctccccttagtccgggcgagcctctgatcttggccgcaagggtgactagagcccccatgctgcggggctgggggtgggagccggcaccggggacgagggccatcctctggcacagacaccctctccttcccgggggccctgactcgaggctgacgca

SEQ ID NO: 18274 - DNA, 2300 bp, Homo sapien
ttagtagagacggggtttcaccatattagccaggatggtctcgatctcctgacctcgtgatccgccgacctcggcctcccaaagtgttgggattacaggcgtgagccaccgcgcccggcctattgtatctttttaaattaattattttaaaaacaatttttgtagaggcagaagtctcattatgttgcccaggctggtcttcattcaatacctggcctcaagtgatcatcccacctctgcctcccaaagtgctgggattacaggcgtgagccaccgcatccggccaatttattgtatatttcaaaataactgggcgggaagtggtggctcaggcctgtagtcccaacactttgggaggccaaggcaagagaattgctttgaggctgcagtgagctatgatcatgccactgcactccaccctgggcaaccaagtagtgagaccttgtctctaataaacaaataaaatacaaatacaaataactaaaagcggaattggaatgttcctaatacaaaggaatgataaatgcttgaggtgatggttacttcaattaccttgatttgatcattacacattttatacctgtatcaaaacattacatgcctctccataattctctgcaactattaagtgtccataacaattaaaagaaatgtagacttagcctatccaacaacaagaataacaaaagggtaaaccaggagaataaggaaggttgtttctggaggaaggaacggcaggatcaaaagcacaaaggcgaatacgataatcaagaagaaaattcagggccgggcgcggtggctcacgcctgtaatcccagcactttgggaggccgaggcgggcggatcacgaggtcaggagatcgagaccatcccggctaaaacggtgaaaccccgtctctactaaaaatacaaaaaattagccgggcgtagtggcgggcgcctgtagtcccagctacttgggaggctgaggcaggagaatggcgtgaacccgggaggcggagcttgcagtgagccgagatcccgccactgcactccagcctgggcgacggagcgagactccgtctcaaaaaaaaaaaaaaaaaaaaaaaaaaaaagaaaattcaggaccccagagtggcgtagggacccaagccagtgtgcagaatctctgggcctgggagatctgaggatggggtagagcagggcaagtaggtggcaaatcaggccctgagcactagcctctctgtaggatgccacgccgctggccgccgcaaagtggcggtgtgcgcccatgtctctgccggacccaggccaccggccgcagaaacgctgccacctggacgtcccccacttcgcgcacgcactctggtgcttgcatataaatagtaagtgcacacccgactcggccaccagaacctgcacacggatgcccacccacgggttgacgtcgcggacaactacaccgcgggtgccgggctggggtgccggcctgtccaagcctcgaacccagaaccagttgctggggactccaggctcggctccgcctcacgctccccaggtccgtcagctccgagactgtggctctccgagggggcagcacctggcctggcacagggaggttaatcctatgacgtcactgccaacctccccacccccatgcccatcccttcgggttcgcgctgccccgagcggctcagctcccggggttctgccttcgctcccggccctgcgtcctgtcccggctctggttccctgctgaggcctgcggcgcgacggggacgcggaagggaaggaggagggggtcctgcgtcagcctcgagtcagggcccccgggaaggagagggtgtctgtgccagaggatggccctcgtccccggtgccggctcccacccccagccccgcagcatgggggctctagtcacccttgcggccaagatcagaggctcgcccggactaaggggagacggactcacgagcaggggcgagcgctgaggctccgggcttccaggccaccgcctggccccgccctcgcaccgccccggccccgcccccttcccttcccgccccgccccgccccacctcctgctgcctcctccgactccctcccgcgccgctaagtttcttcgctcgccgcctcgctcagagccggggccgggccagagcggcgccccgctgccctgtccccgcgtgcagaccccgggcccggccccggccccccgccaagccatgctgtgcggccgctggaggcgttgccgccgcccgcccgaggagcccccggtggccgcccaggtcgcagcccaagtcgcggcgccggtcgctctc

SEQ ID NO: 18275 - DNA, 2300 bp, Homo sapien
tgagacggagtctcgctccgtcgcccaggctggagtgcagtggcgggatctcggctcactgcaagctccgcctcccgggttcacgccattctcctgcctcagcctcccaagtagctgggactacaggcgcccgccactacgcccggctaattttttgtatttttagtagagacggggtttcaccgttttagccgggatggtctcgatctcctgacctcgtgatccgcccgcctcggcctcccaaagtgctgggattacaggcgtgagccaccgcgcccggccctgaattttcttcttgattatcgtattcgcctttgtgcttttgatcctgccgttccttcctccagaaacaaccttccttattctcctggtttacccttttgttattcttgttgttggataggctaagtctacatttcttttaattgttatggacacttaatagttgcagagaattatggagaggcatgtaatgttttgatacaggtataaaatgtgtaatgatcaaatcaaggtaattgaagtaaccatcacctcaagcatttatcattcctttgtattaggaacattccaattccgcttttagttatttgtatttgtattttatttgtttattagagacaaggtctcactacttggttgcccagggtggagtgcagtggcatgatcatagctcactgcagcctcaaagcaattctcttgccttggcctcccaaagtgttgggactacaggcctgagccaccacttcccgcccagttattttgaaatatacaataaattggccggatgcggtggctcacgcctgtaatcccagcactttgggaggcagaggtgggatgatcacttgaggccaggtattgaatgaagaccagcctgggcaacataatgagacttctgcctctacaaaaattgtttttaaaataattaatttaaaaagatacaataggccgggcgcggtggctcacgcctgtaatcccaacactttgggaggccgaggtcggcggatcacgaggtcaggagatcgagaccatcctggctaatatggtgaaaccccgtctctactaaaaaatacaaaaaattagctgggcgtggtggcgagcgcctgtaatcccagttgctcgggaggctgaggcaggagaatggcgtgaacccgggaggcggagattgcagtgagccgagatcacgccactgcactccagcccgggagagagtgagactccgtctcaaaaaaataaataaataaaataaaataaacaaaataaaaagatacaataaattattggtaactataatcgttgtattgtgctaccgaacactggatctcattcattctaactgtatttttgtacccatttccccccctccccagtacccttcccagcctctggtaaccatcattctgcgatgtccattttgcttactctttttttttttttgagatggagtctcactctcgcccaggctggagtgcagtggggcaatcttggctcactgcaatctccacctcccgggttcaagcgattctcctgcctcagcctcccgtgtagctgggattacaggcgcgcgccaccacgcccggctaatttgtgtatttttagtagagatggggtttcactatgttggcccggctggtctcgaactcctgacctcaggtgatccgcccgccttggcctcccaaagttctgggattacaggcatgagccaccgtgcccgaccatcttccaaaactgagctgtgatgtccttcctctagaacacctgaccacaggacatgactttttttaatccccagtgcctaagtgtctagagagctgagtgggttgcctcggatcggccaggcctggatatcagcgaacagatgcggatttccaccagggggcgctaggacgccacgacctttcactatgtgcaccagggggcgctgccgcccgccttggccatcccgggctgggaagtccgacccttcgattaagccccgcctgattgggaaaggctctgagaaactatttgcatgatcttgaaagagctgtgctgaatggttgaggtaggtaagccgaatgtgaaacaggctctctcattggcctaaattccccccctcgatctgcgtcgccatcccggccctgctggaccccggggtcagtaggaagccgcggggtggtggcgagagaggacccaggtgtcctggcagtgggcgccgcggggcacacgctgggccaaggtgcaggcggccagggtgggagactgttcgccccgccctgagtactcctatcttgtttctccacctgttcgggagttggaga

SEQ ID NO: 18276 - DNA, 2300 bp, Homo sapien
gccaccgaagtcccagactagccctttcctggcacatgatgcttgggcttcctaaaatgcccctcttcgtgccactttgcctgaaagctcttcatccttcagagccagccaggaagtcacttgctcctgacacttgtccataattcccagctcccatgcactcggctcatcagctcccaccaggatttccctcacttgccatttaggctggctgtggtctgatggcctctccacagtccaggagcaacttgaaggcaagaatggcatcccacccctctttgtaccctcctgtttgccaagtgatataggggctgaataaggttgaagttgttgggaataaaaagaacgaaatccagagtattccccgattttaagaaaaaatgggttttgtgtttgtgacagaaagaaaaatggcacggggggggtcacaaagaccagcgctctagccagaactgccccatggttgtcatgtgaccttggacaagtcacttattttccagtgtcttagagatgccttatctgtaaaatggagacactcattcctatcgtgtctaacttgccaggctgtggtgaggtcacatggctctgtgcgtaaaaggtacacagtgcaaacgtgctggaatgtcagggatgctattaaggaagcaataagaagaaagggtcactgggtgtgtggcgaaggagaagtggaaagggcgccaagattttaggcctcagtgactggtatggagggttctctgggtcctctcagtccctgtttatggagggctgggggcttgggtctagagaatttctctctgagaaactacgcccccgggggaatcggcccccccagccctgcgccagaatcccctgcagcaagtttcggagcaaggcctcctccatgcttccctcccagtcttgcccagcgcccactgatgaggaagggcctctgcgggtgagacctgcttccctctcggatagccagggctgatgatttcaactcattaatcattccgaactcttcccaacaaacagcctcatggctgtcccggacctcctctgtcccggctcaggaaatgatctcggtcggaagtgaaaagaccaaatcggccccaggaggccattttcttcgacagaagctgaggcgtgggggcgtggccttcccccgcttccccctccactcccccgcccgcccccggccccggctttccgatctcggcccagggaagagccttggtcgcgaatcaccagtttgcatttgcccctggggcgggggcggctttctgagaccaggctggggctgggactccgccaccttcagctaagggtaccgaggtcagtccgggagtcgcgtcaccgggactcgaacccgcctcttcgtcttccgaggcctagtgcgagcctgcggcgctaaacgcagtcacactgtccctttaaggcggcactttttattcttcatttgtttacttcttcatgcgctcttcggtctttacaaaatgtgctcgcgatatccttccgcaagtgtcagtctcaggcactcaccacccgccttgaagccatttctataatcttaagactcgcgagttagcagccgtgggccgacgtctctctttataggatttaattcttttacattttagggactactttttaggaataaaccattcttgcgttagttaataaaggttcataaccttcggaacccctccgctgagaacaaaatacgataatagcctttataacgcaccttttcataaaaatattctgtgaggactctcataggccatcgaatcttctcgtattcctgaaacagaatggtacggtccagaacccgccccatcttctctgcgattggccgtccttcctcagcgagtcgtgtgatttttcaccaatggccgctcgcgtttctttagcgaggtctaagcgatggaaggtggcggccagggagacgccccctacgcgtcctgggattggctacgtcgcacggcgcgcgagggcggcgggcccgaaagataagaactacgactcccggcgccccgcaaagggaactccgttacgcatgcgcacgggcggggcgaaaaagcttctatataaaaggggcgcagaggactgggagacagcagttggaagttggcaggtggagaggcaggttgggagggaaagtcgggggaggacgcggaagaggagctgtgggaagggggaggagggagggaggaaaagaggaggaggcggaggagaactgagcagagcagagcatcgagccaaaggggagatgagtttgtctgtcctctgctgaggctacggccgggcctagggaa

SEQ ID NO: 18277 - DNA, 2300 bp, Homo sapien
acattccatcactgtaaaaagtcccctttgccccctcccccaaaaaagtttcagtctagtctccaaacttggaaagcggcgctcgctcctgctgccggtgcagttcgttctcggtcagcagctggaggttctcggcgcgcagccggtccagctccagctccagctcccgcacacgcgcgtcgtcgccacccagccgcttgctctccagccgcagccggttgttctcgtcctccatgcgcgagaggcacttctccagttccaggtactccttgatgagctcctgcttgctcatgttctgcaggctctccgtgtggtaccgctcgtacgtctccgagaagtcccgctgcagaaactcgctgccgtcccctcccatcccatcgctgcccccatcctcctcacccccttcttccatgaagtcgtcatcgctggtgtcgtcggatttggcggcggcccgcttggagtacaggccggttttgagatccggctcctcctggtcgtgatcatccatgaggaactgcgtggtgttatagggcgcgaccggctggcccttggcgaacatctcggctcggatccttgaagctcgaaggctctgtttctcgtcgaactttttcttctcttcccaggtcagcttgtagtacggtttccaatgccgcttcttcttggacgggcgtctcctatgttttttcttccccagctgtctctgctgctgtccccactcctcttcgccccctgcggcaggagcccccaacttactggcctcggagtcatgacaaggctgggcgagcagctcggcctcgggcgtcggttccacttctgccggcggcgggaagtcgccgccagcggacgagtcgtccccattctggcccttctcgccctctctcaggcagctagattctggacaggcctgggtctgcaagggaggtggttgggattccaggctcccttccccctccggccccggacggccacccaactgggggaacgctctcgattgccacctactgtcctcctcgggcacccgctcctccgcgcctggggggcgctcagggttcagctcttcctggacagcagcagcacctgtacagttgctagtttgaggctggtgttgatattctgacaagaatggctcggccatggctagtagagtcctcgaagtttaagaaattttggctagtaagtccttaaggaaaaaaatgggtttttcttaaaaaaaagaaaaagaaaaaaaaaacagtccaacagagtcctcttcagtttgtaattcctgcagtgacgcctttagctagtccttctatcagcaaactccaactgcaatctggggagctcaagtcagtaaagggttaagcgcccacagtgcggccagctagcgggtccaagggggtgcagcggcaggaacagtacgtaatgggcggaggtgggcctcaaacctccaagcggagcaccccaataaaggagttggtgagcaaggtgatgagggtaagtccagtgcgtgaaacccagccccgaaggggttaaaactaccgatgacgctgcctccgaggggccagatccacaaagggttaaatcccctgccgcagagcccacaaggggttaaagtcccggcgccacctcctcccacttccacgggtgtcgcttccacccaagctcccagttccctaggcccggccgtagcctcagcagaggacagacaaactcatctcccctttggctcgatgctctgctctgctcagttctcctccgcctcctcctcttttcctccctccctcctcccccttcccacagctcctcttccgcgtcctcccccgactttccctcccaacctgcctctccacctgccaacttccaactgctgtctcccagtcctctgcgccccttttatatagaagctttttcgccccgcccgtgcgcatgcgtaacggagttccctttgcggggcgccgggagtcgtagttcttatctttcgggcccgccgccctcgcgcgccgtgcgacgtagccaatcccaggacgcgtagggggcgtctccctggccgccaccttccatcgcttagacctcgctaaagaaacgcgagcggccattggtgaaaaatcacacgactcgctgaggaaggacggccaatcgcagagaagatggggcgggttctggaccgtaccattctgtttcaggaatacgagaagattcgatggcctatgagagtcctcacagaatatttttatgaaaaggtgcgttataaaggctattatcgtattttgttctcagcggaggggttccgaaggttatgaacctttattaactaacgc

SEQ ID NO: 18278 - DNA, 2300 bp, Homo sapien
caaagtgctagggttacaggtgtgagtcaccgggcctgttgaaaccccaattctttaaaaaaaaaaaaaaagctttttttttttttttttttgagacagagtcttattctgccacctaggctggagtgcagtgtggcgtgatgttggctcactgcaacctttgcctcccggattcaagtgattctcctgcctcagcctcccaagtagctgggattacaggcacccaccaccatgcccagctaatttttgtgtttttttgttgttgtttttgtttttgagacggagtctcgctctgttgcccaggctggagtgcagtggtgtgatctcggcccactgcaagctctgccttccgggttcacgccattctcctgtcttagcctcccgagtagctgggactaaaggcgcccgccaccacacccagctaattttttgtatttttagtagagacggggtttcaccatgttagccaggatggtctcgatctcctgacctcgtgatccgcccgccttggcctcccaaagtgctgggattacaggcgtgagccaccacacctggccaatttttgtatttttagtagagacagggtttcaccatgttggccaggctggtctggaactcttgacctcaggtgatctgcctgcctcggcctcccaaagtgctgggattacaggcgtgagccactgcgcccggcctttttttttttttttttttgaggctgagtttcactcctgttgcccaggccggagcacaatggggcgatctcggctcactgcaaactccgcatcccgggttcatgccattctcctgcctcagcctctcaagtagctgggactacaggcacctgccaccatgctcggctaattttgtattttgtatttttagtagagatgaggtttctccatattggtcaggctggtctcttaactccagatctcaagagatccacccacctcagcctcccaaagtgctgagattataggcatgaaccaccacgcccggcccaacctttttttttttaaattaaaatataggtaactaattgttttctctgccaggagagcaatatgctagttaaatgtttcaatagaaagtgaagaaataggaggccgggtgtggtggctcacacccatcatcccagcactttgggaggccgaggcaggtggatcacgaggtcaggagatcgagatcatcctggctaacacggtgaaaccccgtctctactaaaactacaaaaaaaaaattagctgagcgtggtggcgggtgcctgtagtcccagctacttgagaggctgaggcaggagaatggcatgaacctgagaggcggaacttgcagtgagccgagatcgcgccactgcactccagcctgggcgacagagcaagactccatccctcaccccccccccaaaaaaaagaaaagtgtaggaataggctgggcttggtggctcacaactgtaattttgggaggcggaggagggcgcattgcttgagcccaggagtttgagcccaggagtttgagaccagcctgtgcaacagggtgaaaccctgtctctccaaaaaaaaaaaaaaaaaaaaaaaaatagccaggcgtggtggcaagtaccagctactcaggaggctgcagtgggaggatcgctttagcctgggaagtggaggttgccgtaagtccagatcgcgacactgcactccagcctaggcaacagagcaagacccatctcaaaaaaaaaaaaaaaaaaaagccaggcgcggtggcttatgcctatattgccaacactttgggaggctgagacgggcggatcacttgaagtcaggagttcgagaccagcctggcaaccatggcgagaccccgtctctactaaaaatagaaaaattagccagttgcagtggcgtgcacctgtaatcccagctactcgggaggctgaggcaggagaatcggttgaacccaggaggctgaggttgcagtgagccgaaatcacgctactgcactccagcctggcgacagagtgagactccgtctcaaaaaaaaaaaaaaagtatagaaagtgttaaaactgaaattttgaataaacctcatcattgtgagaatataaatgcaaaaaaaaaggtaaaatgctagtgcctttgaaagcaaaattcagacatacttgcatagcttaaggtaaattgatgtatgagagttatttgtaattagatatttgtgtatatatatatttttgagacagtttcgctcttcttgcctaggctggagtgcaatggcgcgatctcctctcactgcaacctccacctcccgggttcaaacgattc

SEQ ID NO: 18279 - DNA, 2300 bp, Homo sapien
cgtgccactgcactccagcctgggtgacagagcaagattctgtctcaaaaaaaaaaaaagaaaaaatgggaataaaaccagcttattagtggcctcctggttatctaaggaaaacacaggactgtaggactgaaaattaggaactccgagctctgtttctgtgtgtgctgcccttaacttggttgacttggccagaggccaaatactgataatgaggccaaactggtcattttgctgcttagtctattgttcatctactgttcaaccagactttcaacttccttttcagctctcccctctcagatgagttgcattatgcttttatgacaaattctacaaactctatattcatttgaaaatggtatcagcactgtctccctcataaatacctagaggagtaactagtcttaagtcgctatgtaaacacttactccttgtaactttgttatatgagaacttcacaaggaatgcttcaaagatcattggggcagttggaaagcctgccttaccaaagtgtggccttagttgtccatagcatcacaaaagagccatccaagtaggctgaatgaggatcagtctctcagggtgcccactggttgtggctgtgaagtcctggacactcattttgcctgatggccaaatcctagggagcagtgactatgtgtgagtaggattcgttgacagaggtaggaggttttttttttgtttttttttcctgctgcctgtataattgcagaaaaggagtgattctttacagtaattccccctcttcgggatgaagatgcttgcttctgtttggtttccacagttaaatcaattttttttccttttcttttgagatggaatcttgctctgtcgcccaggctggagtgcagtggcgcgatttcgcccactgcaacctccacctcccaggtttaagcgattctcctgcctcagcctcccgcgtagctaggattacaggcactcaccaccatgcctggctaatttttgcattttatttttttctggaacggagtttcacctggttgccaaggctggagcgcgatggtgtgatcttggctcaccacaacctctgcctcctgggttcaagcgattctcctgcctcagcctcccaaggagctgggactataggcatgcgccaccatgcacggctagttttgtatttttagtagagatggggtttctccatgttggtcaggctggtcttgaactcccaacctcaggtgatcctcccaccttggcctcccaaagtgctgggattacagtcagtgagccactgtgcccggcctgtatttgtatttttagtagagacagggttttaccatgttggccaggctggtctccaactcctgacctcaggtggtccgcccacctcggcctcccagtgtgctaggattgcaggcgtgagctacggtgcctggccagttaatcagttttttaccctcctgtgtttaggccccaacatcctgttcttgatcttttttggcaaaaatttggccaaagattgaaattttgcctcctggaccatatattttgctccagttgcaaagtatgacttttatcctttggtcagcagttcccatggtgtttagggcctgaatttgacattcttttttttttttctttttgagatggagtctagctctgttgcccaggctggagtgcagtggcacgatctcggcttgccgcaacctctgcctcccggcttcaagcagttctccctgcctcagcctcccaaatatctgggattacaggcgcccaccaccacacccggctaatttttgtagctttttttgtttgtttgtttgtttttgagagtctcactctgtcaccagactggagtgcagtggcgcagtctcggctcactgcaacctctgcctcctgggttcaagcaattctcctgcctcagcttcccaagtagctgggactacgggtgggcaccaccatgcctagctaattttttttctgtatttttagtagagacggagttttaccatattggccaggatggtctcgatctcttgaccttgtgatgcgcccgcctcggcctcccaaagtgctgggattacaggcgtgagccaccgtacctggcaacattctctttttttaaaaaaataactttttatttctagcctcaaccatttacactttgcttgagaaagaataataaagtggaattgttattccagtgatgttgtgcaaatgtgagaaatagtacttcccccaaaaaaacaaacctcgaaaccccacaaactcaagtgtacttaagtacttaacgttcaagtactttttaactataa

SEQ ID NO: 18280 - DNA, 2300 bp, Homo sapien
gcagtggcacgatctcggctcactgcaacctccagccccggggttcaagcaattctcctgcctcagcttcccaagtagctgtgactacaggtgcacaccaccacactcagctaatttttgtatttttagtagagatggggtttcaccatgtctgccaggacggtctcaatctcttgacctcgtgatctgcccgccttggcctcccaaagtgctgggattacaggcgtgagccactgtgcccggcctattcccaatttttcttagcaaagaatggaaaagcttgtgggtcaaccttaaggatagtaagtttcatttacaaatgagtaacaaatttctgctgctggtacagtatttgccactcagtagcatccaaaaatttcactagattacttcataatggaggatgaatcccaagtgtctaggatcctccattaaattcttgacagaagacccacaaagatcgtctttaaaagccttttctgttcctatgactatttaagtcctaccaagttagttagcttttttaaactcacatctcttgatcagtgtagagcgaacatgtcatatgtaggtaaaaaatcaaaccacagtaggcatcaagtgtactgaagcttcagttaggagtaagtggttccagttttggattgaggaccctagtcaatgatgatcctattttgtaatccagttgtaaaacatctggggagcagagggaaaaaagttaatgctatggagttgtcactccaactgaagaaaaattattaataggaggagcagaacttcagttctggaaaacttttttttttttttgagacagagtcttactctgtcacccaggctggagtgcaacggtgagaggctcatggcaaactctgcctcctgggttcaagcgattctcctgcctcagcctcccgagtagctgggattacaggcacgcaactccacacccggctaattttgtatttttagtagagaaggggcttcaccatgttggccaggttggtctcaaactcctgacctcaggtgatccacccgcctccacctcccaaagggctgggattacaggtgtgagccaccgcgccaggccaagttctgttaaacttttagtaaggctgaaggcttaggcatgttttgaccatttgtaactgataataagactcatcacaaggtacccacaaaattcactgccagtcactctgctacgtcaaagcctctcctacttcagcacctacctaggcataattttaactgacattttagcaataaaacttttatttgaagatatccttgagccacaaatctctctggatttagatttcaagcagtaggaagtaagatggtttaacctgcaattcaataaaagaacttcacatcaaacttcaatctttaagaagctgctacagctataatgtaaggttaagagtttattctttcaaagcaggtctcctcatctcttaaacgctatacatatgaagtagataaaaactggtttcttttttggtagcatttaggatctacaaaagtgatccttcaattacttggaatttcaaaaaattgaggttacctagtaacaatgcaccagtagaacacaaaatactctgactttgtttagtctgtgggaaaagaaaaatctttaaactggaaagattttgtagtcttacaaagattacattggaattggaattactgtagttcgtttttccctctaggagggcagccatttctctaaaagttgtgtaaaagttaagactaggatttcaaaatgcaagcagatgttgatgaagcatacgaaatgggcaactccgtttctatttcggagccgcagcgactccgactttgtgccccaaccctgtaaagggcaaaacctcatcccttcggtgtaaactttcaagagaagtggggcagcacactttaggcgtttcaccaagaggctggcgacatgctaggtcaggttgtccggagaatcggggctgaatgggagagatcttgagggcaagagcctcagagaccttcaggcaccgagctcgtgaaggtttccaagtgcccctctctagctgctcccagggggaattagtggttgctacagtagtttaagagggtcgtggtttttcgcaacccgggcggcgagatggcgctttggtgtaagcgaggtaaggtgggtgcactgggatctccgctctcggagcctccagctgactgccacgccgacttgtggccagacctgcgacctccgccctcccccgcggcgccagcctctggaatctggcgtcgcccccacctctccagtcgaagtgggagtccct

SEQ ID NO: 18281 - DNA, 2300 bp, Homo sapien
ggtctcaaactcctgacctcaggtgatccacccgcctccacctcccaaagggctgggattacaggtgtgagccaccgcgccaggccaagttctgttaaacttttagtaaggctgaaggcttaggcatgttttgaccatttgtaactgataataagactcatcacaaggtacccacaaaattcactgccagtcactctgctacgtcaaagcctctcctacttcagcacctacctaggcataattttaactgacattttagcaataaaacttttatttgaagatatccttgagccacaaatctctctggatttagatttcaagcagtaggaagtaagatggtttaacctgcaattcaataaaagaacttcacatcaaacttcaatctttaagaagctgctacagctataatgtaaggttaagagtttattctttcaaagcaggtctcctcatctcttaaacgctatacatatgaagtagataaaaactggtttcttttttggtagcatttaggatctacaaaagtgatccttcaattacttggaatttcaaaaaattgaggttacctagtaacaatgcaccagtagaacacaaaatactctgactttgtttagtctgtgggaaaagaaaaatctttaaactggaaagattttgtagtcttacaaagattacattggaattggaattactgtagttcgtttttccctctaggagggcagccatttctctaaaagttgtgtaaaagttaagactaggatttcaaaatgcaagcagatgttgatgaagcatacgaaatgggcaactccgtttctatttcggagccgcagcgactccgactttgtgccccaaccctgtaaagggcaaaacctcatcccttcggtgtaaactttcaagagaagtggggcagcacactttaggcgtttcaccaagaggctggcgacatgctaggtcaggttgtccggagaatcggggctgaatgggagagatcttgagggcaagagcctcagagaccttcaggcaccgagctcgtgaaggtttccaagtgcccctctctagctgctcccagggggaattagtggttgctacagtagtttaagagggtcgtggtttttcgcaacccgggcggcgagatggcgctttggtgtaagcgaggtaaggtgggtgcactgggatctccgctctcggagcctccagctgactgccacgccgacttgtggccagacctgcgacctccgccctcccccgcggcgccagcctctggaatctggcgtcgcccccacctctccagtcgaagtgggagtccctctgtgcggggcctcgccgccatacccaggccgaatgggggtggggagggaagctggcagagctcggcctcaggatccgcgcccctgtggaaagaccgcagagggaagccgtttcaccagcctctccccttctggggtctcgggaaacacgcggtaattaccgaagaaccccgcactctgtgagaggcgaggctgcggggctgccgggacggtttgaggaccgggctcggccgaggagactccaaccttcaccctccctggcccccggtcccacttcccgccgtctcccggcgccgccacttcaggtagcccactcggcccggcctctccccgcgcccggaccaccccccacggggtgctctcactgcgcagcgagtccctccgctgcctcctcccagcccaaaatggcggcgatggccgccgagcttctcgtcgccttcctcaaaggccaaggatccctccgcgcctgctgccccgcccaccttagccggatctattttctgccccgtaaagattaacgccatcaatgaactctttaattgagttcggagaaggcgggtccagttgtgcctcctcacagctaatcgttgccaaaaaagcgagaatattggcagaaggcttgaccaatcaaagaaggcagtgatgcgcgcgcggtctgcccccgcgcaagggtagatgggttttggagtctcgggtgtggctgttgacgttacaggcccttggatcgcttttcaggccagaagaactacaatccccagcaggcaccgcgcgtccaggctctctcttcccccccatcttagtggcctgagcggcttgaccagagctgctgcaactgcagcaagaggtagggctcaggcgttgggaattgcaccgacaggcagtcgcacagaaaggcacacagatgtagtggtgtgcatagcccttgacagcgaataggtcagttccacctttgcaaaacctctttccatgactgtctcccttcttccaagaaatccatcc

SEQ ID NO: 18282 - DNA, 2300 bp, Homo sapien
gtgtaaaagttaagactaggatttcaaaatgcaagcagatgttgatgaagcatacgaaatgggcaactccgtttctatttcggagccgcagcgactccgactttgtgccccaaccctgtaaagggcaaaacctcatcccttcggtgtaaactttcaagagaagtggggcagcacactttaggcgtttcaccaagaggctggcgacatgctaggtcaggttgtccggagaatcggggctgaatgggagagatcttgagggcaagagcctcagagaccttcaggcaccgagctcgtgaaggtttccaagtgcccctctctagctgctcccagggggaattagtggttgctacagtagtttaagagggtcgtggtttttcgcaacccgggcggcgagatggcgctttggtgtaagcgaggtaaggtgggtgcactgggatctccgctctcggagcctccagctgactgccacgccgacttgtggccagacctgcgacctccgccctcccccgcggcgccagcctctggaatctggcgtcgcccccacctctccagtcgaagtgggagtccctctgtgcggggcctcgccgccatacccaggccgaatgggggtggggagggaagctggcagagctcggcctcaggatccgcgcccctgtggaaagaccgcagagggaagccgtttcaccagcctctccccttctggggtctcgggaaacacgcggtaattaccgaagaaccccgcactctgtgagaggcgaggctgcggggctgccgggacggtttgaggaccgggctcggccgaggagactccaaccttcaccctccctggcccccggtcccacttcccgccgtctcccggcgccgccacttcaggtagcccactcggcccggcctctccccgcgcccggaccaccccccacggggtgctctcactgcgcagcgagtccctccgctgcctcctcccagcccaaaatggcggcgatggccgccgagcttctcgtcgccttcctcaaaggccaaggatccctccgcgcctgctgccccgcccaccttagccggatctattttctgccccgtaaagattaacgccatcaatgaactctttaattgagttcggagaaggcgggtccagttgtgcctcctcacagctaatcgttgccaaaaaagcgagaatattggcagaaggcttgaccaatcaaagaaggcagtgatgcgcgcgcggtctgcccccgcgcaagggtagatgggttttggagtctcgggtgtggctgttgacgttacaggcccttggatcgcttttcaggccagaagaactacaatccccagcaggcaccgcgcgtccaggctctctcttcccccccatcttagtggcctgagcggcttgaccagagctgctgcaactgcagcaagaggtagggctcaggcgttgggaattgcaccgacaggcagtcgcacagaaaggcacacagatgtagtggtgtgcatagcccttgacagcgaataggtcagttccacctttgcaaaacctctttccatgactgtctcccttcttccaagaaatccatccttatcctagttgggtttccctcccagctgcatgtagtgcaaagacctctttccccttttctcctgtttccctttctgagaggaaggagggaggcaggccaggaccttagaggaaaagtcctcagcactaggctggcccaggtcccagctgtgcttctggcctttggagcccagcttggggagaaggttgggggtgcagggctgcatcaagattggggccactggagacagtggggaaggactcgtgagcttgctccatgttctcccgtggcagcagcagccccgctgcactcccagcctccccaggcagtcctcctttgcccctttggtggttggggaaacaaaacttacacctggcttcctggctgccaacctgggcctcggtgacttccaggaggacagtacaggacatgagtcctggtgagggacccgaggagcaggacagagaagacggcccctgaatcccatttggccccttgctggctggaggtgtgaaaaccagcggtggaggcagccttcggggcctgcatttgagaataagggtatgaagggctggggtacaaaatggctgccactgcctgggcaaacaattctgggcagccagagtattcctgacgttccttcaggatttaggtttctgttgttgttcaaagcaggtgtcactagttccaggcgtctgctgaaagatttggaacagaagatgatggccactccgaaccagaccgcctgtaatg

SEQ ID NO: 18283 - DNA, 2300 bp, Homo sapien
agctgggcgtcgtggcaggtgcccgtaatcccagctactcgggaggctgaggcaggagaattgcttgaacctgggggggcagaggttgcagtgagctgagatcgcaccactgcactccagcctgagcaacagtgagactctgtctcaaaaaaaaataaataaataaaaaataaaaagaatggtaccagtagctaagagtggacaagtgctaaagaggtaggggtggtaacaggaggggctgagggctgggagaggggaagacttggcagaaacaggtaaggtttaggtggtggaaaggtttgagggaaggtcccaggctgcaggtgaaggtagtctggaggaagctgactttgatcccttggccagcaggggagaagcagaaggagcgggattcaaggaaggcccttgcagcctctgggctgtttgcttcctctctgactggaaggtcctggttagggggtagggcctgcatcctttgagctgtttcactttcaaagtggcatcacaggtggatggttcttttaaaaaccctggcaccaatggaatgaaatggaacacgtaggcagcaggaagattcgccgccgcccacaccagggaagtgaggccggcactgggctgcatgtgtgccacctccaggcggccaggagactccccagggcagagagggcctgcccagcacccatggcagcttcagcacttgcagagggcagcaccccctggggcctggggtgggggaagggattgggtgagcaccatgggctcctttgtcagacccaggaaggagagtgggggcagctaccggaagtagggggatgagaagctccctccggaatgtatgcccccctctcccctcccctctcctcccctccccacatgcacagcccctgcacatgctcagtgtgcccatgaattgggttggttgggggagggcactgactggcacccccacttaaagggccagtgccacacttgcctgttcccaacaagggcaatgggacctggccacctttccccccaataccgttacttccctttggaccccctccccccactccctggcagcttcttcctgccccagcccaccaatctctgcctacccctctccctcatactctgaccctattgcaggcagggtctgtccactgggcacaggagtttccacctggggtcgggcagttcctgccggggaagaaagagggatcctaagacaggctgggcaggggtggtgggaggcttcaacagtcactcccatgaaacatatgttctctgcgcttcccttccccggcccagttgaccaagagggtcccagaaagcacagggcgtgagggcagctgtggaaaggcccagggaggctgtgtccaagcccaacttccccagctagggcgtgtgatgtgggggtgggggtgtcttgtaaactggagcttccaccattgcagtaggcggagtggaggcccaggcttcaagaccaagcagcaggtgtgggaacaactggaagcagcgaagggggcggggcaccgagggacccaggcctggctcccacccacagctgagccggttctctccagtgctaagccccagctctggccccaggacgatctcctccctgcacaccccttacccaggaatcagggagccagacagggggaggggcagacagggacccttttcacggacccctcccatttgggttcaggccctcccacactcccggctagcatcctctcctttgttctcttcttgccccacccgccctccagcggggtgaggtgggggtgcgggaattaacccaccgaggtgctgccctatttgcgcccttcagccttttacgtgtaagggggatgttggaggagcagctggcagcttccctgcctccaggctcctcagcttctgggccaagaaaggccaaactcttcacctgcccctccctggcataaccagcccacaatgagcacccagcaccctcacccacacccctcccccgacactccagcagccctctggaatcttctctcacctcctagacacacacacacagaggcacctccgggtaaacaacctttgtccacctttgtcccaggcctcctctctccctcgggctccatgctgaggaatgcagctgggaggctgccagcaaatgccaaggggcctctgggtcccaggctagcaccccacagcaccccacaggggcaggcaggcctccagaggctctcctggaatccaaaaagccacttcctcgctaagcctccggtttcccgtctgcaaagtggcgatgatcattcctgctgcccttcctgactgag

SEQ ID NO: 18284 - DNA, 2300 bp, Homo sapien
gaggcaggcggatcacttgaggtcaggagttcgagaccagcttggtcaacatagcaaaaccccgtctctactaaaaatacaaaaatgagctgggtgtggtggcacgcacctgtggtcccagctactgaggaggctgagactggataattgcttggacctgggaggtggaggttgcagtgagctgagaccgagccactgcactccagcctgggcaacagcgagagactccatcttaaaagaaaaaaaaaagtcttccacgacagttatcttatagagacaagaagaagaagaaagaaggagaagaagaggaggaggtcctagctaatctcaagggcaaggacccaagggcaaggctctggtctgtctgagaaggagaatatggcagtgtgcagggaatggatcattttccctgcatgcccaaggagaattctgctttgactcaccttggaggtccttggtcaggccacgaaaccagtgatcacatctctcacccatctggggtgctggtgaccttggcagaagaaaggcttaaaccaggtcagcctgggggaaggggctggctccttccagggtcttcctccagattagatgttaactctccgtctcttgcttaaagtcttgtcagtggctctgaatgtgagggcagaaggaggaggatgctgtcaggggaggggacactaatggctcctgacctggcctagagataattcggggctccttcagcgggccctccctcctcagtgccctggaagtgtagggaggggtcagttggggatccccacaaattaaatggggaatgagaggagcaactgaaagtctcaaattcaggctatagatgggaccccagccccccatactctcccgtcctacatgagatgggcagtggagggccaggacagcaactccaagccagtgtaggttttggaggtagacagtgaggaggcttgcttctgtcctttgttagctgagtgcccttggacagcttacttacctactctcagcctcagtttccccatctctaaaataaggctaccaatacctaccttctctggccattgtcaggatgaatgaaagagctctgaaagtatttctgtaattagcagacatcagagattgttattctccaaggtaagaggcccccctagatccctggcggtgacagtgtcaagattctttttccctcctctgcggtgcccactccttttccagccttgtggctggctctcatcctcctttccgcaaccccccactcctccttgggaccaccttggcgggcccagcttctcgcagcctgccatattccataggtgcccccattctaaaacctgtaggggtgccctgcacaggcgcacggttggtcgaggtgggacaggtggcgggggtctccactggcctgcgtccgcgccccccaccctgtttaggagttcctgtttggagatggctccccctcgtcctcagctcgtctctgggctaagcaggggaggagagaaataaaaggtggggggcctggaagggggttcccaccttctcagtccgggacgcgagacgggaacgcagccctggcgccccaacgctgcaccaccgtgggtctccgagccgtgctcgcagtcgctgagatcctcggtgcggagaagatgtgcccctccaatccccaggccgtgatccccttcacccagacccggccaatccctcgcccgaggcgagcgggaggatgcggttctaggacccggaggcgccgccgagcgcgccgccgcctcggcctcgcctcggtggcctcccgctccggcaggtgaagcggcgccggccgccccctctgcggcaggtgaagcggctcggcagcccactccccgcccgccatggttgcgggggtcccccggccagcgcccgccccctccctccagcccgcccccctggggctgggtgcccggcggcggcggcggcgaactgcggtttgcgcgcacggggagcgacagcagaagttcgaaaatcgccgaggggggagccagcgccgcagcttcctgcccccggcccagccctctggccccggcggcctgcagcctgacttcctcccccaaccctgcagctcgccgcccggtcccacggacggggccgccccgatgggacgccgcgctccggcccctgcgcgccgctgagccgagcgccccccgctgccgagacccccgccgccaccgccagccgctgccccctcgcccccgcccgggccgggagcctcgtccccgtcccccggaaagctggatttccgaggctggaggcgcctggccggctgggtggggaccacc

SEQ ID NO: 18285 - DNA, 2300 bp, Homo sapien
aggacatacttgtttagaccttaagacccagctggggtggaggcgtcttagggagggagaccgggcgataactgaagaaagttttggggggagagtgctaagtcactctgaaaaaaaggccactgtcgctcccacctcctggagggggcagctgccggaccggggatctccaagcggcacctgagtccccgggggcggggacgcgcgcccagcccctgccgcgcccctgccgccccccgcccgcgcccgacccgcctccgggtcgcactcaccagggcgcggttgaacctctcctccagctctccggccgcgggcatcggctgcttgggaggcgcgggctgcttggggggcggcgcggcggggcccgcgggctgctcggcgctgccggccgcgttgcccatggtggtccccacccagccggccaggcgcctccagcctcggaaatccagctttccgggggacggggacgaggctcccggcccgggcgggggcgagggggcagcggctggcggtggcggcgggggtctcggcagcggggggcgctcggctcagcggcgcgcaggggccggagcgcggcgtcccatcggggcggccccgtccgtgggaccgggcggcgagctgcagggttgggggaggaagtcaggctgcaggccgccggggccagagggctgggccgggggcaggaagctgcggcgctggctcccccctcggcgattttcgaacttctgctgtcgctccccgtgcgcgcaaaccgcagttcgccgccgccgccgccgggcacccagccccaggggggcgggctggagggagggggcgggcgctggccgggggacccccgcaaccatggcgggcggggagtgggctgccgagccgcttcacctgccgcagagggggcggccggcgccgcttcacctgccggagcgggaggccaccgaggcgaggccgaggcggcggcgcgctcggcggcgcctccgggtcctagaaccgcatcctcccgctcgcctcgggcgagggattggccgggtctgggtgaaggggatcacggcctggggattggaggggcacatcttctccgcaccgaggatctcagcgactgcgagcacggctcggagacccacggtggtgcagcgttggggcgccagggctgcgttcccgtctcgcgtcccggactgagaaggtgggaacccccttccaggccccccaccttttatttctctcctcccctgcttagcccagagacgagctgaggacgagggggagccatctccaaacaggaactcctaaacagggtggggggcgcggacgcaggccagtggagacccccgccacctgtcccacctcgaccaaccgtgcgcctgtgcagggcacccctacaggttttagaatgggggcacctatggaatatggcaggctgcgagaagctgggcccgccaaggtggtcccaaggaggagtggggggttgcggaaaggaggatgagagccagccacaaggctggaaaaggagtgggcaccgcagaggagggaaaaagaatcttgacactgtcaccgccagggatctaggggggcctcttaccttggagaataacaatctctgatgtctgctaattacagaaatactttcagagctctttcattcatcctgacaatggccagagaaggtaggtattggtagccttattttagagatggggaaactgaggctgagagtaggtaagtaagctgtccaagggcactcagctaacaaaggacagaagcaagcctcctcactgtctacctccaaaacctacactggcttggagttgctgtcctggccctccactgcccatctcatgtaggacgggagagtatggggggctggggtcccatctatagcctgaatttgagactttcagttgctcctctcattccccatttaatttgtggggatccccaactgacccctccctacacttccagggcactgaggagggagggcccgctgaaggagccccgaattatctctaggccaggtcaggagccattagtgtcccctcccctgacagcatcctcctccttctgccctcacattcagagccactgacaagactttaagcaagagacggagagttaacatctaatctggaggaagaccctggaaggagccagccccttcccccaggctgacctggtttaagcctttcttctgccaaggtcaccagcaccccagatgggtgagagatgtgatcactggtttcgtggcctgaccaaggacctccaaggtgagtcaaagcagaattctccttgggcatgcagggaaaatg

SEQ ID NO: 18286 - DNA, 2300 bp, Homo sapien
actctttagccctgggcagcctcaggcagaggtcaaggttgtcaccctggggcaagcctcatgcccctgctggtggggaatgagaggaaccagggtcttagccaagtgtccttagattgggtttaacctgcccacaacaggatataagacaggctgagccaccccgggaagaaggtataaacacactggggttcctgggcacctggtagggggtaagccctggtgggtgctgctaccctaaatttctgctaggcacctccactttctccaccagcacaccctctctgacccacctgtgggtgtcccccctccacatcctggtactcagggactcccagtggcatttagtgtcagactcagccaatcacagccacaaatccaagcagggcaaacaagtcctacacacacatcagaacctcaccatttgacttgtggattttcccctggtctgaattattcacagggctcctccccatcagcgtgctaaacagaagattggggtcaggacctcaccccaagagcccacacccgcgaccatagacacacacttggcggaaagacagacccatgtccctccaaccaggttggcaggggtccaaggacccaccaccaatgcaggctctccagatggcccccagagactgtgtctcctcattctcccccctcccccatctgctcagctcagctcagctttgtgaagtcctatgcttggggagcggggagcagggcaggtggagagatggagaagtcaggggccagcctggtgtgaggcgtccctcagtgtccctgccctcctctaatcaagcaaggtgtcttcacaaggatggatccctcgccaccccatagctcctccaaactccccccagccttctcttgggagaggacagaagccaacattttcaggaactgttaggaggtgaccctctggagccatgctgaggatctagcacgtatggcctaatgaccagccaggcgaggggaaatgatgtcaaggagatggagggccaccaactgagccagaaccctctgcggcctgtgtctccgttgagcccccaccctcagacctgcagggactgggaaatgcatctgggagaaggcacagcctcattttgcctgtcacccagcgtccagcaagggaaggctgacagcaggcaggccaccaggcaattagttagaggagggagccagggccagggcgtcgggggtggggagagtgagagtgagcagctcttcctctccctacttctgccttatgcagggtcttggagacccctgagtctgctctggagcccccaccccactgaacatgttgactgtttccaggctcggcctgagctgctggttccctcccagagacctattccccagcgaccccgctccaattccccaggtaggcacagaggggggtggttccagattttgctccacccctagcctgggcgacccacccgtcctgaccccaccctccctcatcttactcccttcagtggcttggaaaggatgccccaagataaagacccacaggcaccctggctctgacatatggcggggtagaaacacagatacctcctggccatgatccgacaaccccattccccgcagcccaggcgcccaacaaatcaggacccaacacctccagcaggtctcccgctcccgggaggttgtaaccctttcatctttgactccagacacagaaaggcagatgccccagacccgcgcccggtggctgggcctgcgtgcagtggggaagggggcgacccgggacccctgtgcgtgccccgctcccaacttcttcacaggacatacttgtttagaccttaagacccagctggggtggaggcgtcttagggagggagaccgggcgataactgaagaaagttttggggggagagtgctaagtcactctgaaaaaaaggccactgtcgctcccacctcctggagggggcagctgccggaccggggatctccaagcggcacctgagtccccgggggcggggacgcgcgcccagcccctgccgcgcccctgccgccccccgcccgcgcccgacccgcctccgggtcgcactcaccagggcgcggttgaacctctcctccagctctccggccgcgggcatcggctgcttgggaggcgcgggctgcttggggggcggcgcggcggggcccgcgggctgctcggcgctgccggccgcgttgcccatggtggtccccacccagccggccaggcgcctccagcctcggaaatccagctttccgggggacggggacgaggctcccggcccgggcgggggcgagggggcagc

SEQ ID NO: 18287 - DNA, 2300 bp, Homo sapien
tgacggcagtgagggtggaaggcagtcgtcggcgcgcagggctcggagcagtgccttgcacagtaggcattctggtggagctggccacctgactgttggagatgtcattatgactagttactgcccctagaaatgccgctggggccattccagaaccataaagttccctgggtgggtgagggcctgggaggattcatgtcgggaagcagctgtcccctctgtggctctgtgctgggctcagccatccccttactccctggccaccgtcttttgtgccggccacggctccagtttccctggcactgctggccctgtctctcctctttgtcccttttctccaccttgctcccaccttagccctgccccaccctttgtctctgtggggtgggggtgactgagagacatcatcgagagagacagacagatggacagggacagagagacagagaatgacctcgcctcctttgtactcctgggcggttcccccaccccctgcccctgtggtagcaggagctgtcctggcccttggagggctgggggagggcggctgatgagacagcggtggtttcctcaatccaggctcactttcgcaataggggagaggaatgacgtattccacccccttcagccgctgggggcggggggcctggcggaggggcagtttcacctctccagcagggcctggccggaaagcttaggcaatggaggctgagcgcacccagcttcctgttgtctgggcctgacccaaggcagtgattttgggggtaaggtctggctggagccccagaactaggcccagcaccctggaggggaagctggctggggagtctcaggtgggtgtggccctctgactgctccagctgtggcgtctctgcagagccacatgactgagggtgtggagcgtgaaccaccatggctggtgagcccctcagggtctcccacatccccgatggagactcttactcaactcagatctccttgagggcaggaactgtctttttgggccagacatatagaaggctctcaataacctggggtttactaaattgaagggaactggcctcatcttttgggtctgtcagggagacaagccaagtctgggggtccagaaagcccctggtgctattgacacctggttgattcggcagccctgggctggcgctaacctgctccgtggtggcaggggcaccgtacccttgtcatctgtggccaggggaggaggacccaggcagagctctgttgacctttctcagctcctgggggagtcccagctgggcggcccccaccacagacccagggcactggctcttctccccagtgctgtggccgagtgaccttccccgcaaatctccccgcccctgcagctgtgatctggaactccctgcctgctgacatggccgccctcagctcccccagccctctccttcctttctcagccttctcctccaagtgggagggggctggagagggatgaggagaaggctgctgtccactctccttgcaagagatttcctggtgttcgtgaggcactggtgccctgggcctggtctgtgtacacgtgggatctggtggcacgtggaggtgggacactggccactggccactggccacactttggcctgactggtgatggctcccctgttagcttcccaccagaatgggggaagagatgatgccccaacaggaaaactggggcccagaagtgtctcaggtccccagagaggtaggctgacaacccacgctcctgcctgcacaccaggcaggccagggaggcggtgtggggggtgacacagcgcaggcagactcggattcaaatcctgctctcccttctagctggtgtgccccgggaaaggtgctctgtctctcttggccttggtcttctcattggataacactacgtatctcctagggtcagaggattcatgggggtgatgcacctcctagggagccaagtgggtttcccccaaatgcccattctcccctctccccttgttggggccccaggctcaggggtctttgtcctccctgtccccagaactgcatgaacttgcccccagacaaggtccagctgctgagccagtatgacaacgagaagaagtgggagctcatctgtgatcaggtaggtgccagcactgcccagccaccccttccctcccactgtcagtaccccaccctgaccaggctggggctatggggagaggggcaccgccatactgcccatggagccaagactctgctcagtggccaatgtagcacctggggagggtgctggggtctgcaggactcccaaatccctttct

SEQ ID NO: 18288 - DNA, 2300 bp, Homo sapien
caggtgctgggtccccttcacgaggcacctccagccgtccttccccgccgtatgccagctctggtccagggagggcaccacctgctggctagactgagttccttcccaccccagggcggggcctacggcaggactgacccctgcatagtccaccccaaagctgtgtcagggctgtggcctgggagcccatacaggaagggcaggctaggcctaggccaggggtttttaaagtggcccgatgctagctgggcgtggtggtgcacacccgtagtcccagctacctgggaggctgaggtaggaggatcgcttgagcccgggagtaggaggctccagtgaactatgttcgtgccacagcactccagcctgggccacagggcaagaaaagagaaagataaaagaaaagaaaaaaaaagaaagtggcttggtggactgtttgggtttatacctttggtatttcagaggcgtcttaagaaagcctgggacctcagatcggagctgagaatgggacactgggacgagaactggtcatttgccctggggtagctctggctggttttctgtacaccccattccatctccccaggagcggtttcaagtcaagaatccccccgcagcctacatccagaagctgaagagctatgtggatactggtggggtcagccgaaaggtagcagctgattggatgtccaacctgggggtacatgtctcccctctttactctgtccctttcccccacattttccaagctctgggcagctggagtaactgtgtgtacagacttttctatgtgcgtgtgtgggtgcatgtatgagtgtgtgtgtgtgtttgtgtgtctgtgtatttataggggaatgagagtgccctgggtgtgcactttagatattcctctgtacatcctgtgtgtgcttacatggacacattctgtgtacttatactgtgtgtatacacatgtgcagcccatatgtccatacataggtgtgtgtgtatactatgtgtgtactttgtccacttatggatgtgtgtgtgtaccattgagtccatatctaggagagagagagaatgtgtgtgtgtgtgtgtccatgtatggatgtgtggatattctatgtctgtatttagagtgcaggtatatggatgttcatgtgctgtgtgtgtgtgtgcgcacacacactctgcctctttgtgtgtgtgcatgtgtataccttgtgtgcccatgtatcgggggtgtgtgtaccctgcttgtctatgtatgggggagcacatgtagcctgtgagttcttattctgctgggcaggtgtgtggaggtggtgggggaggctgagcatgaaaggccacttgtgccagttggaggagggtgggcgctgctgcctgctgcctcaggacttggtgggcctgtgggaggccgggctccacccaccagccttccctgttctcggtccccagtttaagaggcgagttcaggagtccacgcaggtgctacgggagctggagacctccctgaggaccaaccacattgggtgagtgagggctcagatcttcctctctgggcctaggaaggctctgcttccaggcagctcctggagcttccccttcctactccccctgccccctgcacaaggctgtgcttgtggaccacctcctggaggtgtccaggacagcttcccctccccttcctgcccatgctctgactggcaccttgaggcatggctgggctgtgggacccacctgagtctcccagaatcctttggtatcattgggtctttgggggttgaaagggcaccccaggggtccttgctgtccctgttctgtgcccatgtggggcaggacctcctttctggctggagctcagggagccctgtgcccacaggtgggtgcaggagttcctcaatgaagagaaccgtggcctggatgtgctgctcgagtacctggcctttgcccagtgctctgtcacgtaagccccctgctcccagccctcatgccgctcctcagagctttgatccccgtctccctgcatctcacccactcccctggccagtttcaagccaggcagcccgagcctaccctggaaccctccacttggccttgagcgatgctccttccagaaggcctgcccccgacagggaggggtggcctctcttccaccactatgttcagcacagtgccaagaacacagcctcctcctcctgctccttagtctcacctgcaggtctgtctctccttgcgtttcctctgccccctcttaagtggcccctgcagtgttggcctccagccccattgcatcctgtccccaggtatgacatgga

SEQ ID NO: 18289 - DNA, 2300 bp, Homo sapien
gacctgtacttggaggtaagccctgtactgccccccagactgaactgcctgcccacggcagagtatggctgagtggttagcagcatgagtgctggggtcaggtagacctgggtttaaatcctggctctgccgttgcctgccgtgtgaccttggataggcctcttcctctctctcagtgtcagttttgccatctgtgaaataggagaatcatagaagataatcttgactctaaatgcatagaccagtgcctggcacataccaggcccccagtctatggaactgtttttgcaggcaccagaacaggtcaaggtagcccagagtctggctctgggagcaccagcctcagacaggtgctctgactccagcatataatggggaacccagagatacagggtagaagcaggagttggctcatgctggatgggcccaggacatggaggagttccctgccctggggaaggtgggcagagctgcttggtgcttcctggcccaggctgagcagagaagctgcagctccttctctgcttcctttgggaggtttcctggaggagcggggctttcggggttggatttttgaaagccaggattaacaaaaggtagagagcaggctggcgggggggtctatctgtgcaatggagtattattcagccacaagaaggaatgaagtattgacacatggtacaacatgggtgagccttgaaaacatgctaagtgaaagaagccagacacaaaaggtcacgtactctatgattgctttttttttgagatggagtcttgctctgttgcccaggctagagtgcagtgacacgatcttggctcactgcaacctctgcctcccgggttcaagtgattttccagcctccccagtagttgggattataggtgcccaccaccacactcggttaatttttgtatttttggtagagacgggggtttcaccacgttggccaggttggtcttgaactcctgaccttaggtgatccgtctgcctcagcctcccacagtgctgggattacaggcatgagccacctcgcccagctatctatgattgctttatatgaaatgtccagaatgggtaaatccataaagatggaaagtagattagtggttgccagggactgggggaggagagaatggcaagtgactgctgacgcctgtggggtttctttttgggctgatgacaatgttctggaattagataatggtgatggttgcacaaccttgtggctatactaagaatgactgaattgtacactttaaaatggattttatgatttgtgaattatatattaaaaaataaagaaaaagtaggctagggctcaggccccttcctctggatggcagtggtggcaggggggtggtttggaaagactcccccccacacacacaccaggcctcaccccactccttccatctgggggacagaggcttcggctcaccgagagtgacaagctgcaggtgcagatccaggcgtacctggacaatatttttgatgtgggggcgctgctggaggacacagagaccaagaacgctgtgctggagcacatggaggaactgcaggagcaagtggcgctggtgagagtgggtcctgaccccagcccagcacatcataggcccacagggcacacgggccacagggccacgcaagcatgggcactgggcagcagacagtgttataattgtgcattggaggtgctgcctgcctggccccagagcctggcctgaatccaaagcctgaatctgttgggtgtctttctcaatgagtgtgggtgagcaccctcactgacaggcccctcctctacccaggctcagaccccaggtgaactgaaatgggtgcctggggcccctcccagctcagtctcctcctctccctccacctcccgcatcactggtaccttggtttcctctccttatttgcttgggttcgagtgccaggctcggcccacccttggcacctgggctgagcggatctgggagcctcccccagtcttccaggcaggcatgcctgatgccgccccctcaccggcggtgccagtgccgggctgcgggtcggggctcaccatgtgctggtgctacagctgacagagcggcttcgggacgcggagaacgaatccatggccaagattgcagaactggaaaaacagctaagccaggcgcgcaaggagttggagaccctgcgggtgaggctggggcgggtggtaggccaggcgcccaagaacaggccagctgaggcttctaggcttgacatctccctccaccccgggaagaagatggaggcttggtgccaaggagcctgctgg

SEQ ID NO: 18290 - DNA, 2300 bp, Homo sapien
ctgcctcccgggttcaagtgattttccagcctccccagtagttgggattataggtgcccaccaccacactcggttaatttttgtatttttggtagagacgggggtttcaccacgttggccaggttggtcttgaactcctgaccttaggtgatccgtctgcctcagcctcccacagtgctgggattacaggcatgagccacctcgcccagctatctatgattgctttatatgaaatgtccagaatgggtaaatccataaagatggaaagtagattagtggttgccagggactgggggaggagagaatggcaagtgactgctgacgcctgtggggtttctttttgggctgatgacaatgttctggaattagataatggtgatggttgcacaaccttgtggctatactaagaatgactgaattgtacactttaaaatggattttatgatttgtgaattatatattaaaaaataaagaaaaagtaggctagggctcaggccccttcctctggatggcagtggtggcaggggggtggtttggaaagactcccccccacacacacaccaggcctcaccccactccttccatctgggggacagaggcttcggctcaccgagagtgacaagctgcaggtgcagatccaggcgtacctggacaatatttttgatgtgggggcgctgctggaggacacagagaccaagaacgctgtgctggagcacatggaggaactgcaggagcaagtggcgctggtgagagtgggtcctgaccccagcccagcacatcataggcccacagggcacacgggccacagggccacgcaagcatgggcactgggcagcagacagtgttataattgtgcattggaggtgctgcctgcctggccccagagcctggcctgaatccaaagcctgaatctgttgggtgtctttctcaatgagtgtgggtgagcaccctcactgacaggcccctcctctacccaggctcagaccccaggtgaactgaaatgggtgcctggggcccctcccagctcagtctcctcctctccctccacctcccgcatcactggtaccttggtttcctctccttatttgcttgggttcgagtgccaggctcggcccacccttggcacctgggctgagcggatctgggagcctcccccagtcttccaggcaggcatgcctgatgccgccccctcaccggcggtgccagtgccgggctgcgggtcggggctcaccatgtgctggtgctacagctgacagagcggcttcgggacgcggagaacgaatccatggccaagattgcagaactggaaaaacagctaagccaggcgcgcaaggagttggagaccctgcgggtgaggctggggcgggtggtaggccaggcgcccaagaacaggccagctgaggcttctaggcttgacatctccctccaccccgggaagaagatggaggcttggtgccaaggagcctgctggtgggcactgacccctcccgtggggttcgtaggagcgcttcagcgaatcgaccgccatggggccctccaggcgtcccccagagcctgagaaagcgcctcccgctgccccgacgcggccctcggccctggagctgaaggtggaggagctggaggagaaggggttaatccgtattctgcgggggccgggggatgctgtctccatcgagatcctccccgtcgctgtggcaactccgagcggcggtgatgctccgactccgggggtgccgaccggctcccccagcccaggtgcgcaggagcttcaggctggcggggatgcggggcagggtctggaggggagcccaggggcatctgtggcgggcagagttgggcgagggaggtttggattgtaggctcggctcaggtaggagcgcatgcgtagagcggagaggcggagaggggcccacccaagtcaaggagctgactcgcgcctcccccacgccgcgccctcgctggctcagatctcgcacctgcagcagagccggctcccggagcagcgccaccgccgccgcccccactgcccggcctcccctccccgcaggaagccccgccctctgcgcccccacaggccccgcctctccctggcagcccggagcccccgcctgcgccgccgctgcccggagacctgccgcccccacccccgccaccgccaccacctccgggcactgacgggccggtgcctccgccgccgccgccgccgccgccgcctcccggaggtcctcctgatgccctaggaagacgcgactcagaattgggcccaggtgagtggagtggaccaccttgggcccggggct

SEQ ID NO: 18291 - DNA, 2300 bp, Homo sapien
tcagcagctccaggaagtccaggcccagagcctgcaggtcgtacctgtgagagggaggagaggggagattgggcatcatccatacccaccagtccctgggagcagggctacccctgccttgattgaataaatgaatttcagtattttctatttgccaacagcttcagagagcaagaggtaggaatccagagaaactgggaactgggaatccagagaaactgggaactgggcagccagggtccccatcgtacgtcagcggcggacgcccggctgtaaatcccacagcctgggtgctcacagctaggcaaagaggcagggaggaagtgggacatcctaatttaggcatggactgagttttctccaccttaaaatggggacaagtttcctggaccagggttggtatgaagcctgatgaaagagctcaccattgaggctcttttactaggatctgcctgacaaccccagcctagcaaaggggccggactgcccacaaacccaggacagggacactcacgcctcaatggcttggcagatgcgctcggcccccaggttgcccttccgcagggtgatggccaagttcttggcccggttggcctcaatgagtgtcgccttgctgggggccttctgggctgccttactcttgagagcgctgaggtccaggctggggccttgggacttggtcttgaactgttcctcaaaatcactcatgtctagctcctgaaggtacagggtgaggaggcggagctgggtggggctggggtctggcactctcctggctgagcacagtgctagagccatccatctggccctgaccaggccaccagcagagaaccagtaacccagcctgaccacaggccctgatgggaggcacaggggaagcacagggagcctggaggaggagggccgcctaacccgggggatccagacttggggccacaagagctaaaggaagagctgaactggccagcggtaaaaaggagaaaggaaaagacattccaggcagaggaaacagaatggaacaatggcctagaggcaagagaatacatccttttggaaaactggaagtggaatcaggagggctgaagccttggctgcctgtgggaaagtggaaggaaagaggcctggaggcagaagaagtggggtgaggggaggcacccctctgcagggatggaggggaaggcgtttgggaaagcaggattctgcctgttagaggtattggtccagtctggcttaatgcccatccctgggcctccccctcctcatctgtgaaatggcttggagaaaatgactacccccagggcccagcctgatccaggcaactcccctcttcctccggtgcccacatggggagccaggcagggccactcacctgcagcaccttctcatcattgagctctgtgaagacagtgccggtgatctggctgggtttcagtgccacccagttcaagagtggcattcggaacttagtctggatgggcttcttggccttcactcctgggacgggggtttgggggcagtggtgagcactgggggtactactggagggaacctgggcccagggagggctgatggggcagccaggaggcagcaggaggcccccaggcagaggaccctggaggacactgaggcccaggcccctccctccatctccccccagccccgggcccaaggtggtccactccactcacctgggcccaattctgagtcgcgtcttcctagggcatcaggaggacctccgggaggcggcggcggcggcggcggcggcggaggcaccggcccgtcagtgcccggaggtggtggcggtggcgggggtgggggcggcaggtctccgggcagcggcggcgcaggcgggggctccgggctgccagggagaggcggggcctgtgggggcgcagagggcggggcttcctgcggggaggggaggccgggcagtgggggcggcggcggtggcgctgctccgggagccggctctgctgcaggtgcgagatctgagccagcgagggcgcggcgtgggggaggcgcgagtcagctccttgacttgggtgggcccctctccgcctctccgctctacgcatgcgctcctacctgagccgagcctacaatccaaacctccctcgcccaactctgcccgccacagatgcccctgggctcccctccagaccctgccccgcatccccgccagcctgaagctcctgcgcacctgggctgggggagccggtcggcacccccggagtcggagcatcaccgccgctcggagttgccacagcgacggggaggatctcgatggagacagcatcccc

SEQ ID NO: 18292 - DNA, 2300 bp, Homo sapien
ggccccaagtctggatcccccgggttaggcggccctcctcctccaggctccctgtgcttcccctgtgcctcccatcagggcctgtggtcaggctgggttactggttctctgctggtggcctggtcagggccagatggatggctctagcactgtgctcagccaggagagtgccagaccccagccccacccagctccgcctcctcaccctgtaccttcaggagctagacatgagtgattttgaggaacagttcaagaccaagtcccaaggccccagcctggacctcagcgctctcaagagtaaggcagcccagaaggcccccagcaaggcgacactcattgaggccaaccgggccaagaacttggccatcaccctgcggaagggcaacctgggggccgagcgcatctgccaagccattgaggcgtgagtgtccctgtcctgggtttgtgggcagtccggcccctttgctaggctggggttgtcaggcagatcctagtaaaagagcctcaatggtgagctctttcatcaggcttcataccaaccctggtccaggaaacttgtccccattttaaggtggagaaaactcagtccatgcctaaattaggatgtcccacttcctccctgcctctttgcctagctgtgagcacccaggctgtgggatttacagccgggcgtccgccgctgacgtacgatggggaccctggctgcccagttcccagtttctctggattcccagttcccagtttctctggattcctacctcttgctctctgaagctgttggcaaatagaaaatactgaaattcatttattcaatcaaggcaggggtagccctgctcccagggactggtgggtatggatgatgcccaatctcccctctcctccctctcacaggtacgacctgcaggctctgggcctggacttcctggagctgctgatgcgcttcctgcccacagagtatgagcgcagcctcatcacccgctttgagcgggagcagcggccaatggaggagctgtcagaggaggaccgcttcatgctatgcttcagccgcatcccgcgcctgccggagcgcatgaccacactcaccttcctgggcaacttcccggacacagcccagctgctcatgccggtgtgggcggagcgggcagggcggtgtgacttgggaggggatgggcaggaggcaactcccagcctgggctgcggcagggaacctgggagtacttgagcctccagatggaggaggctccaacttatcttacctcccccatcccacccccagcaactgaatgccatcattgcagcctcaatgtccatcaagtcctctgacaaactccgccagatcctggaggtgaggggccaggaggtggggcccacccttgcctgttctggatagtgtgagagggagacccaggccctgctcacctgcaatgcaacaaagataacattcccacttctcatgtacatgctgagaaggacaaatctaagggtggtggcgagtgggaaggggtacagcagccgtgtctgtagcagctcacctgggaccctgccggagggctcagtcccctttagcgttgctctgtgagcaacctcacctgctcagtggagggcccgggaaccagtagaaatggctggtggacaggcagtgaccacacagactaggaggggatgctggcaacaagttgtgggttggactagcagaggacaaaatttggtgtgcccatggtgttaaccgtgcacatgtgtgagacctgtgtgtacacacatgtacatgtgctgtggatctgaggggcctgtgcaggagtacagtaggggctgagtgtgtggggcctgctccttgccacctcttctcctccttgtgcaatatgcttaagcggtgtcctcagctctggcattctgctgagcctttctcctgcctctcccagattgtcctggcctttggcaactacatgaacagtagcaagcgtggggcagcctatggcttccggctccagagcctggatgcggtgaggaggggcccctggcttggggactggggctggggactggctggtggcctgtggcttacaatgggtccttgtgcagctgttggagatgaagtcgactgatcgcaagcagacgctgctgcactacctggtgaaggtcattgctgagaagtacccgcaactcacaggcttccacagcgacctgcacttcctggacaaggcgggctcaggtaggagacacacagatccttgggtgtggggaggggccgtgggctggggtaggttgggagaaagctagggggccacagtatataattggtg
